United States Patent Application Publication US 2020/0163878 A1 - sequence listing, part 6

SEQ ID NO: 32419 - RNA, 1701 nt, Artificial Sequence
  derived and/or modified CDS sequence (wt) from hemagglutinin__InfluenzaA__ABB04939
augaagacuaucauugcuuugagcuacauuuucugucugguuuucgcccaaaaacuucccggaaaugacaacagcacagcaacgcugugcuugggacaucaugcagugccaaacggaacgcuagugaaaacaaucacgaaugaucagauugaagugacuaaugcuacugagcugguucagaguuccucaacagguagaauaugcgacaguccucaccgaauccuugaugggaaaaacugcacacugauagaugcucuauugggagacccucauugugauggcuuccaaaaugagaaaugggaccuuuuuguugaacgcagcaaagcuuucagcaacuguuacccuuaugaugugccggauuaugccucccuuaggucacuaguugccucaucaggcacccuggaguuuaucaaugaaggcuucaauuggacuggagucacucagagugggggaagcuauacuugcaaaaggggaucuguuaacaguuucuucaguagauugaauugguuguacgaaucagaaagcaaauauccagugcugaacgugacuaugccaaacaauggcaaauuugacaaauuguacauuugggggguucaccacccgagcacggacaaagaacaaaccaaccuauauguucgagcaucagggagagucacagucucuaccaagagaagccagcaaacuguaaucccgaauaucgggucuagacccuggguaaggggucugucuaguagaauaaguaucuauuggacaauaguaaaaccgggagacauacuguuaauuaauagcauugggaaccuaauugcuccucgggguuacuucaaaauacgcacugggaaaagcucaauaaugaggucagaugcaccuauuggcaucugcaguucugaaugcaucacuccaaauggaagcauucccaaugacaaacccuuucaaaauguaaacaagaucacauauggggcaugucccagguauguuaagcaaaacacucugaaguuggcaacagggaugcggaauguaccagagaaacaaacuagaggcauauucggcgcaauagcagguuucauagaaaaugguugggagggaaugguagacgguugguacgguuucaggcaucaaaauucugagggcacaggacaagcagcagaucuuaaaagcacucaagcagcagucgaccaaaucaacgggaaacugaauagguuaaucgagaaaacgaacgagaaauuccaucaaaucgaaaaggaauucucagaaguagaagggagaauucaggaccucgagaaauauguugaagacacuaaaauagaucucuggucuuacaacgcggagcuucuugucgcccuggagaaccaacauacaauugaucugacugauucagaaaugaacaaacuguuugaaaaaacaaggaagcaacugagggaaaaugcugaggacaugggcaaugguugcuucaaaauauaccacaaaugugacaaugcuugcauagggucaaucagaaauggaacuuaugaccaugauguauacagagacgaagcauuaaacaaccgguuucagaucaaagguguugagcugaagucaggauacaaagacuggauccuauggauuuccuuugccauaucaugcuuuuugcuuuguguuguuuugcugggguucaucaugugggccugccaaaaaggcaacauuaggugcaacauuugcauuuga

SEQ ID NO: 32420 - RNA, 1701 nt, Artificial Sequence
  derived and/or modified CDS sequence (wt) from hemagglutinin__InfluenzaA__ABB04950
augaagacuaucauugcuuugagcuacauuuucugucugguuuucgcccaaaaacuucccggaaaugacaacagcacagcaacgcugugcuugggacaucaugcagugccaaacggaacgcuagugaaaacaaucacgaaugaucagauugaggugacuaaugcuacugagcugguucagagcuccucaacagguagaauaugcgacaguccucaccgaauccuugaugggaaaaacugcacacugauagaugcucuauugggagacccucauugugauggcuuccaaaaugagaaaugggaccuuuuuguugaacgcagcaaagcuuucagcaacuguuacccuuaugaugugccggauuaugccucccuuaggucacuaguugccucaucaggcacccuggaguuuaucaaugaaggcuucaauuggacuggagucacucagagugggggaagcuauacuugcaaaaggggaucuguuaacaguuucuucaguagauugaauugguuguacgaaucagaaagcaaauauccagugcugaacgugacuaugccaaauaauggcaaauuugacaaauuguacauuugggggguucaccacccgagcacggacaaagaacaaaccaaccuauauguucgagcaucagggaaagucacagucucuaccaagagaagccagcaaacuguaaucccgaauaucgggucuagacccuggguaaggggucugucuaguagaauaaguaucuauuggacaauaguaaaaccgggagacauacuguuaauuaauagcacuggaaaccuaauugcuccucgggguuacuucaaaauacgcacugggaaaagcucaauaaugaggucagaugcaccuauuggcaccugcaguucugaaugcaucacuccaaauggaagcauucccaaugacaaacccuuucaaaauguaaacaagaucacauauggagcaugucccagguauguuaagcaaaacacucugaaguuggcaacagggaugcggaauguaccagagaaacaaacuagaggcauauucggcgcaauagcagguuucauagaaaaugguugggagggaaugguagacgguugguacgguuucaggcaucaaaauucugagggcacaggacaagcagcagaucuuaaaagcacucaagcagcaaucgaccaaaucaacgggaaacugaacagguuaaucgagaaaacgaacgagaaauuccaucaaaucgaaaaggaauucucagaaguagaagggagaauucaggaccucgagaaauauguugaagacacuaaaauagaucucuggucuuacaacgcggagcuucuugucgcccuggagaaccaacauacaauugaucugacugauucagaaaugaacaaacuguuugaaaaaacaaggaaacaacugagggaaaaugcugaggacaugggcaaugguugcuucaaaauauaccacaaaugugacaaugcuugcauagggucaaucagaaauggaacuuaugaccaugauguauacagagacgaagcauuaaacaaccgguuucagaucaaagguguugagcugaagucaggauacaaagacuggauccuauggauuuccuuugccauaucaugcuuuuugcuuuguguuguuuugcugggguucaucaugugggccugccaaaaaggcaacauuaggugcaacauuugcauuuga

SEQ ID NO: 32421 - RNA, 1701 nt, Artificial Sequence
  derived and/or modified CDS sequence (wt) from hemagglutinin__InfluenzaA__ABB04983
augaagacuaucauugcuuugagcuacauuuuaugucugguuuucgcucaaaaacuucccggaaaugacaacagcacggcaacacugugccuggggcaccaugcagugccaaacggaacgcuagugaaaacaaucacgaaugaccaaauugaagugacuaaugcuacugagcugguucagaguuccucaacagauagaauaugcgacaguccucaccaaauccuugauggagaaaacugcacacuaauagaugcucuauugggagacccucauugugauggcuuccaaaauaaggaaugggaccuuuuuguugaacgcagcaaagccuacagcaacuguuacccuuaugaugugccggauuaugucucccuuaggucacuaguugccucaucaggcacgcuggaguuuaacaaugaaagcuucaauuggacuggagucgcucagaauggaacaagcucugcuugcaaaaggagaucugauaaaaguuucuuuaguagauugaauugguugcaccaauuaaaauacaaauauccagcacugaacgugacuaugccaaacaaugaaaaauuugacaaauuguacauuugggggguucaccacccggguacagacagugaccaaaucagcuuauaugcucaagcaucagggagagucacagucucuaccaaaagaagccaacaaacuguaaucccgaauaucggaucuagacccuggguaaggggugucuccagcagaauaagcaucuauuggacaauaguaaaaccgggagacauacuuuugauuaacagcacagggaaucuaauugcuccucgggguuacuucaaaauacgaagugggaaaagcucaauaaugaggucagaugcacccauuggcaaaugcaauucugaaugcaucacuccaaauggaagcauucccaaugacaaaccauuucaaaauguaaacaggaucacauaugggcccugucccagauauguuaagcaaaacacucugaaauuggcaacagggaugcggaaugugccagagaaacaaacuagaggcauauucggugcaaucgcgggcuucauagaaaaugguugggagggaaugauggacgguugguacgguuucaggcaucaaaauucugagggcacagggcaagcagcagaucuuaaaagcacucaagcagcaaucaaccaaaucaacgggaaacugaauagguuaaucgaaaaaacgaacgagaaauuccaucaaauugaaaaagaauucucagaaguagaagggagaauucaggaccucgagaaauauguugaggacacuaaaauagaucucuggucguacaaugcggagcuucuuguugcccuggagaaccaacauacaauugaucuaacugacucagaaaugaacaaacuguuugaaagaacaaagaagcaacugagggaaaaugcugaggauaugggcaaugguuguuucaaaauauaccacaaaugugacaaugccugcauagggucaaucagaaauggaacuuaugaccaugauguauacagagacgaagcauugaacaaccgguuccagaucaaagguguugagcugaagucaggauacaaagauuggauccuauggauuuccuuugccauaucauguuuuuugcuuuguauuguuuugcugggguucaucaugugggccugccaaaaaggcaacauuaggugcaacauuugcauuuga

SEQ ID NO: 32422 - RNA, 1701 nt, Artificial Sequence
  derived and/or modified CDS sequence (wt) from hemagglutinin__InfluenzaA__ABB04994
augaagacuaucauugcuuugagcuacauuuuaugucugguuuucgcucaaaaacuucccguaaaugacaacagcacggcaacgcugugccugggacaccaugcagugccaaacggaacgcuagugaaaacaaucacgaaugaccacauugaagugacuaaugcuacugagcugguucagaguuccucaacagguagaauaugcgacaguccucaccaaauccuugauggagaaaacugcacacuaauagaugcucuauugggagacccucauugugauggcuuccagaauaaggaaugggaccuuuuuguugaacgcagcacagccuacagcaacuguuacccuuaugaugugccggauuaugccucccuuaggucacuaguugccucauccggcacacuggaguuuaacaaugaaagcuucaauuggacuggagucgcucagaauggaacaagcucugcuugcaaaaggagaucuauuaaaaguuucuuuaguagauugaauugguugcaccaauuaaaauacaaauauccagcacugaacgugacuaugccaaacaaugaaaaauuugacaaauuguacauuugggggguucaccacccgaguacggacagugaccaaaucagccuauaugcucaagcaucagggagagucacagucucuaccaaaagaagccaacaaacuguaaucccgaauaucggaucuagacccuggguaaggggugucuccagcauaauaagcaucuauuggacaauaguaaaaccgggagacauacuuuugauuaacagcacagggaaucuaauugcuccucgggguuacuuuaaaauacgaagugggaaaagcucaauaaugaggucaaaugcacccauuggcaaaugcaauucugaaugcaucacuccaaauggaagcauucccaaugacaaaccauuucaaaauguaaacaggaucacauauggggccugucccagauauguuaagcaaaacacucugaaauuggcaacagggaugcggaauguaccagagaaacaaacuagaggcauauucggcgcaaucgcggguuucauagaaaaugguugggagggaaugguggacgguugguacgguuucaggcaucaaaauucugagggcacaggacaagcagcagaucuuaaaagcacucaagcagcaaucaaccaaaucaacgggaaacugaauagguuaaucgagaaaacaaacgagaaauuccaucaaauugaaaaagaauucucagaaguagaagggagaauucaggaccucgagaaauauguugaggacacuaaaauagaucucuggucguacaacgcggagcuucuuguugcccuggagaaccaacauacaauugaucuaacugacucagaaaugaacaaacuguuugaaagaacaaggaagcaacugagggaaaaugcugaggauaugggcaaugguuguuucaaaauauaccacaaaugugacaaugccugcauagggucaaucagaaauggaacuuaugaccaugauguauacagagacgaagcauuaaacaaccgguuccagaucaaagguguugagcugaagucaggauacaaagauuggauccuauggauuuccuuugccauaucauguuuuuugcuuuguguuguuuugcugggguucaucaugugggccugccaaaaaggcaacauuaggugcaacauuugcauuuga

SEQ ID NO: 32423 - RNA, 1701 nt, Artificial Sequence
  derived and/or modified CDS sequence (wt) from hemagglutinin__InfluenzaA__ABB05005
augaagacuaucauugcuuugagccacauuuuaugucugguuuucgcucaaaaacuucccguaaaugacaacagcacggcaacgcugugccugggacaccaugcagugccaaacggaacgcuagugaaaacaaucacgaaugaccacauugaagugacuaaugcuacugagcugguucagaguuccucaacagguagaauaugcgacaguccucaccaaauccuugauggagaaaacugcacacuaauagaugcucuauugggagacccucauugugauggcuuccaaaauaaggaaugggaccuuuuuguugaacgcagcacagccuacagcaacuguuacccuuaugaugugccggauuaugccucccuuaggucacuaguugccucauccggcacacuggaguuuaacaaugaaagcuucaauuggacuggagucgcucagaauggaacaagcucugcuugcaaaaggagaucuauuaaaaguuucuuuaguagauugaauugguugcaccaauuaaaauacaaauauccagcacugaacgugacuaugccaaacaaugaaaaauuugacaaauuguacauuugggggguucaccacccgaguacggacagugaccaaaucagccuauaugcucaagcaucagggagagucacagucucuaccaaaagaagccaacaaacuguaaucccggauaucggaucuagacccuggguaaggggugucuccagcagaauaagcaucuauuggacaauaguaaaaccgggagacauacuuuugauuaacagcacagggaaucuaauugcuccucgggguuacuucaaaauacgaagugggaaaagcucaauaaugaggucaaaugcacccauuggcaaaugcaauucugaaugcaucacuccaaauggaagcguucccaaugacaaaccauuucaaaauguaaacaggaucacauauggggccugucccagauauguuaagcaaaacacucugaaauuggcaacagggaugcggaauguaccagagaaacaaacuagaggcauauucggcgcaaucgcggguuucauagaaaaugguugggaaggaaugguggacgguugguacgguuucaggcaucaaaauucugagggcacaggacaagcagcagaucuuaaaagcacucaagcagcaaucaaccaaaucaacgggaaacugaauagguuaaucgagaaaacaaacgagaaauuccaucaaauugaaaaagaauucucagaaguagaagggagaauucaggaccucgagaaauauguugaggacacuaaaauagaucucuggucguacaacgcggagcuucuuguugcccuggagaaccaacauacaauugaucuaacugacucagaaaugaacaaacuguuugaaagaacaaggaagcaacugagggaaaaugcugaggauaugggcaaugguuguuucaaaauauaccacaaaugugacaaugccugcauagggucaaucagaaauggaacuuaugaccaugauguauacagagacgaagcauuaaacaaccgguuccagaucaaagguguugagcugaagucaggauacaaagauuggauccuauggauuuccuuugccauaucauguuuuuugcuuuguguuguuuugcugggguucaucaugugggccugccaaaaaggcaacauuaggugcaacauuugcauuuga

SEQ ID NO: 32424 - RNA, 1701 nt, Artificial Sequence
  derived and/or modified CDS sequence (wt) from hemagglutinin__InfluenzaA__ABB05183
augaagacuaucauugcuuugagcuacauuuuaugucugguuuucgcucaaaaacuucccguaaaugacaacagcacggcaacgcugugccugggacaccaugcagugccaaacggaacgcuagugaaaacaaucacgaaugaacacauugaagugacuaaugcuacugagcugguucagaguuccucaacagguagaauaugcgacaguccucaccaaauccuugauggagaaaacugcacacuaauagaugcucuauugggagacccucauugugauggcuuccaaaauaaggaaugggaccuuuuuguugaacgcagcacagccuacagcaacuguuacccuuaugaugugccggauuaugccucccuuaggucacuaguugccucauccggcacacuggaguuuaacaaugaaagcuucaauuggacuggagucgcucagaauggaacaagcucugcuugcaaaaggagaucuauuaaaaguuucuuuaguagauugaauugguugcaccaauuaaaauacaaauauccagcacugaacgugacuaugccaaacaaugaaaaauuugacaaauuguacauuugggggguucaccacccgaguacggacagugaccaaaucagccuauaugcucaagcaucagggagagucacagucucuaccaaaagaagccaacaaacuguaaucccgaauaucggaucuagacccuggguaaggggugucuccagcagaauaagcaucuauuggacaauaguaaaaccgggagacauacuuuugauuaacagcacagggaaucuaauugcuccucgggguuacuuuaaaauacgaagugggaaaagcucaauaaugaggucaaaugcacccauuggcaaaugcaauucugaaugcaucacuccaaauggaagcauucccaaugacaaaccauuucaaaauguaaacaggaucacauauggggccugucccagauauguuaagcaaaacacucugaaauuggcaacagggaugcggaauguaccagagaaacaaacuagaggcauauucggcgcaaucgcggguuucauagaaaaugguugggagggaaugguggacgguugguacgguuucaggcaucaaaauucugagggcacaggacaagcagcagaucuuaaaagcacucaagcagcaaucaaccaaaucaacgggaaacugaauagguuaaucgagaaaacaaacgagaaauuccaucaaauugaaaaagaauucucagaaguagaagggagaauucaggaccucgagaaauauguugaggacacuaaaauagaucucuggucguacaacgcggagcuucuuguugcccuggagaaccaacauacaauugaucuaacugacucagaaaugaacaaacuguuugaaagaacaaggaagcaacugagggaaaaugcugaggauaugggcaaugguuguuucaaaguauaccacaaaugugacaaugccugcauagggucaaucagaaauggaacuuaugaccaugauguauacagagacgaagcauuaaacaaccgguuccagaucaaagguguugagcugaagucaggauacaaagauuggauccuauggauuuccuuugccauaucauguuuuuugcuuuguguuguuuugcugggguucaucaugugggccugccaaaaaggcaacauuaggugcaacauuugcauuuga

SEQ ID NO: 32425 - RNA, 1701 nt, Artificial Sequence
  derived and/or modified CDS sequence (wt) from hemagglutinin__InfluenzaA__ABB05194
augaagacuaucauugcuuugagcuacauuuuaugucugguuuucgcucaaaaacuucccggaaaugacaacagcacggcaacgcugugccuggggcaccaugcagugccaaacggaacgcuagugaaaacaaucacgaaugaccaaauugaagugacuaaugcuacugagcugguucagaguuccucaacagguagaauaugcgacaguccucaccaaauccuugauggagaaaacugcacacuaauagaugcucuauugggagacccucauugugauggcuuccaaaauaaggaaugggaccuuuucguugaacgcagcaaagccuacagcaacuguuacccuuaugaugugccggauuaugccucucuuaggucacuaguugccucauccggcacacuggaguuuaacaaugaaagcuucaauuggacuggagucgcucagaauggaacaagcucugcuugcaaaaggaggucuaauaaaaguuucuuuaguagauugaauugguugcaccaauugaaauacaaauacccagcacugaacgugauuaugccaaacaaugaaaaauuugacaaauuguacauuugggggguucaccacccgaguacggacagugaccaaaucagccuauaugcucaagcaucagggagagucacagucucuaccaaaagaagccaacagacuguaaucccgaauaucggaucuagacccuggguaaggggugucuccagcagaauaagcaucuauuggacaauaguaaaaccgggagacauacuuuugauuaacagcacagggaaucuaauugcuccucgggguuacuucaaaauacgaagugggaaaagcucaguaaugaggucagaugcauccauuggcaaaugcaauucugaaugcaucacuccaaauggaagcauucccaaugacaaaccauuucaaaauguaaacaggaucacauauggggccugucccagauauguuaagcaaaacacucugaaauuggcaacagggaugcggaauguaccagagaaacaaacuagaggcauauucggugcaaucgcggguuucauagaaaaugguugggagggaaugguggacgguugguacgguuucaggcaucaaaauucugagggcacaggacaagcagcagaucuuaaaagcacucaagcagcaaucaaccaaaucaacgggaaacugaauagguuaaucgagaaaacgaacgagaaauuccaucaaauugaaaaagaauucucagaaguagaagggagaauucagaaccucgagaaauauguugaggacacuaaaauagaucucuggucguacaacgcggagcuucuuguugcccuggagaaccaacauacaauugaucuaacugacucagaaaugaacaaacuguuugaaagaacaaagaagcaacugagggaaaaugcugaggauaugggcaauggcuguuucaaaauauaccacaaaugugacaaugccugcauagggucaaucagaaauggaacuuaugaccaugauguauacagagacgaagcauuaaacaaccgguuccagaucaaagguguugagcugaagucaggauacaaagauuggauccuauggauuuccuuugccauaucauguuuuuugcuuuguguuguuuugcugggguucaucaugugggccugccaaaaaggcaacauuaggugcaacauuugcauuuga

SEQ ID NO: 32426 - RNA, 1701 nt, Artificial Sequence
  derived and/or modified CDS sequence (wt) from hemagglutinin__InfluenzaA__ABB05205
augaagacuaucauugcuuugagcuacauuuuaugucugguuuucgcucaaaaacuucccggaaaugacaacagcacggcaacgcugugccuggggcaccaugcagugccaaacggaacgcuagugaaaacaaucacgaaugaccaaauugaagugacuaaugcuacugagcugguucagaguuccucaacagguagaauaugcgacaguccucaccaaauccuugauggagaaaacugcacacuaauagaugcucuauugggagacccucauugugauggcuuccaaaauaaggaaugggaccuuuuuguugaacgcagcaacgccuacagcaacuguuacccuuaugaugugccggauuaugccucccuuaggucacuaguugccucauccggcacacuggaauuuaacagugaaagcuucaauuggacuggagucgcucagaauggaacaagcucugcuugcaaaaggagaucuaauaaaaguuucuuuaguagauugaauugguugcaccaauuaaaauacaaauauccagcacugaacgugacuaugccaaacaaugaaaaauuugacaaauuguacauuugggggguucaccacccggguacggacagugaccaaaucagccuauaugcucaagcaucagggagagucacagucucuaccaaaagaagccaacaaacuguaaucccgaauaucggaucuagacccuggguaaggggugucuccagcagaauaagcaucuauuggacaauaguaaaaccgggagacauacuuuugauuaacagcacagggaaucuaauugcuccucgggguuacuucaaaauacgaagugggaaaagcucaauaaugaggucagaugcacccauuggcaaaugcaauucugaaugcaucacuccaaauggaagcauucccaauaacaaaccauuucaaaauguaaacaggaucacauauggggccugucccagauauguuaagcaaaacacucugaaauuggcaacagggaugcggaauguaccagagaaacaaacuagaggcauauucggcgcaaucgcggguuucauagaaaaugguugggagggaaugguggacgguugguacgguuucaggcaucaaaauucugagggcacaggacaagcagcagaucuuaaaagcacucaagcagcaaucaaccaaaucaacgggaagcugaauagguuaaucgagaaaacgaacgagaaauuccaucaaauugaaaaagaauucucagaaguagaagggagaauucaggaccucgagaaauauguugaggacacuaaaauagaucucuggucguacaacgcggagcuucuuguugcccuggagaaccaacacacaauugaucuaacugacucagaaaugaacaaacuguuugaaagaacaaagaagcaacugagggaaaaugcugaggauaugggcaaugguuguuucaaaauauaccacaaaugugacaaugccugcauagggucaaucagaaauggaacuuaugaccaugauguauacagagacgaagcauuaaacaaccgguuccagaucaaagguguugagcugaagucaggauacaaagauuggauccuauggauuuccuuugccauaucauguuuuuugcuuuguguuguuuugcugggguucaucaugugggccugccaaaaaggcaacauuaggugcaacauuugcauuuga

SEQ ID NO: 32427 - RNA, 1701 nt, Artificial Sequence
  derived and/or modified CDS sequence (wt) from hemagglutinin__InfluenzaA__ABB05216
augaagacuaucauugcuuugagcuacauuuugugucugguuuucgcucaaaaacuucccguaaaugacaacagcacggcaacgcugugccugggacaccaugcagugccaaacggaacgcuagugaaaacaaucacgaaugaccacauugaagugacuaaugcuacugagcugguucagaguuccucaacagguagaauaugcgacaguccucaccaaauccuugauggagaaaacugcacacuaauagaugcucuauugggagacccucauugugauggcuuccaaaauaaggaaugggaccuuuuuguugaacgcagcacagccuacagcaacuguuacccuuaugaugugccggauuaugccucccuuaggucacuaguugccucauccggcacacuggaguuuaacaaugaaagcuucaauuggacuggagucgcucagaauggaacaagcucugcuugcaaaaggagaucuauuaaaaguuucuuuaguagauugaauugguugcaccaauuaaaauacaaauauccagcacugaacgugacuaugccaaacaaugaaaaauuugacaaauuguacauuugggggguucaccacccgaguacggacagugaccaaaucagccuauaugcucaagcaucagggagagucacagucucuaccaaaagaagccaacaaacuguaaucccgaauaucggaucuagacccuggguaaggggugucuccagcagaauaagcaucuauuggacaauaguaaaaccgggagacauacuuuugauuaacagcacagggaaucuaauugcuccucgggguuacuucaaaauacgaagugggaaaagcucaauaaugaggucaaaugcacccauuggcaaaugcaauucugaaugcaucacuccaaauggaagcauucccaaugacaaaccauuucaaaauguaaacaggaucacauauggggccugucccagauauguuaagcaaaacacucugaaauuggcaacagggaugcggaauguaccagagaaacaaacuagaggcauauucggcgcaaucgcggguuucauagaaaaugguugggaaggaaugguggacgguugguacgguuucaggcaucaaaauucugagggcacaggacaagcagcagaucuuaaaagcacucaagcagcaaucaaccaaaucaacgggaaacugaauagguuaaucgagaaaacaaacgagaaauuccaucaaauugaaaaagaauucucagaaguagaagggagaauucaggaccucgagaaauauguugaggacacuaaaauagaucucuggucguacaacgcggagcuucuuguugcccuggagaaccaacauacaauugaucuaacugacucagaaaugaacaaacuguuugaaagaacaaggaagcaacugagggaaaaugcugaggauaugggcaaugguuguuucaaaauauaccacaaaugugacaaugccugcauagggucaaucagaaauggaacuuaugaccaugauguauacagagacgaagcauuaaacaaccgguuucagaucaaagguguugagcugaagucaggauacaaagauuggauccuauggauuuccuuugccauaucauguuuuuugcuuuguguuguuuugcugggguucaucaugugggccugccaaaaaggcaacauuaggugcaacauuugcauuuga

SEQ ID NO: 32428 - RNA, 1701 nt, Artificial Sequence
  derived and/or modified CDS sequence (wt) from hemagglutinin__InfluenzaA__ABB46392
augaagacuaucauugcuuugagcuacauuuucugucuggcuuucgcccaagaccuuccaggaaaugacaacagcacagcaacgcugugccugggacaucaugcggugccaaacggaacgcuagugaaaacaaucacgaaugaucagauugaagugacuaaugcuacugaacugguucagaguuccucaacggguaaaauaugcgacaauccucaucgaauccuugauggaauaaacugcacacugauagaugcucuauugggggacccucauugugauggcuuucaaaaugagaaaugggaccuuuucguugaacgcagcaaagcuuucagcaacuguuacccuuaugaugugccagauuaugccucccuuaggucacuaguugccucgucaggcacccuggaguuuaucaaugaaggcuucaauuggacuggggucacucagaaugggggaagcagugcuugcaaaaggggaccugauaacgguuuuuucaguagacugaacugguuguacaaaucaggaagcacauauccagugcagaacgugaccaugccaaacaaugacaauucugacaaacuauacauuugggggguucaccacccgaacacggacaaagaacaaaccgaccuauauguucaagcaucagggaaagucacagucuccaccaagagaagccagcaaacuauaaucccgaaugucgggucuagacccuggguaaggggucugucuaguagaguaagcaucuauuggacaauaguuaaaccgggagacauacugguaauuaauaguaauggaaaccuaauugcuccucgggguuacuucaaaaugcgcacugggaaaagcucaauaaugaggucagaugcaccuauuggcaccugcagcucugaaugcaucacuccaaauggaagcauucccaaugacaagcccuuucaaaacguaaacaagaucacauauggggcaugucccaaguauguuaagcaaaacacucugaaguuggcaacagggaugcggaauguaccagagaaacaaacuagaggcauauucggcgcaauagcagguuucauagaaaaugguugggagggaaugauagacgguugguacgguuucaggcaucaaaauucugagggcacaggacaagcagcagaucuuaaaagcacucaaacagccaucgaccaaaucaaugggaaacugaauaggguaaucgagaagacgaacgagaaauuccaucaaaucgaaaaggaauucucagaaguagaagggagaauucaggaccucgagaaauacguugaagacacuaaaauagaucucuggucuuacaaugcggagcuucuugucgcucuggagaaccaacauacaauugaucugacugacucggaaaugaacaaacuguuugaaaaaacaaggaggcaacugagggaaaaugcugaggacaugggcaaugguugcuucaaaauauaccacaaaugugacaaugcuugcauagggucaaucagaaaugggacuuaugaccaugauguauacagagacgaagcauuaaacaaccgguuucagaucaaagguguugaacugaagucaggauacaaagacuggauccuguggauuuccuuugccauaucaugcuuuuugcuuuguguuguuuugcugggguucaucaugugggccugccagaagggcaacauuaggugcaacauuugcauuuga

SEQ ID NO: 32429 - RNA, 1701 nt, Artificial Sequence
  derived and/or modified CDS sequence (wt) from hemagglutinin__InfluenzaA__ABB46414
augaagacuaucauugcuuugagcuacauuuuaugucugguuuucgcucaaaaacuucccggaaaugacaacagcacggcaacgcugugccugggacaccaugcagugccaaacggaacgcuagugaaaacaaucacgaaugaccaaauugaagugacuaaugcuacugagcugguucagaguuccucaacagguagaauaugcgacaguccucaccgaauccuugauggagaaaacugcacacugauagaugcucuauugggagacccucauugugauggcuuccaaaauaaggaaugggaccuuuuuguugaacgcagcaaagccuacagcaacuguuacccuuaugaugugccggauuaugccucccuuaggucacuaguugccucauccggcacccuggaguuuaacaaugaaagcuucaauuggacuggagucgcucagaauggaacaagcucugcuugcaaaaggagaucuauuaaaaguuucuuuaguagauugaauugguugcaccaauuaaaauacaaauauccagcacugaaugugacuaugccaaacaaugacaaauuugacaaauuguacauuugggggguucaccacccgaguacggacagugaccaaaccagccuauaugcucaagcaucagggagagucacagucucuaccaaaagaagccaacaaacuguaaucccgaauaucggaucuagacccuggguaaggggugucuccagcagaauaagcaucuauuggacaauaguaaaaccgggagacauacuuuugauuaacagcacagggaaucuaauugcuccucgggguuacuucaaaauacgaagugggaaaagcucaauaaugaggucagaugcacccauuggcaaaugcaauucugaaugcaucacuccaaauggaagcauucccaaugacaaaccauuucaaaauguaaacaggaucacauauggggccugucccagauauguuaagcaaaacacucugaaauuggcaacagggaugcggaauguaccagagaaacaaacuagaggcauauucggugcaaucgcggguuucauagaaaaugguugggagggaaugguggacgguugguacgguuucaggcaucaaaauucugagggcacaggacaagcagcagaucuuaaaagcacucaagcagcaaucaaccaaaucaacgggaaacugaauagguuaaucgagaaaacgaacgagaaauuccaucaaauugaaaaagaauucucagaaguagaagggagaauucaggaccucgagaaauauguugaggacacuaaaauagaucucuggucguacaacgcggagcuucuuguugcccuggagaaccaacauacaauugaucuaacugacucagaaaugaacaaacuguuugaaagaacaaggaagcaacugagggaaaaugcugaggauaugggcaaugguuguuucaaaauauaccacaaaugugacaaugccugcauagggucaaucagaaauggaacuuaugaccaugauguauacagagacgaagcauuaaacaaccgguuccagaucaaagguguugagcugaagucaggauacaaagauuggauccuauggauuuccuuugccauaucauguuuuuuguuuuguguuguuuugcugggguucaucaugugggccugccaaaaaggcaacauuaggugcaacauuugcauuuga

SEQ ID NO: 32430 - RNA, 1701 nt, Artificial Sequence
  derived and/or modified CDS sequence (wt) from hemagglutinin__InfluenzaA__ABB46425
augaagacuaucauugcuuugagcuacauuuuaugucugguuuucgcucaaaaacuucccggaaaugacaacagcacggcaacgcugugccugggacaccaugcagugccaaacggaacgcuagugaaaacaaucacgagugaccaaauugaagugacuaaugcuacugagcugguucagaguuccucaacagguaaaauaugcgacagcccucaccgaauccuugauggagaaaacugcacacugauagaugcucuauugggagacccucauugugauggcuuccaaaauaaggaaugggaccuuuuuguugaacgcagcaaagccuacagcaacuguuacccuuaugaugugccggauuaugccucccuuaggucacuaguugccucauccggcacccuggaguuuaacaaugaaagcuucaauuggacuggagucgcucagaauggaacaagcuuugcuugcaaaaggagaucuauuaaaaguuucuuuaguagauugaauugguugcaccaauuaaaauacaaauauccagcacugaacgugacuaugccaaacaaugacaaauuugacaaauuguacauuugggggguucaccacccgaguacggacagugaccaaaccagccuauaugcucaagcaucagggagagucacagucucuaccaaaagaagccaacaaacuguaaucccgaauaucggaucuagacccuggguaaggggugucuccagcagaauaagcaucuauuggacaauaguaaaaccgggagacauacuucugauuaacagcacagggaaucuaauugcuccucgggguuacuucaaaauacgaagugggaaaagcucaauaaugaggucagaugcacccauuggcaaaugcaauucugaaugcaucacuccaaauggaagcauccccaaugacaaaccauuucaaaauguaaacaggaucacauauggggccugucccagauauguuaagcaaaacacucugaaauuggcaacagggaugcggaauguaccagagaaacaaacuagaggcauauucggcgcaaucgcagguuucauagaaaaugguugggagggaaugguagacgguugguacgguuucaggcaucaaaauucugagggcacaggacaagcagcagaucuuaaaagcacucaagcagcaaucaaucaaaucaacgggaaacugaauagguuaaucgagaaaacgaacgagaaauuccaucaaauugaaaaagaauucucagaaguagaagggagaauucaggaccucgagaaauauguugaggacacuaaaauagaucucuggucguacaacgcggagcuucuuguugcccuggagaaccaacauacaauugaucuaacugacucagaaaugaacaaacuguuugaaagaacaaggaagcaacugagggaaaaugcugaggauaugggcaaugguuguuucaaaauauaccacaaaugugacaaugccugcauagggucaaucagaaauggaacuuaugaccaugauguauacagagacgaagcauuaaacaaccgguuccagaucaaagguguugagcugaagucaggauacaaagauuggauccuauggauuuccuuugccauaucauguuuuuugcuuuguguuguuuugcugggguucaucaugugggccugccaaaaaggcaacauuaggugcaacauuugcauuuga

SEQ ID NO: 32431 - RNA, 1701 nt, Artificial Sequence
  derived and/or modified CDS sequence (wt) from hemagglutinin__InfluenzaA__ABB46436
augaagacuaucauugcuuugagcuacauucuaugucugguuuucgcucaaaaacuucccggaaaugacaacagcacggcaacgcugugccuugggcaccaugcaguaccaaacggaacgauagugaaaacaaucacgaaugaccaaauugaaguuacuaaugcuacugagcugguucagaguuccucaacagguggaauaugcgacaguccucaucagauccuugauggagaaaacugcacacuaauagaugcucuauugggagacccucagugugauggcuuccaaaauaagaaaugggaccuuuuuguugaacgcagcaaagccuacagcaacuguuacccuuaugaugugccggauuaugccucccuuaggucacuaguugccucauccggcacacuggaguuuaacaaugaaagcuucaauuggacuggagucacucaaaauggaacaagcucugcuugcaaaaggagaucuaauaacaguuucuuuaguagauugaauugguugacccacuuaaaauucaaauacccagcauugaacgugacuaugccaaacaaugaaaaauaugacaaauuguacauuugggggguucaccacccggguacggacaaugaccaaaucagccuauaugcucaagcaucaggaagaaucacagucucuaccaaaagaagccaacaaacuguaaucccgaauaucggaucuagacccaggguaagggauaucccaagcaggauaagcaucuauuggacaauaguaaaaccgggagacauacuuuugauuaacagcacagggaaucuaauugcuccucgggguuacuucaaaauacgaagugggaaaagcucaauaaugagaucagaugcacccauuggcaaaugcaauucugaaugcaucacuccaaauggaagcauucccaaugacaaaccauuucaaaauguaaacaggaucacauauggagccugucccagauauguuaagcaaaacacucugaaauuggcaacagggaugcgaaauguaccagagaaacaaacuagaggcauauuuggcgcaaucgcggguuucauagaaaaugguugggagggaaugguggaugguugguacgguuucaggcaucaaaauucugagggaauaggacaagcagcagaucucaaaagcacucaagcagcaaucaaccaaaucaaugggaagcugaauagguugaucgggaaaaccaacgagaaauuccaucagauugaaaaagaauucucagaaguagaagggagaauucaggaccucgagaaauauguugaggacacuaaaauagaucucuggucauacaacgcggagcuucuuguugcccuggagaaccaacauacaauugaucuaacugacucagaaaugaacaaacuguuugaaagaacaaagaagcaacugagggaaaaugcugaggauaugggcaaugguuguuucaaaauauaccacaaaugugacaaugccugcauagggucaaucagaaauggaacuuaugaccaugauguauacagagaugaagcauuaaacaaccgguuccagaucaaagguguugagcugaagucaggauacaaagauuggauccuauggauuuccuuugccauaucauguuuuuugcuuuguguugcuuuguugggguucaucaugugggccugccaaaaaggcaacauuaggugcaacauuugcauuuga

SEQ ID NO: 32432 - RNA, 1701 nt, Artificial Sequence; identical to SEQ ID NO: 32365
  derived and/or modified CDS sequence (wt) from hemagglutinin__InfluenzaA__ABB46447

SEQ ID NO: 32433 - RNA, 1701 nt, Artificial Sequence
  derived and/or modified CDS sequence (wt) from hemagglutinin__InfluenzaA__ABB46458
augaagacuaucauugcuuugagcuacauucuaugucugguuuucgcucaaaaacuucccggaaaugacaacagcacggcaacgcugugccuugggcaccaugcaguaccaaacggaacgauagugaaaacaaucacgaaugaccaaauugaaguuacuaaugcuacugagcugguucagaguuccucaacagguggaauaugcgacaguccucaucagauccuugauggagaaaacugcacacuaauagaugcucuauugggagacccucagugugauggcuuccaaaauaagaaaugggaccuuuuuguugaacgcagcaaagccuacagcaacuguuacccuuaugaugugccggauuaugccucccuuaggucacuaguugccucauccggcacacuggaguuuaacaaugaaagcuucaauuggacuggagucacucaaaauggaacaagcucugcuugcaaaaggagaucuaauaacaguuucuuuaguagauugaauugguugacccacuuaaaauucaaauacccagcauugaacgugacuaugccaaacaaugaaaaauuugacaaauuguacauuugggggguucaccacccggguacggacaaugaccaaaucagccuauaugcucaagcaucaggaagaaucacagucucuaccaaaagaaaccaacaaacuguaaucccgaacaucggaucuagacccaggguaagggauauccccagcagaauaagcaucuauuggacaauaguaaaaccgggagacauacuuuugauuaacagcacagggaaucuaauugcuccucgggguuacuucaaaauacgaagugggaaaagcucaauaaugagaucagaugcacccauuggcaaaugcaagucugaaugcaucacuccaaauggaagcauucccaaugacaaaccauuucaaaauguaaacaggaucacauauggggccugucccagauauguuaagcaaaacacucugaaauuggcaacagggaugcgaaauguaccagagaaacaaacuagaggcauauuuggcgcaaucgcggguuucauagaaaaugguugggagggaaugguggaugguugguacgguuucaggcaucaaaauucugagggaauaggacaagcagcagaucucaaaagcacucaagcagcaaucaaccaaaucaaugggaagcugaauagguugaucgggaaaaccaacgagaaauuccaucagauugaaaaagaauucucagaaguagaagggagaauucaggaccucgagaaauaugucgaggacacuaaaauagaucucuggucauacaacgcggagcuucuuguugcccuggagaaccaacauacaauugaucuaacugacucagaaaugaacaaacuguuugaaagaacaaagaagcaacugagggaaaaugcugaggauaugggcaaugguuguuucaaaauauaccacaaaugugacaaugccugcauagggucaaucagaaauggaacuuaugaccaugauguauacagagaugaagcauuaaacaaccgguuccagaucaaagguguugagcugaagucaggauacaaagauuggauccuauggauuuccuuugccauaucauguuuuuugcuuuguguugcuuuguugggguucaucaugugggggugccaaaaaggcaacauuaggugcaacauuugcauuuga

SEQ ID NO: 32434 - RNA, 1701 nt, Artificial Sequence
  derived and/or modified CDS sequence (wt) from hemagglutinin__InfluenzaA__ABB51961
augaagacuaucauugcuuuaagcuacauucuaugucugguuuucgcucaaaagcuucccggaaaugacaacagcacggcaacgcugugccuugggcaccaugcaguaccaaacggaacgauagugaaaacaaucacgaaugaccaaauugaaguuacuaaugcuacugagcugguucagaguuucucaacaggugggauaugcgacaguccucaucagauccuugauggagaaaacugcacacuaauagaugcucuauugggagacccucagugugauggcuuccaaaauaagaaaugggaccuuuuuguugaacgcagcaaagccuacagcaacuguuacccuuaugaugugccggauuaugccugcgugaggucacuaguugccucauccggcacacuggaguuuaacaaugaaagcuucaauugggcuggagucacucagaauggaacaagcucugcuugcaaaaggagaucuaauaaaaguuucuuuaguagauugaauugguugacccacuuaaaauacaaauacccagcauugaacgugacuaugccaaacaaugaaaaauuugacaaauuguacauuugggggguucaccacccggguacggacagugaccaaaucagccuauaugcucaagcaucaggaagaaucacagucucuacccaaagaugcaaacaacuuguaaucccgaauaucggaucuagacccaggguaagggaugucuccagcagaauaagcaucuauuggacaauaguaaacccgggagacauacuuuugauuaacagcacagggaaucuaauugcuccucgggguuacuucaaaauacgaagugggaaaagcucaauaaugagaucagaugcacccauuggcaaaugcaauucugaaugcaucacuccaaauggaagcauucccaaugacaaaccauuucaaaauguaaacaggaucacauauggggccugucccagauauguuaagcaaaacacucugaaauuggcaacagggaugcgaaauguaccagagaaacaaacuagaggcauauuuggcgcaaucgcggguuucauagaaaaugguugggagggaaugguggacgguugguacgguuucaggcaucaaaauucugagggcacaggacaagcagcagaucucaaaagcacucaagcagcaaucaaccaaaucaaugggaaacugaauagguuaaucgggaaaacaaacgagaaauuccaucagauugaaaaagaauucucagaaguagaagggagaauucaagaccucgagaaauauguugaggacacuaaaauagaucucuggucauacaacgcggagcuucuuguugcccuggaaaaccaacauacaauugaucuaacugacucagaaaugaacaaacuguuugaaagaacaaagaagcaacugagggaaaaugcugaggauaugggcaaugguuguuucaaaauauaccacaaaugcgacaaugccugcauagagucaaucagaaauggaacuuaugaccaugauguauacagagaugaagcauuaaacaaccgguuccagaucaaagguguugagcugaagucaggauacaaagauuggauccuauggauuuccuuugccauaucauguuuuuugcuuuguguugcuuuguugggguucaucaugugggccugccaaaaaggcaacauuaggugcaacauuugcauuuga

SEQ ID NO: 32435 - RNA, 1698 nt, Artificial Sequence
  derived and/or modified CDS sequence (wt) from hemagglutinin__InfluenzaA__ABB51962
augaaagcaaaacuacugguccuguuauguacauuuacagcuacauacgcagacacaauauguauaggcuaccaugccaacaacucaaccgacacuguugacacaguacuugagaagaaugugacagugacacacucugucaaccuacuugaggacagucacaauggaaaacuaugucuacuaaaaggaauagccccacuacaauuggguaauugcagcguugccggauggaucuuaggaaacccagaaugcgaauuacugauuuccaaggaaucaugguccuacauuguagaaacaccaaaucccgagaauggaacauguuacccaggguauuucgccgacuaugaggaacugagggagcaauugaguucaguaucuucauuugaaagauucgaaauauuccccaaaggaagcucauggcccaaccacaccgugaccggaguaucagcaucaugcucccauaaugggaaaagcaguuucuacagaaauuugcuauggcugacggggaaaaaugguuuguauccaaaccugagcauguccuauguaaacaacaaagagaaagaaguccuugugcuaugggguguucaucacccaccuaacauagggaaccaaagggcccucuaccauacagaaaaugcuuaugucucuguagugucuucacauuauagcagaagauucaccccagaaauagccaaaagacccaaaguaagagaucaagaaggaagaaucaacuacuacuggacucugcuggaacccggggacacaauaauauuugaggcaaauggaaaucuaauagcgccaugguaugcuuucgcaaugaguagaggcuuuggaucaggaaucagcaccucaaaugcaccaaugggugaaugugaugcgaaauuucaaacaccucagggagguauaaacauuagucuuccuuuccagaauguacacccaguuacaauaggagaguguccaaauuaugucaggagugcaaaauuaaggaugguuacaggacuaaggaacaucccauccauucaauccagagguuuguuuggagccauugccgguuucauugaagggggguggacuggaaugguagaugggugguaugguuaucaucaucagaaugagcaaggaucuggcuaugcugcagaucaaaaaagcacacaaaaugccauuaacgggauuacaaacaaggugaauucuguaauugagaaaaugaacacucaauucacagcugugggcaaagaauucaacaaauuagaaagaaggauggaaaacuuaaauaaaaaaguugaugauggguuucuagacauuuggacauauaaugcagaauuguugguucuacuggaaaaugaaaggacuuuggauuuccaugacuccaaugugaagaaucuguaugagaaaguaaaaagccaauuaaagaauaaugccaaagaaauaggaaacggguguucugaauucuaucacaaguguaacaaugaaugcauggaaagugugaaaaauggaacuuaugacuauccaaaauauuccgaagaaucaaaguuaaacagggagaaaauugauggaguaaaauuggaaucaaugggagucuaucagauucuggcgaucuacucaacugucgccaguucccugguucuuuuggucucccugggggcaaucagcuucuggauguguuccaaugggucuuugcaguguagaauaugcaucuga

SEQ ID NO: 32436 - RNA, 1701 nt, Artificial Sequence
  derived and/or modified CDS sequence (wt) from hemagglutinin__InfluenzaA__ABB51963
augaagacuaucauugcuuugagcuacauucuaugucugguuuucgcucaaaaacuucccggaaaugacaacagcacggcaacgcugugccuugggcaccaugcaguaccaaacggaacgauagugaaaacaaucacgaaugaccgaauugaaguuacuaaugcuacugagcugguucagaguuccucaacagguggaauaugcgacaguccucaucagauccuugauggagaaaacugcacacuaauagaugcucuauugggagacccucagugugauggcuuccaaaauaagaaaugggaccuuuuuguugaacgcagcaaagccuacagcaacuguuacccuuaugaugugccggauuaugccucccuuaggucacuaguugccucauccggcacacuggaguuuaacaaugaaagcuucaauuggacuggagucacucaaaauggaacaagcucugcuugcaaaaggagaucuaauaacaguuucuuuaguagauugaauugguugacccacuuaaaauucaaauacccagcauugaacgugacuaugccaaacaaugaaaaauuugacaaauuguacauuugggggguucaccacccggguacggacaaugaccaaaucagccuauaugcucaagcaucaggaagaaucacagucucuaccaaaagaagccaacaaacuguaaucccgaauaucggaucuagacccaggguaaggcauauccccagcagaauaagcaucuauuggacaauaguaaauccgggagacauacuuuugauuaacagcacagggaaucuaauugcuccucgggguuacuucaaaauacgaagugggaaaagcucaauaaugagaucagaugcacccauuggcaaaugcaauucugaaugcaucacuccaaauggaagcauucccaaugacaaaccauuucaaaauguaaacaggaucacauauggggccugucccagauauguuaagcaaaacacucugaaauuggcaacagggaugcgaaauguaccagagaaacaaaauagaggcauauuuggcgcaaucgcggguuucauagaaaaugguugggagggaaugguggaugguugguacgguuucaggcaucaaaauucugagggaauaggacaagcagcagaucucaaaagcacucaagcagcaaucaaccaaaucaaugagaagcugaauagguugaucgggaaaaccaacgagaaauuccaucagauugaaaaagaauucucagaaguagaagggagaauucaggaccucgagaaauaugucgaggacacuaaaauagaucucuggucauacaaugcggagcuucuuguugcccuggagaaccaacauacaauugaucuaacugacucagaaaugaacaaacuguuugaaagaacaaagaagcaacugagggaaaaugcugaggauaugggcaaugguuguuucaaaguauaccacaaaugugacaaugccugcauagggucaaucagaaauggaacuuaugaccauaauguauacagagaugaagcauuaaacaaccgguuccagaucaaagguguugagcugaagucaggauacaaagauuggauccuauggauuuccuuugccauaucauguuuuuugcuuuguguugcuuuguugggguucaucaugugggccugccaaaaaggcaacauuaggugcaacauuugcauuuga

SEQ ID NO: 32437 - RNA, 1701 nt, Artificial Sequence
  derived and/or modified CDS sequence (wt) from hemagglutinin__InfluenzaA__ABB51964
augaagacuaucauugcuuugagcuacauucuaugucugguuuucgcucaaaaacuucccggaaaugacaacagcacggcaacgcugugccuugggcaccaugcaguaccaaacggaacgauagugaaaacaaucacgaaugaccaaauugaaguuacuaaugcuacugagcugguucagaguuccucaacagguggaauaugcgacaguccucaucagauccuugauggagaaaacugcacacuaauagaugcucuauugggagacccucagugugauggcuuccaaaauaagaaaugggaccuuuuuguugaacgcagcaaagccuacagcaacuguuacccuuaugaugugccggauuaugccucccuuaggucacuaguugccucauccggcacacuggaguuuaacaaugaaagcuucaauuggacuggagucacucaaaauggaacaagcucugcuugcaaaaggagaucuaauaacaguuucuuuaguagauugaauugguugacccauuuaaaauucaaauacccagcauugaacgugacuaugccaaacaaugaaaaauuugacaaauuguacauuugggggguucaccacccggguacgaacaaugaccaaaucagccuauaugcucaagcaucaggaagaaucacagucucuaccaaaagaagccaacaaacuguaaucccgaauaucggaucuagacccaggguaagggauauccccagcagaauaagcaucuauuggacaauaguaaaaccgggagacauacuuuugauuaacagcacagggaaucuaauugcuccucgggguuacuucaaaauacgaagugggaaaagcucaauaaugagaucagaugcacccauuggcaaaugcaauucugaaugcaucacuccaaauggaagcauucccaaugacaaaccauuucaaaauguaaacaggaucacauacggggccugucccagauauguuaagcaaaacacucugaaauuggcaacagggaugcgaaauguaccagagaaacaaacuagaggcauauuuggcgcaaucgcggguuucauagaaaaugguugggagggaaugguggaugguugguacgguuucaggcaucaaaauucugagggaauaggacaagcagcagaucucaaaagcacucaagcagcaaucaaccaaaucaaugggaagcugaauagguugaucgggaaaaccaacgagaaauuccaucagauugaaaaagaauucucagaaguagaagggagaauucaggaccucgagaaauauguugaggacacuaaaauagaucucuggucauacaacgcggagcuucuuguugcccuggagaaccaacauacaauugaucuaacugacucagaaaugaacaaacuguuugaaagaacaaagaagcaacugagggaaaaugcugaggauaugggcaaugguuguuucaaaauauaccacaaaugugacaaugccugcauagggucaaucagaaauggaacuuaugaccaugauguauacagagaugaagcauuaaacaaccgguuccagaucaaagguguugagcugaagucaggauacaaagauuggauccuauggauuuccuuugccauaucauguuuuuugcuuuguguugcuuuguugggguucaucaugugggccugccaaaaaggcaacauuaggugcaacauuugcauuuga

SEQ ID NO: 32438 - RNA, 1698 nt, Artificial Sequence
  derived and/or modified CDS sequence (wt) from hemagglutinin__InfluenzaA__ABB53603
augaaaguaaaacuacugauccuguuauguacauuuacagcuacauaugcagacacaauauguauaggcuaccaugccaacaacucaaccgacacuguugacacaguacuugagaagaaugugacagugacacacucugucaaccuacuugaggacagucacaauggaaaacugugccuacuaaaaggaauagccccccuacaauuggguaauugcagcguugccggauggaucuuaggaaacccagaaugcgaauuacugauuuccaaggaaucaugguccuacauuguagaaacaccaaauccugagaauggagcauguuacccaggguauuucgccgacuaugaggagcuaagggagcaauugaguucaguaucuucauuugagagauucgaaauauuccccaaagaaagcucauggcccaaccacaccguaaccggaguaucagcaucaugcucccauaaugggaaaagcaguuuuuacagaaauuugcuauggcugacggggaagaaugguuuguacccaaaccugagcaaguccuaugcaaacaacaaaaagaaagaaguccucauacuaugggguguucaucacccgccuaacauagggaaccaaaggacccucuauuacacagaaaaugcuuaugucucuguagugucuucacauuauagcagaagauucaccccagaaauaaccaaaaggcccaaaguaagagaucaggaaggaagaaucaacuacuacuggacucugcuggaacccggggauacaauaauauuugaggcaaauggaaaucuaauagcgccaugguaugcuuucgcacugaguagaggcuuuggaucaggaaucaucaccucaaaugcaccaauggaugaaugugaugcgaagugucaaacaccucagggagcuauaaacagcagucuuccuuuccagaauguacacccagucacaauaggagaguguccaaaguaugucaggagugcaaaauuaaggaugguuacaggacuaaggaacaucccauccauucaauccagagguuuguuuggagccauugccgguuucauugaagggggguggacuggaaugguagaugggugguaugguuaucaucaucagaaugagcaaggaucuggcuaugcugcagaucaaaaaagcacacaaaaugccauuaacgggauuacaaacaaggugaauucuguaauugagaaaaugaacacucaauucacagcugugggcaaagaauucaacaaauuggaaagaaggauggaaaacuuaaauaaaaagguugaugauggguuucuagacauuuggacauauaaugcagaauuguugguucuacuggaaaaugaaaggacuuuggauuuccacgacuccaaugugaagaaucuguacgagaaaguaaaaagccaauuaaagaauaaugccaaagaaauaggaaauggguguuuugaauucuaucacaaguguaacaaugaaugcauggagagugugaaaaauggaacuuaugacuauccaaaauauuccgaagaaucaaaguuaaacagggaaaaaauugauggagugaaauuggacucaaugggggucuaucagauucuggcgaucuacucaacugucgccaguucccugguucuuuuggucucccugggggcaaucagcuucuggauguguuccaaugggucuuugcaguguagaauaugcaucuga

SEQ ID NO: 32439 - RNA, 1701 nt, Artificial Sequence
  derived and/or modified CDS sequence (wt) from hemagglutinin__InfluenzaA__ABB53614
augaagacuaucauugcuuugagcuacauucuaugucugguuuucgcucaaaaacuucccggaaaugacaacagcacggcaacgcugugccuugggcaccaugcaguaccaaacggaacgauagugaaaacaaucacgaaugaccaaauugaaguuacuaaugcuacugagcugguucagaguuccucaacagguggaauaugcgacaguccucaucagauccuugauggagaaaacugcacacuaauagaugcucuauugggagacccucagugugauggcuuccaaaauaagaaaugggaccuuuuuauugaacgcagcaaagccuacagcaacuguuacccuuaugaugugccggauuaugccucccuuaggucacuaguugccucauccggcacacuggaauuuaacaaugaaagcuucaauuggacuggagucacucaaaauggaacaagcucugcuugcaaaaggagaucuaauaacaguuucuuuaguagauugaauugguugacccacuuaaaauucaaauacccagcauugaacgugacuaugccaaacaaugaaaaauuugacaaauuguacauuugggggguucaccacccggguacggacaaugaccaaaucagccuauaugcucaagcuucaggaagaaucacagucucuaccaaaagaagccaacaaacuguaaucccgaauaucggaucuagacccaggguaagagauauccccagcagaauaagcaucuauuggacaauaguaaaaccgggagacauacuuuugauuaacagcacagggaaucuaauugcuccucgggguuacuucaaaauacgaagugggaaaagcucaauaaugagaucagaugcacccauuggcaaaugcaauucugaaugcaucacuccaaauggaagcauucccaaugacaaaccauuucaaaauguaaacaggaucacauauggggccugucccagauauguuaagcaaaacacucugaaauuggcaacagggaugcgaaauguaccagagaaacaaacuagaggcauauuuggcgcaaucgcggguuucauagaaaaugguugggagggaaugguggaugguugguacgguuucaggcaucaaaauucugagggaauaggacaagcagcagaucucaaaagcacucaagcagcaaucaaccaaaucaaugggaagcugaauagguugaucgggaaaaccaacgagaaauuccaucagauugaaaaagaauucucagaaguagaagggagaauucaggaccucgagaaauauguugaggacacuaaaauagaucucuggucauacaacgcggagcuucuuguugcccuggagaaccaacauacaauugaucuaacugacucagaaaugaacaaacuguuugaaagaacaaagaagcaacugagggaaaaugcugaggauaugggcaaugguuguuucaaaauauaccacaaaugugacaaugccugcauagggucaaucagaaauggaacuuaugaccaugauguauacagagaugaagcauugaacaaccgguuccagaucaaagguguugagcugaagucaggauacaaagauuggauccuauggauuuccuuugccauaucauguuuuuugcuuuguguugcuuuguugggguucaucaugugggccugccaaaaaggcaacauuaggugcaacauuugcauuuga

SEQ ID NO: 32440 - RNA, 1701 nt, Artificial Sequence; identical to SEQ ID NO: 32272
  derived and/or modified CDS sequence (wt) from hemagglutinin__InfluenzaA__ABB53625

SEQ ID NO: 32441 - RNA, 1701 nt, Artificial Sequence; identical to SEQ ID NO: 32334
  derived and/or modified CDS sequence (wt) from hemagglutinin__InfluenzaA__ABB53652

SEQ ID NO: 32442 - RNA, 1701 nt, Artificial Sequence
  derived and/or modified CDS sequence (wt) from hemagglutinin__InfluenzaA__ABB53663
augaagacuaucuuugcuuugagcuacauucuaugucugguuuucgcucaaaaacuucccggaaaugacaacagcacggcaacgcugugccuugggcaccaugcaguaccaaacggaacgauagugaaaacaaucacgaaugaccaaauugaaguuacuaaugcuacugagcugguucagaguuccucaacagguggaauaugcgacaguccucaucagauccuugauggagaaaacugcacacuaauagaugcucuauugggagacccucagugugauggcuuccaaaauaagaaaugggaccuuuuuguugaacgcagcaaagcccacagcaacuguuacccuuaugaugugccggauuaugccucccuuaggucacuaguugccucauccggcacacuggaguuuaacaaugaaagcuucaauuggacuggagucacucaaaauggaacaagcucugcuugcaaaaggagaucuaauaacaguuucuuuaguagauugaauugguugacccacuuaaaauucaaauacccagcauugaacgugacuaugccaaacaaugaaaauuuugacaaauuguacauuuggggaguucaccacccggguacggacaaugaccaaaucagccuauaugcucaagcaucaggaagaaucacagucucuaccaaaagaagccaacaaacuguaaucccgaauaucggaucuagacccaggguaagggauauccccagcagaauaagcaucuauuggacaauaguaaaaccgggagacauacuuuugauuaacagcacagggaaucuaauugcuccucgggguuacuucaaaauacgaagugggaaaagcucaauaaugagaucagaugcacccauuggcaaaugcaauucugaaugcaucacuccaaauggaagcauucccaaugacaaaccauuucaaaauguaaacaggaucacauauggggccugucccagauauguuaagcaaaacacucugaaauuggcaacagggaugcgaaauguaccagagaaacaaacuagaggcauauuuggcgcaaucgcggguuucauagaaaaugguugggagggaaugguggaugguugguacgguuucaggcaucaaaauucugagggaauaggacaagcagcagaucucaaaagcacucaagcagcaaucaaccaaaucaaugggaagcugaauagguugaucgggaaaaccaacgagaaauuccaucagauugaaaaagaauucucagaaguagaagggagaauucaggaccucgagaaauauguugaggacacuaaaauagaucucuggucauacaacgcggagcuucuuguugcccuggagaaccaacauacaauugaucuaacugacucagaaaugaacaaacuguuugaaagaacaaagaagcaacugagggaaaaugcugaggauaugggcaaugguuguuucaaaauauaccacaaaugugacaaugccugcauagggucaaucagaaauggaacuuaugaccaugauguauacagagaugaagcauuaaacaaccgguuccagaucaaagguguugagcugaagucaggauacaaagauuggauccuauggauuuccuuugccauaucauguuuuuugcuuuguguugcuuuguugggguucaucaugugggccugccaaaaaggcaacauuaggugcaacauuugcauuuga

SEQ ID NO: 32443 - RNA, 1701 nt, Artificial Sequence
  derived and/or modified CDS sequence (wt) from hemagglutinin__InfluenzaA__ABB53685
augaagacuaucauugcuuugagcuacauucuaugucugguuuucgcucaaaaacuucccggaaaugacaacagcacggcaacgcugugccuugggcaccaugcaguaccaaacggaacgauagugaaaacaaucacgaaugaccaaauugaaguuacuaaugcuacugagcugguucagaguuccucaacagguggaauaugcgacaguccucaucagauccuugauggagaaaacugcacacuaauagaugcucuauugggagacccucagugugauggcuuccaaaauaagaaaugggaccuuuuuauugaacgcagcaaagccuacagcaacuguuacccuuaugaugugccggauuaugccucccuuaggucacuaguugccucauccggcacacuggaauuuaacaaugaaagcuucaauuggacuggagucacucaaaauggaacaagcucugcuugcaaaaggagaucuaauaacaguuucuuuaguagauugaauugguugacccacuuaaaauucaaauacccagcauugaacgugacuaugccaaacaaugaaaaauuugacaaauuguacauuugggggguucaccacccggguacggacaaugaccaaaucagccuauaugcucaagcuucaggaagaaucacagucucuaccaaaagaagccaacaaacuguaaucccgaauaucggaucuagacccaggguaagggauauccccagcagaauaagcaucuauuggacaauaguaaaaccgggagacauacuuuugauuaacagcacagggaaucuaauugcuccucgggguuacuucaaaauacgaagugggaaaagcucaauaaugagaucagaugcacccauuggcaaaugcaauucugaaugcaucacuccaaauggaagcauucccaaugacaaaccauuucaaaauguaaacaggaucacauauggggccugucccagauauguuaagcaaaacacucugaaauuggcaacagggaugcgaaauguaccagagaaacaaacuagaggcauauuuggcgcaaucgcggguuucauagaaaaugguugggagggaaugguggaugguugguacgguuucaggcaucaaaauucugagggaauaggacaagcagcagaucucaaaagcacucaagcagcaaucaaccaaaucaaugggaagcugaauagguugaucgggaaaaccaacgagaaauuccaucagauugaaaaagaauucucagaaguagaagggagaauucaggaccucgagaaauauguugaggacacuaaaauagaucucuggucauacaacgcggagcuucuuguugcccuggagaaccaacauacaauugaucuaacugacucagaaaugaacaaacuguuugaaagaacaaagaagcaacugagggaaaaugcugaggauaugggcaaugguuguuucaaaauauaccacaaaugugacaaugccugcauagggucaaucagaaauggaacuuaugaccaugauguauacagagaugaagcauugaacaaccgguuccagaucaaagguguugagcugaagucaggauacaaagauuggauccuauggauuuccuuugccauaucauguuuuuugcuuuguguugcuuuguugggguucaucaugugggccugccaaaaaggcaacauuaggugcaacauuugcauuuga

SEQ ID NO: 32444 - RNA, 1701 nt, Artificial Sequence
  derived and/or modified CDS sequence (wt) from hemagglutinin__InfluenzaA__ABB53696
augaagacuaucauugcuuugagcuacauuuuaugucugguuuucgcucaaaaacuucccggaaaugacaacagcacggcaacgcugugccuggggcaccaugcagugccaaacggaacgcuagugaaaacaaucacgaaugaccaaauugaagugacuaaugcuacugagcugguucagaguuccucaacagguagaauaugcgacaguccucaccaaauccuugauggagaaaacugcacacuaauagaugcucuauugggagacccucauugugauggcuuccaaaauaaggaaugggaccuuuuuguugaacgcagcaaagccuacagcaacuguuacccuuaugaugugccggauuaugccucccuuaggucacuaguugccucauccggcacacuggaguuuaacaaugaaagcuucaauuggacuggagucgcucagaauggaacaagcucugcuugcaaaaggagaucuaauaaaaguuucuuuaguagauugaauugguugcaccaauuaaaauacaaauauccagcacugaacgugacuaugccaaacaaugaaaaauuugacaaauuguacauuugggggguucaccacccgaguacggacagugaccaaaucagccuauaugcucaagcaucagggagagucacagucucuaccaaaagaagccaacaaacuguaaucccgaauaucggaucuagacccuggguaaggggugucuccagcagaauaagcaucuauuggacaauaguaaaaccgggagacauacuuuugauuaacagcacagggaaucuaauugcuccucgggguuacuucaaaauacgaagugggaaaagcucaauaaugaggucagaugcacccauuggcaaaugcaauucugaaugcaucacuccaaauggaagcauucccaaugacaaaccauuucaaaauguaaacaggaucacauauggggccugucccagauauguuaagcaaaacacucugaaauuggcaacagggaugcggaauguaccagagaaacaaacuagaggcauauucggcgcaaucgcggguuucauagaaaaugguugggagggaaugguggacgguugguacgguuucaggcaucaaaauucugagggcacaggacaagcagcagaucuuaaaagcacucaagcagcaaucaaccaaaucaacgggaaacugaauagguuaaucgagaaaacgaacgagaaauuccaucaaauugaaaaagaauucucagaaguagaagggagaauucaggaccucgagaaauauguugaggacacuaaaauagaucucuggucguacaacgcggagcuucuuguugcccuggagaaccaacauacaauugaucuaacugacucagaaaugaacaaacuguuugaaagaacaaagaagcaacugagggaaaaugcugaggauaugggcaaugguuguuucaaaauauaccacaaaugugacaaugccugcauagggucaaucagaaauggaacuuaugaccaugauguauacagagacgaagcauuaaacaaccgguuccagaucaaagguguugagcugaagucaggauacaaagauuggauccuauggauuuccuuugccauaucauguuuuuugcuuuguauugcuuugcugggguucaucaugugggccugccaaaaaggcaacauuaggugcaacguuugcauuuga

SEQ ID NO: 32445 - RNA, 1698 nt, Artificial Sequence
  derived and/or modified CDS sequence (wt) from hemagglutinin__InfluenzaA__ABB53707
augaaagcaaaacuacugguccuguuauguacauuuacagcuacauacgcagacacaauauguauaggcuaccaugccaacaacucaaccgacacuguugacacaguacuugagaagaaugugacagugacacacucugucaaccuacuugaggacagucacaauggaaaacuaugucuacuaaaaggaauagccccacuacaauuggguaauugcagcguugccggauggaucuuaggaaacccagaaugcgaauuacugauuuccaaggaaucaugguccuacauuguagaaacaccaaaucccgagaauggaacauguuacccaggguauuucgccgacuaugaggaacugagggagcaauugaguucaguaucuucauuugagagauucgaaauauuccccaaagggagcucauggcccaaccacaccguaaccggaguaucagcaucaugcucccauaaugggaaaagcaguuuuuacagaaauuugcuauggcugacggggaagaaugguuuguacccaaaccugagcauguccuauguaaacaacaaagagaaagaaguccuugugcuaugggguguucaucacccaccuaacauaggggaccaaagggcccucuaccauacagaaaaugcuuaugucucuguagugucuucacauuauagcagaagauucaccccagaaauagccaaaagacccaaaguaagagaucaggaaggaagaaucaacuacuacuggacucugcuggaacccggggacacaauaauauuugaggcaaauggaaaucuaauagcgccaugguaugcuuucgcacugaguagaggcuuuggaucaggaaucaucaccucaaaugcaccaauggaugaaugugaugcgaagugucaaacaccucagggagcuauaaacaguagucuuccuuuccagaauguacacccaguuacaauaggagaguguccaaaguaugucaggagugcaaaauuaaggaugguuacaggacuaaggaacaucccauccauucaauccagagguuuguuuggagccauugccgguuucauugaagggggguggacuggaaugguagaugggugguaugguuaucaucaucagaaugagcaaggaucuggcuaugcugcagaucaaaaaagcacacaaaaugccauuaacgggauuacaaacaaggugaauucuguaauugagaaaaugaacacucaauucacagcugugggcaaagaauucaacaaauuagaaagaaggauggaaaacuuaaauaaaaaaguugaugauggguuucuagacauuuggacauauaaugcagaauuguugguucuacuggaaaaugaaaggacuuuggauuuccaugacuccaaugugaagaaucuguaugagaaaguaaaaagccaauuaaagaauaaugccaaagaaauaggaaacggguguuuugaauucuaucacaaguguaacaaugaaugcauggaaagugugaaaaauggaacuuaugacuauccaaaauauuccgaagaaucaaaguuaaacagggagaaaauugauggaguaaaauuggaaucaaugggagucuaucagauucuggcgaucuacucaacugucgccaguucccugguucuuuuggucucccugggggcaaucagcuucuggauguguuccaaugggucuuugcaguguagaauaugcaucuga

SEQ ID NO: 32446 - RNA, 1701 nt, Artificial Sequence; identical to SEQ ID NO: 32400
  derived and/or modified CDS sequence (wt) from hemagglutinin__InfluenzaA__ABB53718

SEQ ID NO: 32447 - RNA, 1698 nt, Artificial Sequence
  derived and/or modified CDS sequence (wt) from hemagglutinin__InfluenzaA__ABB53740
augaaaguaaaacuacugguccuguuauguacauuuacagcuacauaugcagacacaauauguauaggcuaccaugccaacaacucaaccgacacuguugacacaguacuugagaagaaugugacagugacacacucugucaaccuacuugaggacagucacaauggaaaacuaugucuacuaaaaggaauagcuccacuacaauuggguaauugcagcguugccggauggaucuuaggaaacccagaaugcgaauuacugauuuccaaggaaucaugguccuacauuguagaaacaccaaauccugagaauggaacauguuacccaggguauuucgccgacuaugaggaacugagggagcaauugaguucaguaucuucauuugagagguucgaaauauuccccaaagaaagcucauggcccaaucacaccguaaccggaguaucagcaucaugcucccauaaugggaaaagcaguuuuuacagaaauuugcuauggcugacggggaagaauggccuguacccaaaccugagcaaguccuaugcaaacaacaaagagaaagaaguccuuguacuaugggguguucaucacccgccuaacaugggggaccaaagggcccucuaucauacagaaaaugcuuaugucucuguagugucuucacauuauagcagaagauucaccccagaaauagccaaaagacccaaaguaagagaucaggaaggaagaaucaacuacuacuggacucugcuggaacccggggagacaauaauauuugaggcaaauggaaaucuaauagcgccaagguaugcuuucgcacugaguagaggcuuuggaucaggaaucaucaccucaaaugcaccaauggaugaaugugaugcgaagugucaaacaccucagggagcuauaaacagcagucuuccuuuccagaauguacacccagucacaauaggagaguguccaaaguaugucaggaguacaaaauuaaggaugguuacaggacuaaggaacaucccauccauucaauccagagguuuguuuggagccauugccgguuucauugaagggggguggacuggaaugguagaugguugguaugguuaucaucaucagaaugagcaaggaucuggcuaugcugcagaucaaaaaagcacacaaaaugccauuaacgggauuacaaacaaggugaauucuguaauugagaaaaugaacacucaauucacagcugugggcaaagaauucaacaaauuggaaagaaggauggaaaacuuaaauaaaaaaguugaugauggguuucuagacauuuggacauauaaugcagaauuguugguucuacuggaaaaugaaaggacuuuggauuuccaugacuccaaugugaagaaucuguaugagaaaguaaaaagccaauuaaagaacaaugccaaagaaauaggaaacggguguuuugaauucuaucacaaguguaacgaugaaugcauggagagugugaaaaauggaacuuaugacuauccaaaauauuccgaagaaucaaaguuaaacagggagaaaauugauggagugaaauuggaaucaaugggagucuaucagauucuggcgaucuacucaacagucgccaguucccugguucuuuuggucucccugggggcaaucagcuucuggauguguuccaaugggucuuugcaguguagaauaugcaucuaa

SEQ ID NO: 32448 - RNA, 1701 nt, Artificial Sequence
  derived and/or modified CDS sequence (wt) from hemagglutinin__InfluenzaA__ABB53751
augaagacuaucauugcuuugagcuacauuuccugucugguuuucgcccaaaaccuucccggaaaugacaacagcacagcaacgcugugccugggacaucaugcagugccaaacggaacgcuagugaaaacaaucacgaaugaccagauugaagugacuaaugcuacugagcugguucagaguuccucaacagguagaauaugcgacaguccucacagaauccuugaugggaaaaacugcacacugauagaugcucuauugggagacccucauugugauggcuuucaaaaugagaaaugggaccuuuuuguugaacgcagcaaagcuuucagcaacuguuacccuuaugaugugccagauuaugccucccuuaggucacuaguugccucgucaggcacccuggaguuuaucaaugaaggcuucaauuggacuggagucacucagagugggggaagcuaugcuugcaaaaggggaucugauaacaguuucuucaguagacugaacugguuguacaaaucagaaagcaaauauccagugcugaacgugacuaugccaaacaauggcaauuuugacaaacuguacauuugggggguucaccacccgagcacggacaaagaacaaaccaaccuauauguucgagcaucagggagagucacagucucuaccaagagaagccagcaaacuauaaucccgaauaucgggucuagacccuggguaaggggucugucuaguggaauaaguaucuauuggacaauaguaaaaccgggagacauacuguuaauuaauaguaaugggaaccuaauugcuccucgggguuacuucaaaauacgcacugggaaaagcucaauauugaggucagaugcaccuauuggcaccugcaguucugaaugcaucacuccaaauggaagcauucccaaugacaagcccuuucaaaacguaaacaagaucacauauggggcauguccaaaguauguuaagcaaaacacucuaaaguuggcaacagggaugcggaauguaccagagaaacaaacuagaggcauauucggcgcaauagcagguuucauagaaaaugguugggagggaaugguagauggcugguacgguuucaggcaucaaaauucugagggcacaggacaagcagcagaucuuaaaagcacucaagcagcaaucgaccaaaucaaugggaaacugaauaggguaaucgagaaaacgaacgagaaauuccaucaaaucgaaaaggaauucucagaaguagaaggaagaauucaggaccucgagaaauacguugaagacacuaaaauagaucucuggucuuacaacgcggagcuucuugucgcucuggagaaccaacauacaauugaucugacugacucggaaaugaacaaacuguuugaaaaaacaaggaggcaacugagggaaaaugcugaggacaugggcaaugguugcuucaaaauauaccacaaaugugacaaugcuugcauagggucaaucagaaauggaacuuaugaccaugauguauacagagacgaagcauuaaacaaccgguuucagaucaaagguguugagcugaagucaggauacaaagacuggauccuguggauuuccuuugccauaucaugcuuuuugcuuuguguuguuuugcugggguucaucaugugggccugccaaaaaggcaacauuaggugcaacauuugcauuuga

SEQ ID NO: 32449 - RNA, 1701 nt, Artificial Sequence
  derived and/or modified CDS sequence (wt) from hemagglutinin__InfluenzaA__ABB60007
augaagacuaucauugcuuugagcuacauuuuaugucugguuuucgcucaaaaacuucccggaaaugacaacagcacggcaacgcugugccugggacaccaugcagugccaaacggaacgcuagugaaaacaaucacgaaugaccaaauugaagugacuaaugcuacugagcugguucagaguuccucaacagauagaauaugcgacaguccucaccgaauccuugauggagaaaacugcacacugauagaugcucuauugggagacccucauugugauggcuuccaaaauaaggaaugggaccuuuuuguugaacgcagcaaagccuacagcaacuguuacccuuaugaugugccggauuaugccucccuuaggucacuaguugccucauccggcacccuggaguuuaacaaugaaagcuucaauuggacuggagucgcucagaauggaacaagcuaugcuugcaaaaggagaucuauuaaaaguuucuuuaguagauugaauugguugcaccaauuaaaauacaaauauccagcacugaacgugacuaugccaaacaaugacaaauuugacaaauuguacauuugggggguucaccacccgaguacggacagugaccaaaccagccuauaugcucaagcaucagggagagucacagucucuaccaaaagaagccaacaaacuguaaucccgaauaucggaucuagacccuggguaaggggugucuccagcagaauaagcaucuauuggacaauaguaaaaccgggagacauacuuuugauuaacagcacagggaaucuaauugcuccucgggguuacuucaaaauacgaagugggaaaagcucaauaaugaggucagaugcacccauuggcaaaugcaauucugaaugcaucacuccaaauggaagcauucccaaugacaaaccauuucaaaauguaaacaggaucacauauggggccugucccagauauguuaagcaaaacacucugaaauuggcaacagggaugcggaauguaccagagaaacaaacuagaggcauauucggcgcaaucgcagguuucauagaaaaugguugggagggaaugguagacgguugguacgguuucaggcaucaaaauucugagggcacaggacaagcagcagaucuuaaaagcacucaagcagcaaucaaccaaaucaacgggaaacugaauagguuaaucgagaaaacgaacgagaaauuccaucaaauugaaaaagaauucucagaaguagaagggagaauucaggaccucgagaaauauguugaggacacuaaaauagaucucuggucguacaacgcggagcuucuuguugcccuggagaaccaacauacaauugaucuaacugacucagaaaugaacaaacuguuugaaagaacaaggaagcaacugagggaaaaugcugaggauaugggcaaugguuguuucaaaauauaccacaaaugugacaaugccugcauagggucaaucagaaauggaacuuaugaccaugauguauacagagaugaagcauuaaacaaccgguuccagaucaaagguguugagcuuaagucaggauacaaagauuggauccuauggauuuccuuugccauaucauguuuuuugcuuuguguuguuuugcugggguucaucaugugggccugccaaaaaggcaacauuaggugcaacauuugcauuuga

SEQ ID NO: 32450 - RNA, 1701 nt, Artificial Sequence
  derived and/or modified CDS sequence (wt) from hemagglutinin__InfluenzaA__ABB77853
augaagacuaucauugcuuugagcuacauuucaugucugguuuucgcucaaaaacuucccggaaaugacaacagcacggcaacgcugugccugggacaccaugcagugccaaacggaacgcuagugaaaacaaucacgaaugaccaaauugaagugacuaaugcuacugagcugguucagaguuccucaacagguagaauaugcgacaguccucaccgaauccuugauggagaaaacugcacacugauagaugcucuauugggagacccucauugugauggcuuccaaaauaaggaaugggaccuuuuuguugaacgcagcaaagccuacagcaacuguuacccuuaugaugugccggauuaugccucccuuaggucacuaguugccucauccggcacucuggaguuuaacaaugaaagcuucaauuggacuggagucgcucagaauggaacaagcuaugcuugcaaaaggagaucuauuaaaaguuucuuuaguagauugaauugguugcaccaauuaaaauacaaauauccagcacugaacgugacuaugccaaacaaugacaaauuugacaaauuguacauuugggggguucaccacccgaguacggacagugaccaaaccagccuauaugcucaagcaucagggagagucacagucucuaccaaaagaagccaacaaacuguaaucccgaauaucggaucuagacccuggguaaggggugucuccagcagaauaagcaucuauuggacaauaguaaaaccgggagacauacuuuugauuaacagcacagggaaucuaauugcuccucgggguuacuucaaaauacgaagugggaaaagcucaauaaugaggucagaugcacccauuggcaaaugcaauucugaaugcaucacuccagauggaagcauucccaaugacaaaccauuucaaaauguaaacaggaucacauauggggccugucccagauauguuaagcaaaacacucugaaauuggcaacagggaugcggaauguaccagagaaacaaacuagaggcauauucggcgcaaucgcagguuucauagaaaaugguugggagggaaugguagacgguugguacgguuucaggcaucaaaauucugagggcacaggacaagcagcagaucuuaaaagcacucaagcagcaaucaaccaaaucaacgggaaacugaauagguuaaucgagaaaacgaacgagaaauuccaucaaauugaaaaagaauucucagaaguagaagggagaauucaggaccucgagaaauauguugaggacacuaaaauagaucucuggucguacaacgcggagcuucuuguugcccuggagaaccaacauacaauugaucuaacugacucagaaaugaacaaacuguuugaaagaacaaggaagcaacugagggaaaaugcugaggauaugggcaaugguuguuucaaaauauaccacaaaugugacaaugccugcauagggucaaucagaaauggaacuuaugaccaugauguauacagagacgaagcauuaaacaaccgguuccagaucaaagguguugagcugaagucaggauacaaagauuggauccuauggauuuccuuugccauaucauguuuuuugcuuuguguuguuuugcugggguucaucaugugggccugccaaaaaggcaacauuaggugcaacauuugcauuuga

SEQ ID NO: 32451 - RNA, 1701 nt, Artificial Sequence
  derived and/or modified CDS sequence (wt) from hemagglutinin__InfluenzaA__ABB79731
augaagacuaucauugcuuugagcuacauucuaugucugguuuucgcucaagaacuucccggaaaugacaacagcacggcaacgcugugccuugggcaccaugcaguaccaaacggaacgauagugaaaacaaucacgaaugaccaaauugaaguuacuaaugcuacugagcugguucagaauuccucaacagguggaauaugcgacaguccucaucagauccuugauggagaaaacugcacacuaauagaugcucuauugggagacccucagugugauggcuuccaaaauaagaaaugggaccuuuuuguugaacgcagcaaagccuacagcaacuguuacccuuaugaugugccggauuaugccucccuuaggucacuaguugccucauccggcacacuggaguuuaacaaugaaagcuucaauuggacuggagucacucaaaauggaacaagcucugcuugcaaaaggagaucuaauaacaguuucuuuaguagauugaauugguugacccacuuaaaauucaaauacccagcauugaacgugacuaugccaaacaaugaaaaauuugacaaauuguacauuugggggguucaccacccggguacggacaaugaccaaaccagccuauaugcucaagcaucaggaagaaucacagucucuaccaaaagaagccaacaaacuguaaucccgaauaucggaucuagacccaggguaagggauauccccagcagaauaagcaucuauuggacaauaguaaaaccgggagacauacuuuugauuaacagcacagggaaucuaauugcuccucgggguuacuucaaaauacgaagugggaaaagcucaauaaugagaucagaugcacccauuggcaaaugcaauucugaaugcaucacuccaaauggaagcauucccaaugacaaaccauuucaaaauguaaacaggaucacauauggggccugucccagauauguuaagcaaaacacucugaaauuggcaacagggaugcgaaauguaccagagaaacaaacuagaggcauauuuggcgcaaucgcggguuucauagaaaaugguugggagggaaugguggaugguugguacgguuuuaggcaucaaaauucugagggaauaggacaagcagcagaucucaaaagcacucaagcagcaaucaaccaaaucaaugggaagcugaauagguugaucggaaaaaccaacgagaaauuccaucagauugaaaaagaauucucagaaguagaagggagaauucaggaccucgagaaauauguugaggacacuaaaauagaucucuggucauacaacgcggagcuucuuguugcccuggagaaccaacauacaauugaucuaacugacucagaaaugaacaaacuguucgaaagaacaaagaagcaacugagggaaaaugcugaggauaugggcaaugguuguuucaaaauauaccacaaaugugacaaugccugcauagggucaaucagaaauggaacuuaugaccaugauguauacagagaugaagcauuaaacaaccgguuccagaucaaagguguugagcugaagucaggauacaaagauuggauccuauggauuuccuuugccauaucauguuuuuugcuuuguguugcuuuguugggguucaucaugugggccugccaaaaaggcaacauuaggugcaacauuugcauuuga

SEQ ID NO: 32452 - RNA, 1701 nt, Artificial Sequence
  derived and/or modified CDS sequence (wt) from hemagglutinin__InfluenzaA__ABB79788
augaagacuaucauugcuuugagcuacauuuucugucugguuuucgcccaaaaacuucccggaaaugacaacagcacagcaacgcugugcuugggacaucaugcagugccaaacggaacgcuagugaaaacaaucacgaaugaucaaauugaagugacuaaugcuacugagcugguucagaguuccucaacagguagaauaugcgacaguccucaccgaauccuugaugggaaaaacugcacacugauagaugcucuauugggagacccucauugugauggcuuccaaaaugagaaaugggaccuuuuuguugaacgcagcaaagcuuucagcaacuguuacccuuaugaugugccggauuaugccucccuuaggucacuaguugccucaucaggcacccuggaguuuaucaaugaaggcuucaauuggacuggagucacucagagugggggaagcuaugcuugcaaaaggggaucuguuaacaguuucuucaguagauugaauugguuguacgaaucagaaagcaaauauccagugcugaacgugacuaugccaaacaauggcaaauuugacaaauuguacauuugggggguucaccacccgaucacggacaaagaacaaaccaaccuauauguucgagcaucagggagagucacagucucuaccaagagaagccagcaaacuguaaucccgaauaucgggucuagacccuggguaaggggucugucuaguagaauaaguaucuauuggacaauaguaaaaccgggagacauacuguuaauuaauagcacugggaaccuaauugcuccucgggguuacuucaaaauacgcacugggaaaagcucaauaaugaggucagaugcaccuauuggcaccugcaguucugaaugcaucacuccaaauggaagcauucccaaugacaaacccuuucaaaauguaaacaagaucacauauggggcaugucccagguauguuaagcaaaacacucugaaguuggcaacagggaugcggaauguaccagagaaacaaacuagaggcauauucggcgcaauagcagguuucauagaaaaugguugggagggaaugguagacgguugguacgguuucaggcaucaaaauucugagggcacaggacaagcagcagaucuuaaaagcacucaagcagcaaucgaccaaaucaacgggaaacugaauagguuaaucgagaaaacgaacgagaaauuccaucaaaucgaaaaggaauucucagaaguagaagggagaauucaggaccucgagaaauauguugaagacacuaaaauagaucucuggucuuacaacgcggagcuucuugucgcccuggagaaccaacauacaauugaucugacugauucagaaaugaacaaacuguuugaaaaaacaaggaagcaacugagggaaaaugcugaggacaugggcaaugguugcuucaaaauauaccacaaaugugacaaugcuugcauagggucaaucagaaauggaacuuaugaccaugauguauacagagacgaagcauuaaacaaccgguuucagaucaaagguguugagcugaagucaggauacaaagacuggauccuauggauuuccuuugccauaucaugcuuuuugcuuuguguuguuuugcugggguucaucaugugggccugccaaaaaggcaacauuaggugcaacauuugcauuuga

SEQ ID NO: 32453 - RNA, 1701 nt, Artificial Sequence
  derived and/or modified CDS sequence (wt) from hemagglutinin__InfluenzaA__ABB79799
augaagacuaucauugcuuugagcuacauuuucugucugguuuucgcccaaaaacuucccggaaaugacaacagcacagcaacgcugugcuugggacaucaugcagugccaaacggaacgcuagugaaaacaaucacgaaugaucagauugaagugacuaaugcuacugagcugguucagaguuccucaacagguagaauaugcgacaguccucaccgaauccuugaugggaaaaacugcacacugauagaugcucuauugggagacccucauugugauggcuuccaaaaugagaaaugggaccuuuuuguugaacgcaguaaagcuuucagcaacuguuacccuuaugaugugccggauuaugccucccuuaggucacuaguugccucaucaggcacccuggaguuuaucaaugaaggcuucaauuggacuggagucacucagagugggggaagcuaugcuugcaaaaggggaucuguuaacaguuucuucaguagauugaauugguuguacgaaucagaaagcaaauauccagugcugaacgugacuaugccaaacaauggcaaauuugacaaauuguacauuugggggguucaccacccgagcacggacaaagaacaaaccaaccuauauguucgagcaucagggaaagucacagucucuaccaagagaagccagcaaacuguaaucccgaauaucgggucuagacccuggguaaggggucugucuaguagaauaaguaucuauuggacaauaguaaaaccgggagacauacuguuaauuaauagcacuggaaaccuaauugcuccucgggguuacuucaaaauacgcacugggaaaagcucaauaaugaggucagaugcaccuauuggcaccugcaguucugaaugcaucacuccgaauggaagcauucccaaugacaaacccuuucaaaauguaaacaagaucacauauggagcaugucccagguauguuaagcaaaacacucugaaguuggcaacagggaugcggaauguaccagagaagcaaacuagaggcauauucggcgcaauagcagguuucauagaaaaugguugggagggaaugguagacgguugguacgguuucaggcaucaaaauucugagggcacaggacaagcagcagaucuuaaaagcacucaagcagcaaucgaccaaaucaacgggaaacugaacagguuaaucgagaaaacgaacgagaaauuccaucaaaucgaaaaggaauucucagaaguagaagggagaauucaggaccucgagaaauauguugaagacacuaaaauagaucucuggucuuacaacgcggagcuucuugucgcccuggagaaccaacauacaauugaucugacugauucagaaaugaacaaacuguuugaaaaaacaaggaagcaacugagggaaaaugcugaggacaugggcaaugguugcuucaaaauauaccacaaaugugacaaugcuugcauagggucaaucagaaauggaacuuaugaccaugauguauacagagacgaagcauuaaacaaccgguuucagaucaaagguguugagcugaagucaggauacaaagacuggauccuauggauuuccuuugccauaucaugcuuuuugcuuuguguuguuuugcugggguucaucaugugggccugccaaaaaggcaacauuaggugcaacauuugcauuuga

SEQ ID NO: 32454 - RNA, 1701 nt, Artificial Sequence
  derived and/or modified CDS sequence (wt) from hemagglutinin__InfluenzaA__ABB79810
augaagacuaucauugcuuugagcuacauuuuaugucugguuuucgcucaaaaacuucccggaaaugacaacagcacagcaacgcugugccugggacaucaugcagugccaaacggaacgcuagugaaaacaaucacgaaugaucaaauugaagugacuaaugcuacugagcugguucagaguuccucaacagguagacuaugcgacaguccucaccgaauccuugauggaaaaaacugcacacugauagaugcucuauugggagacccucauugugauggcuuccaaaauaaggaaugggaccuuuuuguugaacgcagcaaagcuuacagcaacuguuacccuuaugaugugccggauuaugccucccuuaggucacuaguugccucaucaggcacccuggaguuuaucaaugaagacuucaauuggacuggagucgcucaggaugggggaagcuaugcuugcagaaggggaucuguuaacaguuucuuuaguagauugaauugguugcacaaauuagaauacaaauauccagcgcugaacgugacuaugccaaacaauggcaaauuugacaaauuguacauuugggggguucaccacccgagcacggacagugaccaaaccagccuauauguucgagcaucagggagagucacagucucuaccaaaagaagccaacaaacuguaaucccgaauaucgggucuagacccuggguaaggggucaguccaguagaauaagcaucuauuggacaauaguaaaaccgggagacauacuuuugauugauagcacagggaaucuaauugcuccucgggguuacuucaaaauacgaaaugggaaaagcucaauaaugagaucagaugcacccauuggcaacugcaguucugaaugcaucacuccaaauggaagcauucccaaugacaaaccuuuucaaaauguaaacaggaucacauauggggccugccccagauauguuaagcaacacacucugaaauuggcaacagggaugcggaauguaccagagaaacaaacuagaggcauauucggcgcaaucgcagguuucauagaaaaugguugggagggaaugguagacgguugguacgguuucaggcaucaaaauucugagggcacaggacaagcagcagaucuuaaaagcacucaagcagcaaucgaccaaaucaacgggaaacugaauagguuaaucgagaaaacgaacgagaaauuccaucaaaucgaaaaagaauucucagaaguagaagggagaauucaggaccucgagaaauauguugaagacacuaaaauagaucucuggucuuacaacgcggagcuucuuguugcccuggagaaccaacauacaauugaucuaacggacucagaaaugaacaaacuguuugaaagaacaaggaagcaacugagggaaaaugcugaggacaugggcaaugguugcuucaaaauauaccacaaaugugacaaugccugcauagggucaaucagaaauggaacuuaugaccaugauguauacagagacgaagcauuaaacaaccgguuccagaucaaagguguugagcuaaagucaggauacaaagauuggauccuauggauuuccuuugccauaucaugcuuuuugcuuuguguuguuuugcugggguucaucaugugggccugccaaaaaggcaacauuaggugcaacauuugcauuuga

SEQ ID NO: 32455 - RNA, 1701 nt, Artificial Sequence
  derived and/or modified CDS sequence (wt) from hemagglutinin__InfluenzaA__ABB79957
augaagacuaucauugcuuugagcuacauuuuaugucugguuuucgcucaaaaacuucccggaaaugacaacagcacagcaacgcugugccugggacaucaugcagugccaaacggaacgcuagugaaaacaaucacgaaugaucaaauugaagugacuaaugcuacugagcugguucagaguuccucaacagguagacuaugcgacaguccucaccgaauccuugauggaaaaaacugcacacugauagaugcucuauugggagacccucauugugauggcuuccaaaauaaggaaugggaccuuuuuguugaacgcagcaaagcuuacagcaacuguuacccuuaugaugugccggauuaugccucccuuaggucacuaguugccucaucaggcacccuggaguuuaucaaugaagacuucaauuggacuggagucgcucaggaugggggaagcuaugcuugcagaaggggaucuguuaacaguuucuuuaguagauugaauugguugcacaaauuagaauacaaauauccagcgcugaacgugacuaugccaaacaauggcaaauuugacaaauuguacauuugggggguucaccacccgagcacggacagugaccaaaccagccuauauguucgagcaucagggagagucacagucucuaccaaaagaagccaacaaacuguaaucccgaauaucgggucuagacccuggguaaggggucaguccaguagaauaggcaucuauuggacaauaguaaaaccgggagacauacuuuugauuaauagcacagggaaucuaauugcuccucgggguuacuucaaaauacgaaaugggaaaagcucaauaaugagaucagaugcacccauuggcaacugcaguucugaaugcaucacuccaaauggaagcauucccaaugacaaaccuuuucaaaauguaaacaggaucacauauggggccugccccagauauguuaagcaacacacucugaaauuggcaacagggaugcggaauguaccagagaaacaaacuagaggcauauucggcgcaaucgcagguuucauagaaaaugguugggagggaaugguagacgguugguacgguuucaggcaucaaaauucugagggcacaggacaagcagcagaucuuaaaagcacucaagcagcaaucgaccaaaucaacgggaaacugaauagguuaaucgagaaaacgaacgagaaauuccaucaaaucgaaaaagaauucucagaaguagaagggagaauucaggaccucgagaaauauguugaagacacuaaaauagaucucuggucuuacaacgcggagcuucuuguugcccuggagaaccaacauacaauugaucuaacggacucagaaaugaacaaacuguuugaaagaacaaggaagcaacugagggaaaaugcugaggacaugggcaaugguugcuucaaaauauaccacaaaugugacaaugccugcauagggucaaucagaaauggaacuuaugaccaugauguauacagagacgaagcauuaaacaaccgguuccagaucaaagguguugagcuaaagucaggauacaaagauuggauccuauggauuuccuuugccauaucaugcuuuuugcuuuguguuguuuugcugggguucaucaugugggccugccaaaaaggcaacauuaggugcaacauuugcauuuga

SEQ ID NO: 32456 - RNA, 1701 nt, Artificial Sequence
  derived and/or modified CDS sequence (wt) from hemagglutinin__InfluenzaA__ABB79968
augaagacuaucauugcuuugagcuacauuuuaugucugguuuucgcucaaaaacuucccggaaaugacaacagcacagcaacgcugugccugggacaucaugcagugccaaacggaacgcuagugaaaacaaucacgaaugaucaaauugaagugacuaaugcuacugagcugguucagaguuccucaacagguagacuaugcgacaguccucaccgaauccuugauggaaaaaacugcacacugauagaugcucuauugggagacccucauugugauggcuuccaaaauaaggaaugggaccuuuuuguugaacgcagcaaagcuuacagcaacuguuacccuuaugaugugccggauuaugccucccuuaggucacuaguugccucaucaggcacccuggaguuuaucaaugaagacuucaauuggacuggagucgcucaggaugggggaagcuaugcuugcagaaggggaucuguuaacaguuucuuuaguagauugaauugguugcacaaauuagaauacaaauauccagcgcugaacgugacuaugccaaacaauggcaaauuugacaaauuguacauuugggggguucaccacccgagcacggacagugaccaaaccagccuauauguucgagcaucagggagagucacagucucuaccaaaagaagccaacaaacuguaaucccgaauaucgggucuagacccuggguaaggggucaguccaguagaauaagcaucuauuggacaauaguaaaaccgggagacauacuuuugauuaauagcacagggaaucuaauugcuccucgggguuacuucaaaauacgaaaugggaaaagcucaauaaugagaucagaugcacccauuggcaacugcaguucugaaugcaucacuccaaauggaagcauucccaaugacaaaccuuuucaaaauguaaacaggaucacauauggggccugccccagauauguuaagcaacacacucugaaauuggcaacagggaugcggaauguaccagagaaacaaacuagaggcauauucggcgcaaucgcagguuucauagaaaaugguugggagggaaugguagacgguugguacgguuucaggcaucaaaauucugagggcacaggacaagcagcagaucuuaaaagcacucaagcagcaaucgaccaaaucaacgggaaacugaauagguuaaucgagaaaacgaacgagaaauuccaucaaaucgaaaaagaauucucagaaguagaagggagaauucaggaccucgagaaauauguugaagacacuaaaauagaucucuggucuuacaacgcggagcuucuuguugcccuggagaaccaacauacaauugaucuaacggacucagaaaugaacaaacuguuugaaagaacaaggaagcaacugagggaaaaugcugaggacaugggcaaugguugcuucaaaauauaccacaaaugugacaaugccugcauagggucaaucagaaauggaacuuaugaccaugauguauacagagacgaagcauuaaacaaccgguuccagaucaaagguguugagcuaaagucaggauacaaagauuggauccuauggauuuccuuugccauaucaugcuuuuugcuuuguguuguuuugcugggguucaucaugugggccugccaaaaaggcaacauuaggugcaacauuugcauuuga

SEQ ID NO: 32457 - RNA, 1698 nt, Artificial Sequence
  derived and/or modified CDS sequence (wt) from hemagglutinin__InfluenzaA__ABB79979
augaaagcaaaacuacugguccuguuauguacauuuacagcuacauacgcagacacaauauguauaggcuaccaugccaacaacucaaccgacacuguugacacaguacuugagaagaaugugacagugacacacucugucaaccuacuugaggacagucacaacggaaaacuaugucuacuaaaaggaauagccccacuacaauuggguaauugcagcguugccggauggaucuuaggaaacccagaaugcgaauuacugauuuccaaggaaucaugguccuacauuguagaaacaccaaaucccgagaauggaacauguuacccaggguauuucgccgacuaugaggaacugagggagcaauugaguucaguaucuucauuugagagauucgaaauauuccccaaagggagcucauggcccaaccacaccguaaccggaguaucagcaucaugcucccauaaugggaaaagcaguuuuuacagaaauuugcuauggcugacggggaagaaugguuuguacccaaaccugagcauguccuauguaaacaacaaagagaaagaaguccuugugcuaugggguguucaucacccaccuaacauaggggaccaaagggcccucuaccauacagaaaaugcuuaugucucuguagugucuucacauuauagcagaagauucaccccagaaauagccaaaagacccaaaguaagagaucaggaaggaagaaucaacuaccacuggacucugcuggaacccggggacacaauaauauuugaggcaaauggaaaucuaauagcgccaugguaugcuuucgcacugaguagaggcuuuggaucaggaaucaucaccucaaaugcaccaauggaugaaugugaugcgaagugucaaacaccucagggagcuauaaacaguagucuuccuuuccagaauguacacccaguuacaauaggagaguguccaaaguaugucaggagugcaaaauuaaggaugguuacaggacuaaggaacaucccauccauucaauccagagguuuguuuggagccauugccgguuucauugaagggggguggacuggaaugguagaugggugguaugguuaucaucaucagaaugagcaaggaucuggcuaugcugcagaucaaaaaagcacacaaaaugccauuaacgggauuacaaacaaggugaauucuguaauugagaaaaugaacacucaauucacagcugugggcaaagaauucaacaaauuagaaagaaggauggaaaacuuaaauaaaaaaguugaugauggguuucuagacauuuggacauauaaugcagaauuguugguucuacuggaaaaugaaaggacuuuggauuuccaugacuccaaugugaagaaucuguaugagaaaguaaaaagccaauuaaagaauaaugccaaagaaauaggaaacggguguuuugaauucuaucacaaguguaacaaugaaugcauggaaagugugaaaaauggaacuuaugacuauccaaaauauuccgaagaaucaaaguuaaacagggagaaaauugauggaguaaaauuggaaucaaugggagucuaucagauucuggcgaucuacucaacugucgccaguucccugguucuuuuggucucccugggggcaaucagcuucuggauguguuccaaugggucuuugcaguguagaauaugcaucuga

SEQ ID NO: 32458 - RNA, 1698 nt, Artificial Sequence
  derived and/or modified CDS sequence (wt) from hemagglutinin__InfluenzaA__ABB79990
augaaagcaaaacuacugguccuguuauguacauuuacagcuacauacgcagacacaauauguauaggcuaccaugccaacaacucaacagacacuguugacacaguacuugagaagaaugugacagugacacacucugucaaccuacuugaggacagucacaauggaaaacuaugucuacuaaaaggaauagccccacuacaauuggguaauugcagcguugccggauggaucuuaggaaacccagaaugcgaauuacugauuuccaaggaaucaugguccuacauuguagaaacaccaaaucccgagaauggaacauguuacccaggguauuucgccgacuaugaggaacugagggagcaauugaguucaguaucuucauuugagagauucgaaauauuccccaaaggaagcucauggcccaaccacaccguaaccggaguaucagcaucaugcucccauaaugggaaaagcaguuuuuacagaaauuugcuauggcugacggggaagaaugguuuguacccaaaccugagcauguccuauguaaacaacaaagagaaagaaguccuugugcuaugggguguucaucacccaccuaacauaggggaccaaaaggcccucuaccauacagaaaaugcuuaugucucuguagugucuucacauuauagcagaagauucaccccagaaauagccaaaagacccaaaguaagagaucaggaaggaagaaucaacuacuacuggacucugcuggaacccggggacacaauaauauuugaggcaaauggaaaucuaauagcgccaugguaugcuuucgcacugaguagaggcuuuggaucaggaaucaucaccucaaaugcaccaauggaugaaugugaugcgaagugucaaacaccucagggagcuauaaacaguagucuuccuuuccagaauguacacccaguuacaauaggagaguguccaaaguaugucaggagugcaaaauuaaggaugguuacaggacuaaggaacaucccauccauucaauccagagguuuguuuggagccauugccgguuucauugaagggggguggacuggaaugguagaugggugguaugguuaucaucaucagaaugagcaaggaucuggcuaugcugcagaucaaaaaagcacacaaaaugccauuaacgggauuacaaacaaggugaauucuguaauugagaaaaugaacacucaauucacagcugugggcaaagaauucaacaaauuagaaagaaggauggaaaacuuaaauaaaaaaguugaugauggguuucuagacauuuggacauauaaugcagaauuguugguucuacuggaaaaugaaaggacuuuggauuuccaugacuccaaugugaagaaucuguaugagaaaguaaaaagccaauuaaagaauaaugccaaagaaauaggaaacggguguuuugaauucuaucacaaguguaacaaugaaugcauggaaagugugaaaaauggaacuuaugacuauccaaaauauuccgaagaaucaaaguuaaacagggagaaaauugauggaguaaaauuggaaucaaugggagucuaucagauucuggcgaucuacucaacugucgccaguucccugguucuuuuggucucccugggggcaaucagcuucuggauguguuccaaugggucuuugcaguguagaauaugcaucuga

SEQ ID NO: 32459 - RNA, 1701 nt, Artificial Sequence
  derived and/or modified CDS sequence (wt) from hemagglutinin__InfluenzaA__ABB80001
augaagacuaucauugcuuugagcuacacucuaugucugguuuuugcucaaaaacuucccggaaaugacaacagcacggcaacgcugugccuugggcaccaugcaguaccaaacggaacgauagugaaaacaaucacgaaugaccaaauugaaguuacuaaugcuacugagcugguucagaguuccucaacagguggaauaugcgacaguccucaucagauccuugauggagaaaacugcacacuaauagaugcucuauugggagacccucagugugauggcuuccaaaauaagaaaugggaccuuuuuguugaacgcagcaaagccuacagcaacuguuacccuuaugaugugccggauuaugccucccuuaggucacuaguugccucaucuggcacacuggaguuuaacaaugaaagcuucaacuggacuggagucacucaaaauggaacaagcucugcuugcaaaaggagaucuaauaacaguuucuuuaguagauugaauugguugacccacuuaaaauucaaauacccagcauugaacgugacuaugccaaacaaugaaaaauuugacaaauuguacauuugggggguucaccacccggguacggacaaugaccaaaucagccuauaugcucaagcaucaggaagaaucacagucucuaccaaaagaagccaacaaacuguaaucccgaauaucggaucuagacccaggguaagggauauccccagcagaauaagcaucuauuggacaauaguaaaaccgggagacauacuuuugauuaacagcacagggaaucuaauugcuccucgggguuacuucaaaauacgaagugggaaaagcucaauaaugagaucagaugcacccauuggcaaaugcaauucugaaugcaucacuccaaauggaagcauucccaaugacaaaccauuucaaaauguaaacaggaucacauauggggccugucccagauauguuaagcaaagcacucugaaauuggcaacagggaugcgaaauguaccagagaaacaaacuagaggcauauuuggcgcaaucgcggguuucauagaaaaugguugggagggaaugguggaugguugguacgguuucaggcaucaaaauucugagggaauaggacaagcagcagaucucaaaagcacucaagcagcaaucaaccaaaucaaugggaagcugaauagguugaucgggaaaaccaacgagaaauuccaucagauugaaaaagaauucucagaaguagaagggagaauucaggaccucgagaaauauguugaggacacuaaaauagaucucuggucauacaacgcggagcuucuuguugcccuggagaaccaacauacaauugaucuaacugacucagaaaugaacaaacuguuugaaagaacaaagaagcaacugagggaaaaugcugaggauaugggcaaugguuguuucaaaauauaccacaaaugugacaaugccugcauagggucaaucagaaauggaacuuaugaccaugacguauacagagaugaagcauuaaacaaccgguuccagaucaaagguguugagcugaagucaggauacaaagauuggauccuauggauuuccuuugccauaucauguuuuuugcuuuguguugcuuuguugggguucaucaugugggccugccaaaaaggcaacauuaggugcaacauuugcauuuga

SEQ ID NO: 32460 - RNA, 1701 nt, Artificial Sequence
  derived and/or modified CDS sequence (wt) from hemagglutinin__InfluenzaA__ABB80012
augaagacuaucauugcuuugagcuacauucuaugucugguuuucgcucaaaaacuucccggaaaugacaacagcacggcaacgcugugccuugggcaccaugcaguaccaaacggaacgauagugaaaacaaucacgaaugaccaaauugaaguuacuaaugcuacugagcugguucagaguuccucaacagguggaauaugcgacaguccucaucagauccuugauggagaaaacugcacacuaauagaugcucuauugggagacccucagugugauggcuuccaaaauaagaaaugggaccuuuuuguugaacgcagcaaagccuacagcaacuguuacccuuaugaugugccggauuaugccucccuuaggucacuaguugccucauccggcacacuggaguuuaacaaugaaagcuucaauuggacuggagucacucaaaauggaacaagcucugcuugcaaaaggagaucuaauaacaguuucuuuaguagauugaauugguugacccacuuaaaauucaaauacccagcauugaacgugacuaugccaaacaaugaaaaauuugacaaauuauacauuugggggguucaccacccggguacggacaaugaccaaaucagccuauaugcucaagcaucaggaagaaucacagucucuaccaaaagaagccaacaaacuguaaucccgaauaucggaucuagacccaggguaagggauauccccagcagaauaagcaucuauuggacaauaguaaaaccgggagacauacuuuugauuaacagcacagggaaucuaauugcuccucgggguuacuucaaaauacgaagugggaaaagcucaauaaugagaucagaugcacccauuggcaaaugcaauucugaaugcaucacuccaaauggaagcauucccaaugacaaaccauuucaaaauguaaacaggaucacauauggggccugucccagauauguuaagcaaaacacucugaaauuggcaacagggaugcgaaauguaccagagaaacaaacuagaggcauauuuggcgcaaucgcggguuucauagaaaaugguugggagggaaugguggaugguugguacgguuucaggcaucaaaauucugagggaauaggacaagcagcagaucucaaaagcacucaagcagcaaucaaccaaaucaaugggaagcugaauagguugaucggaaaaaccaacgagaaauuccaucagauugaaaaagaauucucagaaguagaagggagaauucaggaccucgagaaauauguugaggacacuaaaauagaucucuggucauacaacgcggagcuucuuguugcccuggagaaccaacauacaauugaucuaacugacucagaaaugaacaaacuguuugaaagaacaaagaagcaacugagggaaaaugcugaggauaugggcaaugguuguuucaaaauauaccacaaaugugacaaugccugcauagggucaaucagaaauggaacuuaugaccaugauguauacagagaugaagcauuaaacaaccgguuccagaucaaagguguugagcugaagucaggauacaaagauuggauccuauggauuuccuuugccauaucauguuuuuugcuuuguguugcuuuguugggguucaucaugugggccugccaaaaaggcaacauuaggugcaacauuugcauuuga

SEQ ID NO: 32461 - RNA, 1701 nt, Artificial Sequence
  derived and/or modified CDS sequence (wt) from hemagglutinin__InfluenzaA__ABB80023
augaagaccaucauugcuuugagcuacauuuucuaucuggcucucggccaagaccuuccaggaaaugacaacagcaaagcaacgcugugccugggacaucaugcggugccaaacggaacacuagugaaaacaaucacaaaugaucagacugaagugacuaaugcuacugagcuaguucagagcuccucaacggggaaaauaugcaacaauccucaucgaauccuugauggaauggacugcacacugauagaugcucuacugggggacccucauugugauguuuuucaaaaugagacaugggaccuuuucguugaacgcagcaaagcuuucagcaacuguuacccuuaugauguaccagauuaugccucccuuagaucacuaguugccucgucaggcacucuggaguuuaucacugaggguuucacuuggacugaggucacucagaaugggggaagcaaugcuugcaaaaggggaccugauagcgguuuuuucaguagacugaacugguugaccaaaucaggaagaacauauccagugcugaacgugacuaugccaaacaaugacaauuuugacaaacuauacauuugggggguucaccacccgagcacggaccaagaacaaaccaaccuguauguucaaacaucagggagagucacagucucuaccaggagaagccagcaaacuauaaucccgaauaucggauccagacccuggguaaggggucugucuaguagaauaagcaucuauuggacaauaguuaagccgggagacguacugguaauuaauaguaaugggaaccuaaucgcuccucgggguuauuucaaaaugcgcacugggaaaagcucaauaaugaggucagaugcaccuauugauaccuguauuucugaaugcaucacuccaaauggaagcauucccaaugauaaacccuuucaaaacguaaacaagaucacauauggagcaugccccaaauauguuaagcaagacacccugaaauuggcaacaggaaugcggaauguaccagagaaacaaacuagaggccuauucggcgcaauagcaggcuucauagaaaaugguugggagggaaugauagacgguugguacgguuucaggcaucaaaauucugagggaacaggacaagcagcagaucuuaaaagcacucaagcagccauugaccaaaucaaugggaaauugaacaggauaaucgagaagacgaaugagaaauuccaucaaaucgaaaaggaauucucagaaguagaagggagaauucaggaccucgagaaauacguugaagacacuaaaauagaucuauggucuuacaaugcagagcuucuuguugcucuggagaaucaacacacaauugaucugacugacucggaaaugaacaaacuguuugaaaaaacaagaaggcaacugagggaaaaugcugaagacaugggcaaugguugcuucaaaauauaccacaaaugugacaacgcuugcauagagucaaucagaaaugggacuuaugaccaugauguauacagagacgaagcauuaaacaacagguuucaaaucaaagguguugaacugaaaucuggauacaaagacuggauccuguggauuuccuuugccauaucaugcuuuuugcuuuguguuguuuugcugggguucaucaugugggccugccagagaggcaacauuaggugcaacauuugcauuuga

SEQ ID NO: 32462 - RNA, 1701 nt, Artificial Sequence
  derived and/or modified CDS sequence (wt) from hemagglutinin__InfluenzaA__ABB80034
augaagaccaucauugcuuugagcuacauuuucugucugguucucggccaagaccuuccaggaaaugacaacagcacagcaacgcugugccugggacaucaugcggugccaaacggaacacuagugaaaacaaucacagaugaucagauugaagugacuaaugcuacugagcuaguucagagcuccucaacggggaaaauaugcaacaauccucaucgaauccuugauggacuagacugcacacugauagaugcucuauugggggacccucauugugauguuuuucaaaaugagacaugggaccuuuucguugaacgcagcaaagcuuucagcaacuguuacccuuaugaugugccagauuaugcaucccuuaggucacuaguugccucgucaggcacucuggaguuuaucacugaggguuucacuuggacuggggucacucagaaugggggaagcaaugcuugcaaaaggggaccugguagcgguuuuuucaguagacugaacugguugaccaaaucaggaagcacauauccagugcugaacgugacuaugccaaacaaugacaauuuugacaaacuauacauuugggggguucaucacccgagcacgaaccaagaacaaaccagccuguauguucaagcaucagggagagucacaguuucuaccaggagaagccagcagacuauaaucccgaauaucggguccagacccuggguaaggggucugucuaguagaauaagcaucuauuggacaauaguuaagccgggagacguacugguaauuaauaguaaugggaaccuaaucgcuccucgggguuauuucaaaaugcgcacugggaaaagcucaauaaugaggucagaugcaacuauugauaccuguauuucugaaugcaucacuccaaauggaagcauucccaaugacaaacccuuucaaaacguaaacaagaucacauauggagcaugccccaaguauguuaagcaaaacacccugaaguuggcaacagggaugcggaauguaccagagaaacaaacuagaggccuauucggcgcaauagcagguuucauagaaaaugguugggagggaaugauagacgguugguacgguuucaggcaucaaaauucugagggcacaggacaagcagcagaucuuaaaagcacucaagcagccaucgaccaaaucaaugggaaauugaacaggguaaucgagaagacgaacgagaaauuccaucaaaucgaaaaggaauucucagaaguagaagggagaauucaggaccucgagaaauacguugaagacacuaaaauagaucucuggucuuacaaugcggagcuucuugucgcucuggagaaucaacauacaauugaccugacugacucggaaaugaacaagcuguuugaaaaaacaagaaggcaacugagggaaaaugcugaagacaugggcaaugguugcuucaaaauauaccacaaaugugacaacgcuugcauugagucaaucagaaaugggacuuaugaccaugauguauacagagacgaagcauuaaacaaccgguuucagaucaaagguguugaacugaagucuggauacaaagacuggauccuguggauuuccuuugccauaucaugcuuuuugcuuuguguuguuuugcugggguucaucaugugggccugccagagaggcaacauuaggugcaacauuugcauuuga

SEQ ID NO: 32463 - RNA, 1698 nt, Artificial Sequence; identical to SEQ ID NO: 32376
  derived and/or modified CDS sequence (wt) from hemagglutinin__InfluenzaA__ABB80045

SEQ ID NO: 32464 - RNA, 1701 nt, Artificial Sequence
  derived and/or modified CDS sequence (wt) from hemagglutinin__InfluenzaA__ABB80081
augaagacuaucauugcuuugagcuacauuucaugucugguuuucgcucaaaaacuucccggaaaugacaacagcacggcaacgcugugccugggacaccaugcagugccaaacggaacgcuagugaaaacaaucacgaaugaccaaauugaagugacuaaugcuacugagcugguucagaguuccucaacagguagaauaugcgacaguccucacagaauccuugauggagaaaacugcacacugauagaugcucuauugggagacccucauugugauggcuuccaaaauaaggaaugggaccuuuuuguugaacgcagcaaagccuacagcaacuguuacccuuaugaugugccggauuaugccucccuuaggucacuaguugccucauccggcacucuggaguuuaacaaugaaagcuucaauuggacuggagucgcucagaauggaacaagcuaugcuugcaaaaggagaucuauuaaaaguuucuuuaguagauugaauugguugcaccaauuaaaauacaaauauccagcacugaacgugacuaugccaaacaaugacaaauuugacaaauuguacauuugggggguucaccacccgaguacggacagugaccaaaccagccuauaugcucaagcaucagggagagucacagucucuaccaaaagaagccaacaaacuguaaucccgaauaucggaucuagacccuggguaaggggugucuccagcagaauaagcaucuauuggacaauaguaaaaccgggagacauacuuuugauuaacagcacagggaaucuaauugcuccucgggguuacuucaaaauacgaagugggaaaagcucaauaaugaggucagaugcacccauuggcaaaugcaauucugaaugcaucacuccaaauggaagcauucccaaugacaaaccauuucaaaauguaaacaggaucacauauggggccugucccagauauguuaagcaaaacacucugaaauuggcaacagggaugcggaauguaccagagaaacaaacuagaggcauauucggcgcaaucgcagguuucauagaaaaugguugggagggaaugguagacgguugguacgguuucaggcaucaaaauucugagggcacaggacaagcagcagaucuuaaaagcacucaagcagcaaucaaccaaaucaacgggaaacugaauagguuaaucgagaaaacgaacgagaaauuccaucaaauugaaaaagaauucucagaaguagaagggagaauucaggaccucgagaaauauguugaggacacuaaaauagaucucuggucguacaacgcggagcuucuuguugcccuggagaaccaacauacaauugaucuaacugacucagaaaugaacaaacuguuugaaagaacaaggaagcaacugagggaaaaugcugaggauaugggcaaugguuguuucaaaauauaccacaaaugugacaaugccugcauagggucaaucagaaauggaacuuaugaccaugauguauacagagacgaagcauuaaacaaccgguuccagaucaaagguguugagcugaagucaggauacaaagauuggauccuauggauuuccuuugccauaucauguuuuuugcuuuguguuguuuugcugggguucaucaugugggccugccaaaaaggcaacauuaggugcaacauuugcauuuga

SEQ ID NO: 32465 - RNA, 1701 nt, Artificial Sequence
  derived and/or modified CDS sequence (wt) from hemagglutinin__InfluenzaA__ABB80092
augaagacuaucauugcuuugagcuacauuucaugucugguuuucgcucaaaaacuucccggaaaugacaacagcacggcaacgcugugccugggacaccaugcagugccaaacggaacgcuagugaaaacaaucacgaaugaccaaauugaagugacuaaugcuacugagcugguucagaguuccucaacagguagaauaugcgacaguccucaccgaauccuugauggagaaaacugcacacugauagaugcucuauugggagacccucauugugauggcuuccaaaauaaggaaugggaccuuuuuguugaacgcagcaaagccuacagcaacuguuacccuuaugaugugccggauuaugccucccuuaggucacuaguugccucauccggcacucuggaguuuaacaaugaaagcuucaauuggacuggagucgcucagaauggaacaagcuaugcuugcaaaaggagaucuauuaaaaguuucuuuaguagauugaauugguugcaccaauuaaaauacaaauauccagcacugaacgugacuaugccaaacaaugacaaauuugacaaauuguacauuugggggguucaccacccgaguacggacagugaccaaaccagccuauaugcucaagcaucagggagagucacagucucuaccaaaagaagccaacaaacuguaaucccgaauaucggaucuagacccuggguaaggggugucuccagcagaauaagcaucuauuggacauuaguaaaaccgggagacauacuuuugauuaacagcacagggaaucuaauugcuccucgggguuacuucaaaauacgaagugggaaaagcucaauaaugaggucagaugcacccauuggcaaaugcaauucugaaugcaucacuccaaauggaagcauucccaaugacaaaccauuucaaaauguaaacaggaucacauauggggccugucccagauauguuaagcaaaacacucugaaauuggcaacagggaugcggaauguaccagagaaacaaacuagaggcauauucggcgcaaucgcagguuucauagaaaaugguugggagggaaugguagacgguugguacgguuucaggcaucaaaauucugagggcacaggacaagcagcagaucuuaaaagcacucaagcagcaaucaaccaaaucaacgggaaacugaauagguuaaucgagaaaacgaacgagaaauuccaucaaauugaaaaagaauucucagaaguagaagggagaauucaggaccucgagaaauauguugaggacacuaaaauagaucucuggucguacaacgcggagcuucuuguugcccuggagaaccaacauacaauugaucuaacugacucagaaaugaacaaacuguuugaaagaacaaggaagcaacugagggaaaaugcugaggauaugggcaaugguuguuucaaaauauaccacaaaugugacaaugccugcauagggucaaucagaaauggaacuuaugaccaugauguauacagagacgaagcauuaaacaaccgguuccagaucaaagguguugagcugaagucaggauacaaagauuggauccuauggauuuccuuugccauaucauguuuuuugcuuuguguuguuuugcugggguucaucaugugggccugccaaaaaggcaacauuaggugcaacauuugcauuuga

SEQ ID NO: 32466 - RNA, 1701 nt, Artificial Sequence; identical to SEQ ID NO: 32443
  derived and/or modified CDS sequence (wt) from hemagglutinin__InfluenzaA__ABB80137

SEQ ID NO: 32467 - RNA, 1701 nt, Artificial Sequence
  derived and/or modified CDS sequence (wt) from hemagglutinin__InfluenzaA__ABB80159
augaagacuaucauugcuuugagcuacauuucaugucugguuuucgcucaaaaacuucccggaaaugacaacagcacggcaacgcugugccugggacaccaugcagugccaaacggaacgcuagugaaaacaaucacaaaugaccaaauugaagugacuaaugcuacugagcugguucagaguuccucaacagguagaauaugcgacaguccucaccgaauccuugauggagaaaacugcacacugauagaugcucuauugggagacccucauugugauggcuuccaaaauaaggaaugggaccuuuuuguugaacgcagcaaagccuacagcaacuguuacccuuaugaugugccggauuaugccucccuuaggucacuaguugccucauccggcacucuggaguuuaacaaugaaagcuucaauuggacuggagucgcucagaauggaacaagcuaugcuugcaaaaggagaucuauuaaaaguuucuuuaguagauugaauugguugcaccaauuaaaauacaaauauccagcacugaacgugacuaugccaaacaaugacaaauuugacaaauuguacauuugggggguucaccacccgaguacggacagugaccaaaccagccuauaugcucaagcaucagggagagucacagucucuaccaaaagaagccaacaaacuguaaucccgaauaucggaucuagacccuggguaaggggugucuccagcagaauaagcaucuauuggacaauaguaaaaccgggagacauacuuuugauuaacagcacagggaaucuaauugcuccucgggguuacuucaaaauacgaagugggaaaagcucaauaaugaggucagaugcacccauuggcaaaugcaauucugaaugcaucacuccaaauggaagcauucccaaugacaaaccauuucaaaauguaaacaggaucacauauggggccugucccagauauguuaagcaaaacacucugaaauuggcaacagggaugcggaauguaccagagaaacaaacuagaggcauauucggcgcaaucgcagguuucauagaaaaugguugggagggaaugguagacgguugguacgguuucaggcaucaaaauucugagggcacaggacaagcagcagaucuuaaaagcacucaagcagcaaucaaccaaaucaacgggaaacugaauagguuaaucgagaaaacgaacgagaaauuccaucaaauugaaaaagaauucucagaaguagaagggagaauucaggaccucgagaaauauguugaggacacuaaaauagaucucuggucguacaacgcggagcuucuuguugcccuggagaaccaacauacaauugaucuaacugacucagaaaugaacaaacuguuugaaagaacaaggaaacaacugagggaaaaugcugaggauaugggcaaugguuguuucaaaauauaccacaaaugugacaaugccugcauagggucaaucagaaauggaacuuaugaccaugauguauacagagacgaagcauuaaacaaccgguuccagaucaaagguguugagcugaagucaggauacaaagauuggauccuauggauuuccuuugccauaucauguuuuuugcuuuguguuguuuugcugggguucaucaugugggccugccaaaaaggcaacauuaggugcaacauuugcauuuga

SEQ ID NO: 32468 - RNA, 1701 nt, Artificial Sequence
  derived and/or modified CDS sequence (wt) from hemagglutinin__InfluenzaA__ABB80185
augaagacuaucauugcuuugagcuacauuuuaugucugguuuucgcucaaaaacuucccggaaaugacaacagcacggcaacgcugugucugggacaccaugcagugccaaacggaacgcuagugaaaacaaucacgaaugaccaaauugaagugacuaaugcuacugagcugguucagaguuccucaacagguagaauaugcgacaguccucaccaaauccuugaugggaaaaacugcacacugauagaugcucuauugggagacccucauugugauggcuuccaaaauaaggaaugggaccuuuuuguugaacgcagcacagcuuacagcaacuguuacccuuaugaugugccggauuaugccucccuuaggucacuaguugccucauccggcacccuggaguuuaccaaagaaggcuucaauuggacuggagucgcucaggauggaacaagcuaugcuugcaaaaggggaucuguuaaaaguuucuuuaguagauugaauugguugcacaaauuagaauacaaauauccagcacugaacgugacuaugccaaacaaugacaaauuugacaaauuguacauuugggggguucaccacccgaguacggacagugaccaaaccagccuauauguucaagcaucagggagagucacagucucuaccaaaagaagccaacaaacuguaaucccgaauaucgggucuagacccuggguaaggggugucuccagcagaauaagcaucuauuggacaauaguaaaaccgggagacauacuuuugauuaacagcacagggaaucuaauugcuccucgggguuacuucaaaauacgaagugggaaaagcucaauaaugaggucggaugcacccauugacaacugcaauucugaaugcauuacuccaaauggaagcauucccaaugacaaaccuuuucaaaauguaaacaggaucacauauggggccugucccagauauguuaagcaaaacacucugaaauuggcaacagggaugcggaauguaccagagaaacaaacuagaggcauauucggcgcaaucgcagguuucauagaaaaugguugggagggaaugguggacgguugguacgguuucaggcaucaaaauucugaaggcacaggacaagcagcagaucuuaaaagcacucaagcagcaaucaaccaaaucaacgggaaacugaauagguuaaucgagaaaacgaacgagaaauuccaucaaaucgaaaaagaauucucagaaguagaagggagaauucaggaccucgagaaauauguugaagacacuaaaauagaucucuggucuuacaacgcggagcuucuuguugcccuggagaaccaacauacaauugaucuaacugacucagaaaugaacaaacuguucgaaagaacaagaaagcaacugagggaaaaugcugaggacaugggcaaugguugcuucaaaauauaccacaaaugugacaaugccugcauagggucaaucagaaauggaacuuaugaccaugauguauacagagacgaagcauuaaacaaccgguuccagaucaaagguguugagcugaagucaggauacaaagauuggauccuauggauuuccuuugccauaucaugcuuuuugcuuuguguuguuuugcugggguucauuaugugggccugccaaaaaggcaacauuaggugcaacauuugcauuuga

SEQ ID NO: 32469 - RNA, 1701 nt, Artificial Sequence
  derived and/or modified CDS sequence (wt) from hemagglutinin__InfluenzaA__ABB80207
augaagacuaucauugcuuugagcuacauuuuaugucugguuuucgcucaaaaacuucccggaaaugacaacagcacggcaacgcugugccugggacaccaugcagugccaaacggaacgcuagugaaaacaaucacgaaugaccaaauugaagugacuaaugcuacugagcugguucagaguuccucaacagguagaauaugcgacaguccucaccgaauccuugauggagaaaacugcacacugauagaugcucuauugggagacccucauugugaugacuuccaaaauaaggaaugggaccuuuuuguugaacgcagcaaagccuacagcaacugcuacccuuaugaugugccggauuaugccucccuuaggucacuaguugccucauccggcacccuggaguuuaacaaugaaagcuucaauuggacuggagucgcucagaauggaacaagcuaugcuugcaaaaggagaucuauuaaaaguuucuuuaguagauugaauugguugcaccaauuaaaauacaaauauccagcacugaacgugacuaugccaaacaaugacaaauuugacaaauuguacauuugggggguucaccacccgaguacggacagugaccaaaccagccuauaugcucaagcaucagggagagucacagucucuaccaaaagaagccaacaaacuguaaucccgaauaucggaucuagacccuggguaaggggugucuccagcagaauaagcaucuauuggacaauaguaaaaccgggagacauacuuuugauuaacagcacagggaaucuaauugcuccucgggguuacuucaaaauacgaagugggaaaagcucaauaaugaggucagaugcacccauuggcaaaugcaauucugaaugcaucacuccaaauggaagcauucccaaugacaaaccauuucaaaauguaaacaggaucacauauggggccugucccagauauguuaagcaaaacacucugaaauuggcaacagggaugcggaauguaccagagaaacaaacuagaggcauauucggcgcaaucgcagguuucauagaaaaugguugggagggaaugguagacgguugguacgguuucaggcaucaaaauucugagggcacaggacaagcagcagaucuuaaaagcacucaagcagcaaucaaccaaaucaacgggaaacugaauagguuaaucgagaaaacgaacgagaaauuccaucaaauugaaaaagaauucucagaaguagaagggagaauucaggaccucgagaaauauguugaggacacuaaaauagaucucuggucguacaacgcggagcuucuuguugcccuggagaaccaacauacaauugaucuaacugacucagaaaugaacaaacuguuugaaagaacaaggaagcaacugagggaaaaugcugaggauaugggcaaugguuguuucaaaauauaccacaaaugugacaaugccugcauagggucaaucagaaaugggacuuaugaccaugauguauacagagacgaagcauuaaacaaccgguuccagaucaaagguguugagcugaagucaggauacaaagauuggauccuauggauuuccuuugccaugucauguuuuuugcuuuguguuguuuugcugggguucaucaugugggccugccaaaaaggcaacauuaggugcaacauuugcauuuga

SEQ ID NO: 32470 - RNA, 1701 nt, Artificial Sequence
  derived and/or modified CDS sequence (wt) from hemagglutinin__InfluenzaA__ABB80229
augaagacuaucauugcuuugagcuacauuuuaugucugguuuucgcucaaaaacuucccggaaaugacaacagcacggcaacgcugugccugggacaccaugcagugccaaacggaacgcuagugaaaacaaucacgaaugaccaaauugaagugacuaaugcuacugagcugguucagaguuccucaacagguagaauaugcgacaguccucaccgaauccuugauggagaaaacugcacacugauagaugcucuauugggagacccucauugugauggcuuccaaaauaaggaaugggaccuuuuuguugaacgcagcaaagccuacagcaacuguuacccuuaugaugugccggauuaugccucccuuaggucacuaguugccucauccggcacccuggaguuuaacaaugaaagcuucaauuggacuggagucgcucagaauggaacaagcuaugcuugcaaaaggagaucuauuaaaaguuucuuuaguagauugaauugguugcaccaauuaaaauacaaauauccagcacugaacgugacuaugccaaacaaugacaaauuugacaaauuguacauuugggggguucaccacccgaguacggacagugaccaaaccagccuauaugcucaagcaucagggagagucacagucucuaccaaaagaagccaacaaacuguaaucccgaauaucggaucuagacccuggguaaggggugucuccagcagaauaagcaucuauuggacaauaguaaaaccgggagacauacuuuugauuaacagcacagggaaucuaauugcuccucgggguuacuucaaaauacgaagugggaaaagcucaauaaugaggucagaugcacccauuggcaaaugcaauucugaaugcaucacuccaaauggaagcauucccaaugacaaaccauuucaaaauguaaacaggaucacauauggggccugucccagauauguuaagcaaaacacucugaaauuggcaacagggaugcggaauguaccagagaaacaaacuagaggcauauucggcgcaaucgcagguuucauagaaaaugguugggagggaaugguggacgguugguacgguuucaggcaucaaaauucugagggcacaggacaagcagcagaucuuaaaagcacucaagcagcaaucaaccaaaucaacgggaaacugaauagguuaaucgagaaaacgaacgagaaauuccaucaaauugaaaaagaauucucagaaguagaagggagaauucaggaccucgagaaauauguugaggacacuaaaauagaucucuggucguacaacgcggagcuucuuguugcccuggagaaccaacauacaauugaucuaacugacucagaaaugaacaaacuguuugaaagaacaaggaagcaacugagggaaaaugcugaggacaugggcaaugguuguuucaaaauauaccacaaaugugacaaugccugcauagggucaaucagaaauggaacuuaugaccaugauguauacagagacgaagcauuaaacaaccgguuccagaucaaagguguugagcugaagucaggauacaaagauuggauccuauggauuuccuuugccaugucauguuuuuugcuuuguguuguuuugcugggguucaucaugugggccugccaaaaaggcaacauuaggugcaacauuugcauuuga

SEQ ID NO: 32471 - RNA, 1701 nt, Artificial Sequence
  derived and/or modified CDS sequence (wt) from hemagglutinin__InfluenzaA__ABB80240
augaagacuaucauugcuuugagcuacauuucaugucugguuuucgcucaaaaacuucccggaaaugacaacagcacggcaacgcugugccugggacaccaugcagugccaaacggaacgcuagugaaaacaaucacgaaugaccaaauugaagugacuaaugcuacugagcugguucagaguuccucaacagguagaauaugcgacaguccucaccgaauccuugauggagaaaacugcacacugauagaugcucuauugggagacccucauugugauggcuuccaaaauaaggaaugggaccuuuuuguugaacgcagcaaagccuacagcaacuguuacccuuaugaugugccggauuaugccucccuuaggucacuaguugccucauccggcacccuggaguuuaacaaugaaagcuucaauuggacuggagucgcucagaauggaacaagcuaugcuugcaaaaggagaucuauuaaaaguuucuuuaguagauugaauugguugcaccaauuaaaauacaaauauccagcacugaacgugacuaugccaaacaaugacaaauuugacaaauuguacauuugggggguucaccacccgaguacggacagugaccaaaccagccuauaugcucaagcaucagggagagucacagucucuaccaaaagaagccaacaaacuguaaucccgaauaucggaucuagacccuggguaaggggugucuccagcagaauaagcaucuauuggacaauaguaaaaccgggagacauacuuuugauuaacagcacagggaaucuaauugcuccucgggguuacuucaaaauacgaagugggaaaagcucaauaaugaggucagaugcacccauuggcaaaugcaauucugaaugcaucacuccaaauggaagcauucccaaugacaaaccauuucaaaauguaaacaggaucacauauggggccugucccagauauguuaagcaaaacacucugaaauuggcaacagggaugcggaauguaccagagaaacaaacuagaggcauauucggcgcaaucgcagguuucauagaaaaugguugggagggaaugguagacgguugguacgguuucaggcaucaaaauucugagggcacaggacaagcagcagaucuuaaaagcacucaagcagcaaucaaccaaaucaacgggaaacugaauagguuaaucgagaaaacgaacgagaaauuccaucaaauugaaaaagaauucucagaaguagaagggagaauucaggaccucgagaaauauguugaggacacuaaaauagaucucuggucguacaacgcggagcuucuuguugcccuggagaaccaacauacaauugaucuaacugacucagaaaugaacaaacuguuugaaagaacaaggaagcaacugagggaaaaugcugaggauaugggcaaugguuguuucaaaauauaccacaaaugugacaaugccugcauagggucaaucagaaauggaacuuaugaccaugauguauacagagacgaagcauuaaacaaccgguuccagaucaaagguguugagcugaagucaggauacaaagauuggauccuauggauuuccuuugccauaucauguuuuuugcuuuguguuguuuugcugggguucaucaugugggccugccaaaaaggcaacauuaggugcaacauuugcaucuga

SEQ ID NO: 32472 - RNA, 1701 nt, Artificial Sequence
  derived and/or modified CDS sequence (wt) from hemagglutinin__InfluenzaA__ABB80251
augaagacuaucauugcuuugagcuacauuuuaugucugguuuucgcucaaaaacuucccggaaaugacaacagcacggcaacgcugugccugggacaccaugcagugccaaacggaacgcuagugaaaacaaucacgaaugaccaaauugaagugacuaaugcuacugagcugguucagaguuccucaacagguagaauaugcgacaguccucaccgaauccuugauggagaaaacugcacacugauagaugcucuauugggagacccucauugugauggcuuccaaaauaaggaaugggaccuuuuuguugaacgcagcaaagccuacagcaacuguuacccuuaugaugugccggauuaugccucccuuaggucacuaguugccucauccggcacccuggaguuuaacaaugaaagcuucaauuggacuggagucgcucagaauggaacaagcucugcuugcaaaaggagaucuauuaaaaguuucuuuaguagauugaauugguugcaccaauuaaaauacaaauauccagcacugaacgugacuaugccaaacaaugacaaauuugacaaauuguacauuugggggguucaccacccgaguacggacagugaccaaaccagccuauaugcucaagcaucagggagagucacagucucuaccaaaagaagccaacaaacuguaaucccgaauaucggaucuagacccuggguaaggggugucuccagcagaauaagcaucuauuggacaauaguaaaaccgggagacauacuuuugauuaacagcacagggaaucuaauugcuccucgggguuacuucaaaauacgaagugggaaaagcucaauaaugaggucagaugcacccauuggcaaaugcaauucugaaugcaucacuccaaauggaagcauucccaaugacaaaccauuucaaaauguaaacaggaucacauauggggccugucccagauauguuaagcaaaacacucugaaauuggcaacagggaugcggaauguaccagagaaacaaacuagaggcauauucggcgcaaucgcagguuucauagaaaaugguugggagggaaugguagacgguugguacgguuucaggcaucaaaauucugagggcacaggacaagcagcagaucuuaaaagcacucaagcagcaaucaaccaaaucaacgggaaacugaauagguuaaucgagaaaacgaacgagaaauuccaucaaauugaaaaagaauucucagaaguagaagggagaauucaggaccucgagaaauauguugaggacacuaaaauagaucucuggucguacaacgcggagcuucuuguugcccuggagaaccaacauacaauugaucuaacugacucagaaaugaacaaacuguuugaaagaacaaggaagcaacugagggaaaaugcugaggauaugggcaaugguuguuucaaaauauaccacaaaugugacaaugccugcauagggucaaucagaaauggaacuuaugaccaugauguauacagagaugaagcauuaaacaaccgguuccagaucaaagguguugagcuuaagucaggauacaaagauuggauccuauggauuuccuuugccauaucauguuuuuugcuuuguguuguuuugcuggggcucaucaugugggccugccaaaaaggcaacauuaggugcaacauuugcauuuga

SEQ ID NO: 32473 - RNA, 1701 nt, Artificial Sequence
  derived and/or modified CDS sequence (wt) from hemagglutinin__InfluenzaA__ABB80492
augaagacuaucauugcuuugagcuacauuuuaugucugguuuucgcucaaaaacuucccggaaaugacaacagcacggcaacgcugugccugggacaccaugcagugccaaacggaacgcuagugaaaacaaucacgaaugaccaaauugaagugacuaaugcuacugagcugguucagaauuccucaacagguagaauaugcgacaguccucaccgaauccuugauggagaaaacugcacacugauagaugcucuauugggagacccucauugugauggcuuccaaaauaaggaaugggaccuuuuuguugaacgcagcaaagccuacagcaacuguuacccuuaugaugugccggauuaugccucccuuaggucacuaguugccucauccggcacccuggaguuuaacaaugaaagcuucaauuggacuggagucgcucagaauggaacaagcuaugcuugcaaaaggagaucuauuaaaaguuucuuuaguagauugaauugguugcaccaauuaaaauacaaauauccagcacugaacgugacuaugccaaacaaugacaaauuugacaaauuguacauuugggggguucaccacccgaguacggacagugaccaaaccagccuauaugcucaagcaucagggagagucacagucucuaccaaaagaagccaacaaacuguaaucccgaauaucggaucuagacccuggguaaggggugucuccagcagaauaagcaucuauuggacaauaguaaaaccgggagacauacuuuugauuaacagcacagggaaucuaauugcuccucgggguuacuucaaaauacgaagugggaaaagcucaauaaugaggucagaugcacccauuggcaaaugcaauucugaaugcaucacuccaaauggaagcauucccaaugacaaaccauuucaaaauguaaacaggaucacauauggggccugucccagauauguuaagcaaaacacccugaaauuggcaacagggaugcggaauguaccagagaaacaaacuagaggcauauucggcgcaaucgcagguuucauagaaaaugguugggagggaaugguagacgguugguacgguuucaggcaucaaaauucugagggcacaggacaagcagcagaucuuaaaagcacucaagcagcaaucaaccaaaucaacgggaaacugaauagguuaaucgagaaaacgaacgagaaauuccaucaaauugaaaaagaauucucagaaguagaagggagaauucaggaccucgagaaauauguugaggacacuaaaauagaucucuggucguacaacgcggagcuucuuguugcccuggagaaccaacauacaauugaucuaacugacucagaaaugaacaaacuguuugaaagaacaaggaagcaacugagggaaaaugcugaggauaugggcaaugguuguuucaaaauauaccacaaaugugacaaugccugcauagggucaaucagaaauggaacuuaugaccaugauguauacagagacgaagcauuaaacaaccgguuccagauaaaagguguugagcugaagucaggauacaaagauuggauccuauggauuuccuuugccaugucauguuuuuugcuuuguguuguuuugcugggguucaucaugugggccugccaaaaaggcaacauuaggugcaacauuugcauuuga

SEQ ID NO: 32474 - RNA, 1701 nt, Artificial Sequence
  derived and/or modified CDS sequence (wt) from hemagglutinin__InfluenzaA__ABB80503
augaagacuaucauugcuuugagcuacauuucaugucugguuuucgcucaaaaacuucccggaaaugacaacaacacggcaacgcugugccugggacaccaugcagugccaaacggaacgcuagugaaaacaaucacgaaugaccaaauugaagugacuaaugcuacugagcugguucagaguuccucaacagguagaauaugcgacaguccucaccgaauccuugauggagaaaacugcacacugauagaugcucuauugggagacccucauugugauggcuuccaaaauaaggaaugggaccuuuuuguugaacgcagcaaagccuacagcaacuguuacccuuaugaugugccggauuaugccucccuuaggucacuaguugccucauccggcacucuggaguuuaacaaugaaagcuucaauuggacuggagucgcucagaauggaacaagcuaugcuugcaaaaggagaucuauuaaaaguuucuuuaguagauugaauugguugcaccaauuaaaauacaaauauccagcacugaacgugacuaugccaaacaaugacaaauuugacaaauuguacauuugggggguucaccacccgaguacggacagugaccaaaccagccuauaugcucaagcaucagggagagucacagucucuaccaaaagaagccaacaaacuguaaucccgaauaucggaucuagacccuggguaaggggugucuccagcagaauaagcaucuauuggacaauaguaaaaccgggagacauacuuuugauuaacagcacagggaaucuaauugcuccucgggguuacuucaaaauacgaagugggaaaagcucaauaaugaggucagaugcacccauuggcaaaugcaauucugaaugcaucacuccaaauggaagcauucccaaugacaaaccauuucaaaauguaaacaggaucacauauggggccugucccagauauguuaagcaaaacacucugaaauuggcaacagggaugcggaauguaccagagaaacaaacuagaggcauauucggcgcaaucgcagguuucauagaaaaugguugggagggaaugguagacgguugguacgguuucaggcaucaaaauucugagggcacaggacaagcagcagaucuuaaaagcacucaagcagcaaucaaccaaaucaacgggaaacugaauagguuaaucgagaaaacgaacgagaaauuccaucaaauugaaaaagaauucucagaaguagaagggagaauucaggaccucgagaaauauguugaggacacuaaaauagaucucuggucguacaacgcggagcuucuuguugcccuggagaaccaacauacaauugaucuaacugacucagaaaugaacaaacuguuugaaagaacaaggaagcaacugagggaaaaugcugaggauaugggcaaugguuguuucaaaauauaccacaaaugugacaaugccugcauagggucaaucagaaauggaacuuaugaccaugauguauacagagacgaagcauuaaacaaccgguuccagaucaaagguguugagcugaggucaggauacaaagauuggauccuauggauuuccuuugccauaucauguuuuuugcuuuguguuguuuugcugggguucaucaugugggccugccaaaaaggcaacauuaggugcaacauuugcauuuga

SEQ ID NO: 32475 - RNA, 1701 nt, Artificial Sequence
  derived and/or modified CDS sequence (wt) from hemagglutinin__InfluenzaA__ABB80514
augaagacuaucauugcuuugagcuacauuucaugucugguuuucgcucaaaaacuucccggaaaugacaacagcacggcaacgcugugccugggacaccaugcagugccaaacggaacgcuagugaaaacaaucacgaaugaccaaauugaagugacuaaugcuacugagcugguucagaguuccucaacagguagaauaugcgacaguccucaccgaauccuugauggagaaaacugcacacugauagaugcucuauugggagacccucauugugauggcuuccaaaauaaggaaugggaccuuuuuguugaacgcagcaaagccuacagcaacuguuacccuuaugaugugccggauuaugccucccuuaggucacuaguugccucauccggcacucuggaguuuaacaaugaaagcuucaauuggacuggagucgcucagaauggaacaagcuaugcuugcaaaaggagaucuauuaaaaguuucuuuaguagauugaauugguugcaccaauuaaaauacaaauauccagcacugaacgugacuaugccaaacaaugacaaauuugacaaauuguacauuugggggguucaccacccgaguacggacagugaccaaaccagccuauaugcucaagcaucagggagagucacagucucuaccaaaagaagccaacaaacuguaaucccgaauaucggaucuagacccuggguaaggggugucuccagcagaauaagcaucuauuggacaauaguaaaaccgggagacauacuuuugauuaacagcacagggaaucuaauugcuccucgggguuacuucaaaauacgaagugggaaaagcucaauaaugaggucagaugcacccauuggcaaaugcaauucugaaugcaucacuccaaauggaagcauucccaaugacaaaccauuucaaaauguaaacaggaucacauauggggccugucccagauauguuaagcaaaacacucugaaauuggcaacagggaugcggaauguaccagagaaacaaacuagaggcauauucggcgcaaucgcagguuucauagaaaaugguugggagggaaugguagacgguugguacgguuucaggcaucaaaauucugagggcacaggacaagcagcagaucuuaaaagcacucaagcagcaaucaaccaaaucaacgggaaacugaauagguuaaucgagaaaacgaacgagaaauuccaucaaauugaaaaagaauucucagaaguagaagggagaauucaggaccucgagaaauauguugaggacacuaaaauagaucucuggucguacaacgcggagcuucuuguugcccuggagaaccaacauacaauugaucuaacugacucagaaaugaacaaacuguuugaaagaacaaggaagcaacugagggaaaaugcugaggauaugggcaaugguuguuucaaaauauaccacaaaugugacaaugccugcauagggucaaucagaaauggaacuuaugaccaugauguauacagagacgaagcauuaaacaaccgguuccagaucaaagguguugagcugaagucaggauacaaagauuggauccuauggauuuccuuugccauaucauguuuuuugcuuuguguuguuuugcugggguucaucaugugggccugccaaaaaggcaacauuaggugcaacauuugcauuuga

SEQ ID NO: 32476 - RNA, 1701 nt, Artificial Sequence
  derived and/or modified CDS sequence (wt) from hemagglutinin__InfluenzaA__ABB80529
augaagacuaucauugcuuugagcuacauuucaugucugguuuucgcucaaaaacuucccggaaaugacaacagcacggcaacgcugugccugggacaccaugcagugccaaacggaacgcuagugaaaacaaucacgaaugaccaaauugaagugacuaaugcuacugagcugguucagaguuccucaacagguagaauaugcgacaguccucaccgaauccuugauggagaaaacugcacacugauagaugcucuauugggagacccucauugugauggcuuccaaaauaaggaaugggaccuuuuuguugaacgcagcaaagccuacagcaacuguuacccuuaugaugugccggauuaugccucccuuaggucacuaguugccucauccggcacucuggaguuuaacaaugaaagcuucaauuggacuggagucgcucagaauggaacaagcuaugcuugcaaaaggagaucuauuaaaaguuucuuuaguagauugaauugguugcaccaauuaaaauacaaauauccagcacugaacgugacuaugccaaacaaugacaaauuugacaaauuguacauuugggggguucaccacccgaguacggacagugaccaaaccagccuauaugcucaagcaucagggagagucacagucucuaccaaaagaagccaacaaacuguaaucccgaauaucggaucuagacccuggguaaggggugucuccagcagaauaagcaucuauuggacaauaguaaaaccgggagacauacuuuugauuaacagcacagggaaucuaauugcuccucgggguuacuucaaaauacgaagugggaaaagcucaauaaugaggucagaugcacccauuggcaaaugcaauucugaaugcaucacuccaaauggaagcauucccaaugacaaaccauuucaaaauguaaacaggaucacauauggggccugucccagauauguuaagcaaaacacucugaaauuggcaacagggaugcggaauguaccagauaaacaaacuagaggcauauucggcgcaaucgcagguuucauagaaaaugguugggagggaaugguagacgguugguacgguuucaggcaucaaaauucugagggcacaggacaagcagcagaucuuaaaagcacucaagcagcaaucaaccaaaucaacgggaaacugaauagguuaaucgagaaaacgaacgagaaauuccaucaaauugaaaaagaauucucagaaguagaagggagaauucaggaccucgagaaauauguugaggacacuaaaauagaucucuggucguacaacgcggagcuucuuguugcccuggagaaccaacauacaauugaucuaacugacucagaaaugaacaaacuguuugaaagaacaaggaagcaacugagggaaaaugcugaggauaugggcaaugguuguuucaaaauauaccacaaaugugacaaugccugcauagggucaaucagaaauggaacuuaugaccaugauguauacagagacgaagcauuaaacaaccgguuccagaucaaagguguugagcugaagucaggauacaaagauuggauccuauggauuuccuuugccauaucauguuuuuugcuuuguguuguuuugcugggguucaucaugugggccugccaaaaaggcaacauuaggugcaacauuugcauuuga

SEQ ID NO: 32477 - RNA, 1701 nt, Artificial Sequence
  derived and/or modified CDS sequence (wt) from hemagglutinin__InfluenzaA__ABB80641
augaagacuaucauugcuuugagcuacauuuuaugucuuguuuucgcucaaaaaauucccggaaaugacaacagcacggcaacgcugugccugggacaccaugcagugccaaacggaacgcuagugaaaacaaucacgaaugaccaaauugaagugacuaaugcuacugagcugguucagaguuccucaacagguagaauaugcgacaguccucaccgaauccuugauggagaaaacugcacacugauagaugcucuauugggagacccucauugugauggcuuccaaaauaaggaaugggaccuuuuuguugaacgcagcaaagccuacagcaacuguuacccuuaugaugugucggauuaugccucccuuaggucacuaguugccucauccggcacccuggaguuuaacaaugaaagcuucaauuggacuggagucgcucagaauggaacaagcuacgcuugcaaaaggagaucuauuaaaaguuucuuuaguagauugaauugguugcaccaauuaaaauacaaauauccagcacugaacgugacuaugccaaacaaugacaaauuugacaaauuguacauuugggggguucaccacccgaguacggacagugaccaaaccagccuauaugcucaagcaucagggagagucacagucucuaccaaaagaagccaacaaacuguaaucccgaauaucggaucuagacccuggguaaggggugucuccagcagaauaagcaucuauuggacaauaguaaaaccgggagacauacuuuugauuaacagcacagggaaucuaauugcuccucgggguuacuucaaaauacgaagugggaaaagcucaauaaugaggucagaugcacccauuggcaaaugcaauucugaaugcaucacuccaaauggaagcauucccaaugacaaaccauuucaaaauguaaacaggaucacauauggggccugucccagauauguuaagcaaaacacucugaaauuggcaacagggaugcggaauguaccagagaaacaaacuagaggcauauucggcgcaauagcagguuucauagaaaaugguugggagggaaugguagacgguugguacgguuucaggcaucaaaauucugagggcacaggacaagcagcagaucuuaaaagcacucaagcagcaaucaaccaaaucaacgggaaacugaauagguuaaucgagaaaacgaacgagaaauuccaucaaauugaaaaagaauucucagaaguagaagggagaauucaggaccucgagaaauauguugaggacacuaaaauagaucucuggucguacaacgcggagcuucuuguugcccuggagaaccaacauacaauugaucuaacugacucagaaaugaacaaacuguuugaaagaacaaggaagcaacugagggaaaaugcugaggauaugggcaaugguuguuucaaaauauaccacaaaugugacaaugccugcauagggucaaucagaaauggaacuuaugaccaugauguauacagagacgaagcauuaaacaaccgguuucagaucaaagguguugagcugaagucaggauacaaagauuggauccuauggauuuccuuugccauaucauguuuuuugcuuuguguuguuuugcugggguucaucaugugggccugccaaaaaggcaacauuaggugcaacauuugcauuuga

SEQ ID NO: 32478 - RNA, 1701 nt, Artificial Sequence
  derived and/or modified CDS sequence (wt) from hemagglutinin__InfluenzaA__ABB80661
augaagacuaucauugcuuugagcuacauuuuaugucugguuuucgcucaaaaaauucccggaaaugacaacagcacggcaacgcugugccugggacaccaugcagugccaaacggaacgcuagugaaaacaaucacgaaugaccaaauugaagugacuaaugcuacugagcugguucagaguuccucaacagguagaauaugcgacaguccucaccgaauccuugauggagaaaacugcacacugauagaugcucuauugggagacccucauugugauggcuuccaaaauaaggaaugggaccuuuuuguugaacgcagcaaagccuacagcaacuguuacccuuaugaugugccggauuaugccucccuuaggucacuaguugccucauccggcacccuggaguuuaacaaugaaagcuucaauuggacuggagucgcucagaauggaacaagcuaugcuugcaaaaggagaucuauuaaaaguuucuuuaguagauugaauugguugcaccaauuaaaauacaaauauccagcacugaacgugacuaugccaaacaaugacaaauuugacaaauuguacauuugggggguucaccacccgaguacggacagugaccaagccagccuauaugcucaagcaucagggagagucacagucucuaccaaaagaagccaacaaacuguaaucccgaauaucggaucuagacccuggguaaggggugucuccagcagaauaagcaucuauuggacaauaguaaaaccgggagacauacuuuugauuaacagcacagggaaucuaauugcuccucgggguuacuucaaaauacgaagugggaaaagcucaauaaugaggucagaugcacccauuggcaaaugcaauucugaaugcaucacuccaaauggaagcauucccaaugacaaaccauuucaaaauguaaacaggaucacauauggggccugucccagauauguuaagcaaaacacucugaaauuggcaacagggaugcggaauguaccagagaaacaaacuagaggcauauucggcgcaaucgcagguuucauagaaaaugguugggagggaaugguagacgguugguacgguuucaggcaucaaaauucugagggcacaggacaagcagcagaucuuaaaagcacucaagcagcaaucaaccaaaucaacgggaaacugaauagguuaaucgagaaaacgaacgagaaauuccaucaaauugaaaaagaauucucagaaguagaagggagaauucaggaccucgagaaauauguugaggacacuaaaauagaucucuggucguacaacgcggagcuucuuguugcccuggagaaccaacauacaauugaucuaacugacucagaaaugaacaaacuguuugaaagaacaaggaagcaacugagggaaaaugcugaggauaugggcaaugguuguuucaaaauauaccacaaaugugacaaugccugcauagggucaaucagaaauggaacuuaugaccaugauguauacagagacgaagcauuaaacaaccgguuucagaucaaagguguugagcugaagucaggauacaaagauuggauccuauggauuuccuuugccauaucauguuuuuugcuuuguguuguuuugcugggguucaucaugugggccugccaaaaaggcaacauuaggugcaacauuugcauuuga

SEQ ID NO: 32479 - RNA, 1701 nt, Artificial Sequence
  derived and/or modified CDS sequence (wt) from hemagglutinin__InfluenzaA__ABB80672
augaagacuaucauugcuuugagcuacauuuuaugucugguuuucgcucaaaaacuucccggaaaugacaacagcacggcaacgcugugccugggacaccaugcagugccaaacggaacgcuagugaaaacaaucacgaaugaccaaauugaagugacuaaugcuacugagcugguucaggguuccucaacagguagaauaugcgacaguccucaccaaauccuugauggaaaaaacugcacacugauagaugcucuauugggagacccucauugugauggcuuccaaaauaaggaaugggaccuuuuuguugaacgcagcacagcuuacagcaacuguuacccuuaugaugugccggauuaugccucccuuaggucacuaguugccucauccggcacccuggaguuuaccaaagaaggcuucaauuggacuggagucgcucaggauggaacaagcuaugcuugcaaaaggggaucuguuaaaaguuucuuuaguagauugaauugguugcacaaauuagaauacaaauauccagcacugaacgugacuaugccaaacaaugacaaauuugacaaauuguacauuugggggguucaccacccgaguacggacagugaccaaaccagccuauauguucaagcaucagggagagucacagucucuaccaaaagaagccaacaaacuguaaucccgaauaucgggucuagacccuggguaaggggugucuccagcagaauaagcaucuauuggacaauaguaaaaccgggagacauacuuuugauuaacagcacagggaaucuaauugcuccucgggguuacuucaaaauacgaagugggaaaagcucaauaaugaggucggaugcacccauugacaacugcaauucugaaugcauuacuccaaauggaagcauucccaaugacaaaccuuuucaaaauguaaacaggaucacauauggggccugucccagauauguuaagcaaaacacucugaaauuggcaacagggaugcggaauguaccagagaaacaaacuagaggcauauucggcgcaaucgcagguuucauagaaaaugguugggagggaaugguggacgguugguacgguuucaggcaucaaaacucugaaggcacaggacaagcagcagaucuuaaaagcacucaagcagcaaucaaccaaaucaacgggaaacugaauagguuaaucgagaaaacgaacgagaaauuccaucaaaucgaaaaagaauucucagaaguagaagggagaauucaggaccucgagaaauauguugaagacacuaaaauagaucucuggucuuacaacgcggagcuucuuguugcccuggagaaccaacauacaauugaucuaacugacucagaaaugaacaaacuguucgaaagaacaagaaagcaacugagggaaaaugcugaggacaugggcaaugguugcuucaaaauauaccacaaaugugacaaugccugcauagggucaaucagaaauggaacuuaugaucaugauguauacagagacgaagcauuaaacaaccgguuccagaucaaagguguugagcugaagucaggauacaaagauuggauccuauggauuuccuuugccauaucaugcuuuuugcuuuguguuguuuugcugggguucauuaugugggccugccaaaaaggcaacauuaggugcaacauuugcauuuga

SEQ ID NO: 32480 - RNA, 1701 nt, Artificial Sequence
  derived and/or modified CDS sequence (wt) from hemagglutinin__InfluenzaA__ABB80682
augaagacuaucauugcuuugagcuacauuucaugucugguuuucgcucaaaaacuucccggaaaugacaacagcacggcaacgcugugccugggacaccaugcagugccaaacggaacgcuagugaaaacaaucacgaaugaccaaauugaagugacuaaugcuacugagcugguucagaguuccucaacagguagaauaugcgacaguccucaccgaauccuugauggagaaaacugcacacugauagaugcucuauugggagacccucauugugauggcuuccaaaauaaggaaugggaccuuuuuguugaacgcagcaaagccuacagcaacuguuacccuuaugaugugccggauuaugccucccuuaggucacuaguugccucauccggcacucuggaguuuaacaaugaaagcuucaauuggacuggagucgcucagaauggaacaagcuaugcuugcaaaaggagaucuauuaaaaguuucuuuaguagauugaauugguugcaccaauuaaaauacaaauauccagcacugaacgugacuaugccaaacaaugacaaauuugacaaauuguacauuugggggguucaccacccgaguacggacagugaccaaaccagccuauaugcucaagcaucagggagagucacagucucuaccaaaagaagccaacaaacuguaaucccgaauaucggaucuagacccuggguaaggggugucuccagcagaauaagcaucuauuggacaauaguaaaaccgggagacauacuuuugauuaacagcacagggaaucuaauugcuccucgggguuacuucaaaauacgaagugggaaaagcucaauaaugaggucagaugcacccauuggcaaaugcaauucugaaugcaucacuccaaauggaagcauucccaaugacaaaccauuucaaaauguaaacaggaucacauauggggccugucccagauauguuaagcaaaacacucugaaauuggcaacagggaugcggaauguaccagagaaacaaacuagaggcauauucggcgcaaucgcagguuucauagaaaaugguugggagggaaugguagacgguugguacgguuucaggcaucaaaauucugagggcacaggacaagcagcagaucuuaaaagcacucaagcagcaaucaaccaaaucaacgggaaacugaauagguuaaucgagaaaacgaacgagaaauuccaucaaauugaaaaagaauucucagaaguagaagggagaauucaggaccucgagaaauauguugaggacacuaaaauagaucucuggucguacaacgcggagcuucuuguugcccuggagaaccaacauacaauugaucuaacugacucagaaaugaacaaacuguuggaaagaacaaggaagcaacugagggaaaaugcugaggauaugggcaaugguuguuucaaaauauaccacaaaugugacaaugccugcauagggucaaucagaaauggaacuuaugaccaugauguauacagagacgaagcauuaaacaaccgguuccagaucaaagguguugagcugaagucaggauacaaagauuggauccuauggauuuccuuugccauaucauguuuuuugcuuuguguuguuuugcugggguucaucaugugggccugccaaaaaggcaacauuaggugcaacauuugcauuuga

SEQ ID NO: 32481 - RNA, 1701 nt, Artificial Sequence
  derived and/or modified CDS sequence (wt) from hemagglutinin__InfluenzaA__ABB80693
augaagacuaucauugcuuugagcuacauuucaugucugguuuucgcucaaaaacuucccggaaaugacaacagcacggcaacgcugugccugggacaccaugcagugccaaacggaacgcuagugaaaacaaucacgaaugaccaaauugaagugacuaaugcuacugagcugguucagaguuccucaacagguagaaugugcgacaguccucaccgaauccuugauggagaaaacugcacacugauagaugcucuauugggagacccucauugugauggcuuccaaaauaaggaaugggaccuuuuuguugaacgcagcaaagccuacagcaacuguuacccuuaugaugugccggauuaugccucccuuaggucacuaguugccucauccggcacucuggaguuuaacaaugaaagcuucaauuggacuggagucgcucagaauggaacaagcuaugcuugcaaaaggagaucuauuaaaaguuucuuuaguagauugaauugguugcaccaauuaaaauacaaauauccagcacugaacgugacuaugccaaacaaugacaaauuugacaaauuguacauuugggggguucaccacccgaguacggacagugaccaaaccagccuauaugcucaagcaucagggagagucacagucucuaccaaaagaagccaacaaacuguaaucccgaauaucggaucuagacccuggguaaggggugucuccagcagaauaagcaucuauuggacaauaguaaaaccgggagacauacuuuugauuaacagcacagggaaucuaauugcuccucgggguuacuucaaaauacgaagugggaaaagcucaauaaugaggucagaugcacccauuggcaaaugcaauucugaaugcaucacuccaaauggaagcauucccaaugacaaaccauuucaaaauguaaacaggaucacauauggggccugucccagauauguuaagcaaaacacucugaaauuggcaacagggaugcggaauguaccagagaaacaaacuagaggcauauucggcgcaaucgcagguuucauagaaaaugguugggagggaaugguagacgguugguacgguuucaggcaucaaaauucugagggcacaggacaagcagcagaucuuaaaagcacucaagcagcaaucaaccaaaucaacgggaaacugaauagguuaaucgagaaaacgaacgagaaauuccaucaaauugaaaaagaauucucagaaguagaagggagaauucaggaccucgagaaauauguugaggacacuaaaauagaucucuggucguacaacgcggagcuucuuguugcccuggagaaccaacauacaauugaucuaacugacucagaaaugaacaaacuguuugaaagaacaaggaagcaacugagggaaaaugcugaggauaugggcaaugguuguuucaaaauauaccacaaaugugacaaugccugcauagggucaaucagaaauggaacuuaugaccaugauguauacagagacgaagcauuaaacaaccgguuccagaucaaagguguugagcugaagucaggauacaaagauuggauccuauggauuuccuuugccauaucauguuuuuugcuuuguguuguuuugcugggguucaucaugugggccugccaaaaaggcaacauuaggugcaacauuugcauuuga

SEQ ID NO: 32482 - RNA, 1701 nt, Artificial Sequence
  derived and/or modified CDS sequence (wt) from hemagglutinin__InfluenzaA__ABB80704
augaagacuaucauugcuuugagcuacauuuuaugucugguuuucgcucaaaaaauucccggaaaugacaacagcacggcaacgcugugccugggacaccaugcagugccaaacggaacgcuagugaaaacaaucacgaaugaccaaauugaagugacuaaugcuacugagcugguucagaguuccucaacagguagaauaugcgacaguccucaccgaauccuugauggagaaaacugcacacugauagaugcucuauugggagacccucauugugauggcuuccaaaauaaggaaugggaccuuuuuguugaacgcagcaaagccuacagcaacuguuacccuuaugaugugccggauuaugccucccuuaggucacuaguugccucauccggcacccuggaguuuaacaaugaaagcuucaauuggacuggagucgcucagaauggaacaagcuaugcuugcaaaaggagaucuauuaaaaguuucuuuaguagauugaauugguugcaccaauuaaaauacaaauauccagcacugaacgugaccaugccaaacaaugacaaauuugacaaauuguacauuugggggguucaccacccgaguacggacagugaccaaaccagccuauaugcucaagcaucagggagagucacagucucuaccaaaagaagccaacaaacuguaaucccgaauaucggaucuagacccuggguaaggggugucuccagcagaauaagcaucuauuggacaauaguaaaaccgggagacauacuuuugauuaacagcacagggaaucuaauugcuccucgggguuacuucaaaauacgaagugggaaaagcucaauaaugaggucagaugcacccauuggcaaaugcaauucugaaugcaucacuccaaauggaagcauucccaaugacaaaccauuucaaaauguaaacaggaucacauauggggccugucccagauauguuaagcaaaacacucugaaauuggcaacagggaugcggaauguaccagagaaacaaacuagaggcauauucggcgcaaucgcagguuucauagaaaaugguugggagggaaugguagacgguugguacgguuucaggcaucaaaauucugagggcacaggacaagcagcagaucuuaaaagcacucaagcagcaaucaaccaaaucaacgggaaacugaauagguuaaucgagaaaacgaacgagaaauuccaucaaauugaaaaagaauucucagaaguagaagggagaauucaggaccucgagaaauauguugaggacacuaaaauagaucucuggucguacaacgcggagcuucuuguugcccuggagaaccaacauacaauugaucuaacugacucagaaaugaacaaacuguuugaaagaacaaggaagcaacugagggaaaaugcugaggauaugggcaaugguuguuucaaaauauaccacaaaugugacaaugccugcauagggucaaucagaaauggaacuuaugaccaugauguauacagagacgaagcauuaaacaaccgguuccagaucaaagguguugagcugaagucaggauacaaagauuggauccuauggauuuccuuugccauaucauguuuuuugcuuuguguuguuuugcugggguucaucaugugggccugccaaaaaggcaacauuaggugcaacauuugcauuuga

SEQ ID NO: 32483 - RNA, 1701 nt, Artificial Sequence
  derived and/or modified CDS sequence (wt) from hemagglutinin__InfluenzaA__ABB80715
augaagacuaucauugcuuugagcuacauuucaugucugguuuucgcucaaaaacuucccggaaaugacaacagcacggcaacgcugugccugggacaccaugcagugccaaacggaacgcuagugaaaacaaucacgaaugaccaaauugaagugacuaaugcuacugagcugguucagaguuccucaacagguagaauaugcgacaguccucaccgaauccuugauggagaaaacugcacacugauagaugcucuauugggagacccucauugugauggcuuccaaaauaaggaaugggaccuuuuuguugaacgcagcaaagccuacagcaacuguuacccuuaugaugugccggauuaugccucccuuaggucacuaguugccucauccggcacucuggaguuuaacaaugaaagcuucaauuggacuggagucgcucagaauggaacaagcuaugcuugcaaaaggagaucuauuaaaaguuucuuuaguagauugaauugguugcaccaauuaaaauacaaauauccagcacugaacgugacuaugccaaacaaugacaaauuugacaaauuguacauuugggggguucaccacccgaguacggacagugaccaaaccagccuauaugcucaagcaucagggagagucacagucucuaccaaaagaagccaacaaacuguaaucccgaauaucggaucuagacccuggguaaggggugucuccagcagaauaagcaucuauuggacaauaguaaaaccgggagacauacuuuugauuaacagcacagggaaucuaauugcuccucgggguuacuucaaaauacgaagugggaaaagcucaauaaugaggucagaugcacccauuggcaaaugcaauucugaaugcaucacuccaaauggaagcauucccaaugacaaaccauuucaaaauguaaacaggaucacauauggggccugucccagauauguuaagcaaaacacucugaaauuggcaacagggaugcggaauguaccagagaaacaaacuagaggcauauucggcgcaauugcagguuucauagaaaaugguugggagggaaugguagacgguugguacgguuucaggcaucaaaauucugagggcacaggacaagcagcagaucuuaaaagcacucaagcagcaaucaaccaaaucaacgggaaacugaauagguuaaucgagaaaacgaacgagaaauuccaucaaauugaaaaagaauucucagaaguagaagggagaauucaggaccucgagaaauauguugaggacacuaaaauagaucucuggucguacaacgcggagcuucuuguugcccuggagaaccaacauacaauugaucuaacugacucagaaaugaacaaacuguuugaaagaacaaggaagcaacugagggaaaaugcugaggauaugggcaaugguuguuucaaaauauaccacaaaugugacaaugccugcauagggucaaucagaaauggaacuuaugaccaugauguauacagagacgaagcauuaaacaaccgguuccagaucaaagguguugagcugaagucaggauacaaagauuggauccuauggauuuccuuugccauaucauguuuuuugcuuuguguuguuuugcugggguucaucaugugggccugccaaaaaggcaacauuaggugcaacauuugcauuuga

SEQ ID NO: 32484 - RNA, 1701 nt, Artificial Sequence
  derived and/or modified CDS sequence (wt) from hemagglutinin__InfluenzaA__ABB80724
augaagacuaucauugcuuugagcuacauuuuaugucugguuuucgcucaaaaacuucccggaaaugacaacagcacggcaacgcugugccugggacaccaugcagugccaaacggaacgcuagugaaaacaaucacgaaugaccaaauugaagugacuaaugcuacugagcugguucagaguuccucaacagguagaauaugcgacaguccucaccgaauccuugauggagaaaacugcacacugauagaugcucuauugggagacccucauugugauggcuuccaaaauaaggaaugggaccuuuuuguugaacgcagcaaagccuacagcaacuguuacccuuaugaugugccggauuaugccucccuuaggucacuaguugccucauccggcacccuggaguuuaacaaugaaagcuucaauuggacuggagucgcucagaauggaacaagcuaugcuugcaaaaggagaucuauuaaaaguuucuuuaguagauugaauugguugcaccaauuaaaauacaaauauccagcacugaacgugacuaugccaaacaaugacaaauuugacaaauuguacauuugggggguucaccacccgaguacggacagugaccaagccagccuauaugcucaagcaucagggagagucacagucucuaccaaaagaagccaacaaacuguaaucccgaauaucggaucuagacccuggguaaggggugucuccagcagaauaagcaucuauuggacaauaguaaaaccgggagacauacuuuugauuaacagcacagggaaucuaauugcuccucgggguuacuucaaaauacgaagugggaaaagcucaauaaugaggucagaugcacccauuggcaaaugcaauucugaaugcaucacuccaaauggaagcauucccaaugacaaaccauuucaaaauguaaacaggaucacauauggggccugucccagauauguuaagcaaaacacccugaaauuggcaacagggaugcggaauguaccagagaaacaaacuagaggcauauucggcgcaaucgcagguuucauagaaaaugguugggagggaaugguagacgguugguacgguuucaggcaucaaaauucugagggcacaggacaagcagcagaucuuaaaagcacucaagcagcaaucaaccaaaucaacgggaaacugaauagguuaaucgagaaaacgaacgagaaauuccaucaaauugaaaaagaauucucagaaguagaagggagaauucaggaccucgagaaauauguugaggacacuaaaauagaucucuggucguacaacgcggagcuucuuguugcccuggagaaccaacauacaauugaucuaacugacucagaaaugaacaaacuguuugaaagaacaaggaagcaacugagggaaaaugcugaggauaugggcaaugguuguuucaaaauauaccacaaaugugacaaugccugcauagggucaaucagaaauggaacuuaugaccaugauguauacagagacgaagcauuaaacaaccgguuccagaucaaagguguugagcugaagucaggauacaaagauuggauccuauggauuuccuuugccaugucauguuuuuugcuuuguguuguuuugcugggguucaucaugugggccugccaaaaaggcaacauuaggugcaacauuugcauuuga

SEQ ID NO: 32485 - RNA, 1701 nt, Artificial Sequence
  derived and/or modified CDS sequence (wt) from hemagglutinin__InfluenzaA__ABB80737
augaagacuaucauugcuuugagcuacauuuuaugucugguuuucgcucaaaaacuucccggaaaugacaacagcacggcaacgcugugccugggacaccaugcagugccaaacggaacgcuagugaaaacaaucacgaaugaccaaauugaagugacuaaugcuacugagcugguucagaguucuucaacagguagaauaugcgacaguccucaccgaauccuugauggagaaaacugcacacugauagaugcucuauugggagacccucauugugauggcuuccaaaauaaggaaugggaccuuuuuguugaacgcagcaaagccuacagcaacuguuacccuuaugaugugccggauuaugccucccuuaggucacuaguugccucauccggcacccuggaguuuaacaaugaaagcuucaauuggacuggagucgcucagaauggaacaagcuaugcuugcaaaaggagaucuauuaaaaguuucuuuaguagauugaauugguugcaccaauuaaaauacaaauauccagcacugaaugugacuaugccaaacaaugacaaauuugacaaauuguacauuugggggguucaccacccgaguacggacagugaccaaaccagccuauaugcucaagcaucagggagagucacagucucuaccaaaagaagccaacaaacuguaaucccgaauaucggaucuagacccuggguaaggggugucuccagcagaauaagcaucuauuggacaauaguaaaaccgggagacauacuuuugauuaacagcacagggaaucuaauugcuccucgggguuacuucaaaauacgaagugggaaaagcucaauaaugaggucagaugcacccauuggcaaaugcaauucugaaugcaucacuccaaauggaagcauucccaaugacaaaccauuucaaaauguaaacaggaucacauauggggccugucccagauauguuaagcaaaacacccugaaauuggcaacagggaugcggaauguaccagagaaacaaacuagaggcauauucggcgcaaucgcagguuucauagaaaaugguugggagggaaugguagacgguugguacgguuucaggcaucaaaauucugagggcacaggacaagcagcagaucuuaaaagcacucaagcagcaaucaaccaaaucaacgggaaacugaauagguuaaucgagaaaacgaacgagaaauuccaucaaauugaaaaagaauucucagaaguagaagggagaauucaggaccucgagaaauauguugaggacacuaaaauagaucucuggucguacaacgcggagcuucuuguugcccuggagaaccaacauacaauugaucuaacugacucagaaaugaacaaacuguuugaaagaacaaggaagcaacugagggaaaaugcugaggauaugggcaaugguuguuucaaaauauaccacaaaugugacaaugccugcauagggucaaucagaaauggaacuuaugaccaugauguauacagagacgaagcauuaaacaaccgguuccagaucaaagguguugagcugaagucaggauacaaagauuggauccuauggauuuccuuugccaugucauguuuuuugcuuuguguuguuuugcugggguucaucaugugggccugccaaaaaggcaacauuaggugcaacauuugcauuuga

SEQ ID NO: 32486 - RNA, 1701 nt, Artificial Sequence
  derived and/or modified CDS sequence (wt) from hemagglutinin__InfluenzaA__ABB80748
augaagacuaucauugcuuugagcuacauuucaugucugguuuucgcucaaaaacuucccggaaaugacaacagcacggcaacgcugugccugggacaccaugcagugccaaacggaacgcuagugaaaacaaucacgaaugaccaaauugaagugacuaaugcuacugagcugguucagaguuccucaacagguagaauaugcgacaguccucaccgaauccuugauggagaaaacugcacacugauagaugcucuauugggagacccucauugugauggcuuccaaaauaaggaaugggaccuuuuuguugaacgcagcaaagccuacagcaacuguuacccuuaugaugugccggauuaugccucccuuaggucacuaguugccucauccggcacucuggaguuuaacaaugaaagcuucaauuggacuggagucgcucagaauggaacaagcuaugcuugcaaaaggaggucuauuaaaaguuucuuuaguagauugaauugguugcaccaauuaaaauacaaauauccagcacugaacgugacuaugccaaacaaugacaaauuugacaaauuguacauuugggggguucaccacccgaguacggacagugaccaaaccagccuauaugcucaagcaucagggagagucacagucucuacccaaagaagccaacaaacuguaaucccgaauaucggaucuagacccuggguaaggggugucuccagcagaauaagcaucuauuggacaauaguaaaaccgggagacauacuuuugauuaacagcacagggaaucuaauugcuccucgggguuacuucaaaauacgaagugggaaaagcucaauaaugaggucagaugcacccauuggcaaaugcaauucugaaugcaucacuccaaauggaagcauucccaaugacaaaccauuucaaaauguaaacaggaucacauauggggccugucccagauauguuaagcaaaacacucugaaauuggcaacagggaugcggaauguaccagagaaacaaacuagaggcauauucggcgcaaucgcagguuucauagaaaaugguugggagggaaugguagacgguugguacgguuucaggcaucaaaauucugagggcacaggacaagcagcagaucuuaaaagcacucaagcagcaaucaaccaaaucaacgggaaacugaauagguuaaucgagaaaacgaacgagaaauuccaucaaauugaaaaagaauucucagaaguagaagggagaauucaggaccucgaggaauauguugaggacacuaaaauagaucucuggucguacaacgcggagcuucuuguugcccuggagaaccaacauacaauugaucuaacugacucagaaaugaacaaacuguuugaaagaacaaggaagcaacugagggaaaaugcugaggauaugggcaaugguuguuucaaaauauaccacaaaugugacaaugccugcauagggucaaucagaaauggaacuuaugaccaugauguauacagagacgaagcauuaaacaaccgguuccagaucaaagguguugagcugaagucaggauacaaagauuggauccuauggauuuccuuugccauaucauguuuuuugcuuuguguuguuuugcugggguucaucaugugggccugccaaaaaggcaacauuaggugcaacauuugcauuuga

SEQ ID NO: 32487 - RNA, 1701 nt, Artificial Sequence
  derived and/or modified CDS sequence (wt) from hemagglutinin__InfluenzaA__ABB82183
augaagacuaucauugcuuugagcuacauuuuaugucugguuuucgcucaaaaacuucccggaaaugacaacagcacggcaacgcugugccuggggcaccaugcagugccaaacggaacgcuagugaaaacaaucacgaaugaccaaauugaagugacuaaugcuacugagcugguucagaguuccucaacagguagaauaugcgacaguccucaccaaauccuugauggagaaaacugcacacuaauagaugcucuauugggagacccucauugugauggcuuccaaaauaaggaaugggaccuuuucguugaacgcagcaaagccuacagcaacuguuacccuuaugaugugccggauuaugccucccuuaggucacuaguugccucauccggcacacuggaguuuaacaaugaaagcuucaauuggacuggagucgcucagaauggaacaagcucugcuugcaaaaggaggucuaauaaaaguuucuuuaguagauugaauugguugcaccaauugaaauacaaauacccagcacugaacgugacuaugccaaacaaugaaaaauuugacaaauuguacauuugggggguucaccacccgaguacggacagugaccaaaucagccuauaugcucaagcaucagggagagucacagucucuaccaaaagaagccaacagacuguaaucccgaauaucggaucuagacccuggguaaggggugucuccagcagaauaagcaucuauuggacaauaguaaaaccgggagacauacuuuugauuaacagcacagggaaucuaauugcuccucgggguuacuucaaaauacgaagugggaaaagcucaguaaugaggucagaugcauccauuggcagaugcaauucugaaugcaucacuccaaauggaagcauucccaaugacaaaccauuucaaaauguaaacaggaucacauauggggccugucccagauauguuaagcaaaacacucugaaauuggcaacagggaugcggaauguaccagagaaacaaacuagaggcauauucggugcaaucgcggguuucauagaaaaugguugggagggaaugguggacgguugguacgguuucaggcaucaaaauucugagggcacaggacaagcagcagaucuuaaaagcacucaagcagcaaucaaccaaaucaacgggaaacugaauagguuaaucgagaaaacgaacgaaaaauuccaucaaauugaaaaagaauucucagaaguagaagggagaauucaggaccucgagaaauauguugaggacacuaaaauagaucucuggucguacaacgcggagcuucuuguugcccuggagaaccaacauacaauugaucuaacugacucagaaaugaacaaacuguuugaaagaacaaagaagcaacugagggaaaaugcugaggauaugggcaauggcuguuucaaaauauaccacaaaugugacaaugccugcauagggucaaucagaaauggaacuuaugaccaugauguauacagagacgaagcauuaaacaaccgguuccagaucaaagguguugagcugaagucaggauacaaagauuggauccuauggauuuccuuugccauaucauguuuuuugcuuuguguuguuuugcugggguucaucaugugggccugccaaaaaggcaacauuaggugcaacauuugcauuuga

SEQ ID NO: 32488 - RNA, 1698 nt, Artificial Sequence; identical to SEQ ID NO: 32445
  derived and/or modified CDS sequence (wt) from hemagglutinin__InfluenzaA__ABB82194

SEQ ID NO: 32489 - RNA, 1698 nt, Artificial Sequence
  derived and/or modified CDS sequence (wt) from hemagglutinin__InfluenzaA__ABB82205
augaaaguaaaacuacugguucuguuauguacauuuacagcuacauaugcagacacaauauguauaggcuaccaugccaacaacucaaccgacacuguugacacaguacuugagaagaaugugacagugacacacucugucaaccuacuugaggacagucacaauggaaaacuaugucuacuaaaaggaauagccccacuacaauuggguaauugcagcguugccggauggaucuuaggaaacccagaaugcgaauuacugauuuccaaggaaucaugguccuacauuguagaaacaccaaauccugagaauggaacauguuacccaggguauuucgccgacuaugaggaacugagggagcaauugaguucaguaucuucauuugagagguucgaaauauuccccaaagagagcucauggcccaaccacaccguaaccggaguaucagcaucaugcucccauaacgggaaaagcaguuuuuacaaaaauuugcuauggcugacggggaagaaugguuuguacccaaaccugagcaaguccuaugcaaacagcaaagagaaagaaguccuuguacuaugggguguucaucacccgccuaacauaggggaccaaagggcccucuaucauacagaaaaugcuuaugucucuguagugucuucacauuauagcagaagauucaccccagaaauagccaaaagacccaaggugagagaucaggaaggaagaaucaacuacuacuggacucugcuggaacccggggauacaauaauauuugaggcaaauggaaaucuaauagcgccaagguaugcuuucgcacugaguagaggcuuuggaucaggaaucaucaccucaaaugcaccaauggaugaaugugaugcgaagugucaaacaccucagggagcuauaaacagcagucuuccuuuccagaauguacacccagucacaauaggagaguguccaaaguaugucaggagugcaaaauuaaggaugguuacaggacuaaggaacaucccauccauucaauccagagguuuguuuggagccauugccgguuucauugaagggggguggacuggaaugguagaugguugguaugguuaucaucaucagaaugagcaaggaucuggguaugcugcagaucaaaaaagcacacaaaaugccauuaacgggauuacaaacaaggugaauucuguaauugagaaaaugaacacucaauucacagcugugggcaaagaauucaacaaauuggaaagaaggauggaaaacuuaaauaaaaaaguugaugauggguuucuagacauuuggacauauaaugcagaauuguugguucuacuggaaaaugaaaggacuuuggauuuccaugacuccaacgugaagaaucuguaugagaaaguaaaaagccaauuaaagaauaaugccaaagaaauagggaacggguguuuugaauucuaucacaaguguaacgaugaaugcauggagagugugaaaaauggaacuuaugacuauccaaaauauuccgaagaaucaaaguuaaacagggagaaaauugauggagugaaauuggaaucaaugggagucuaucagauucuggcgaucuacucaacagucgccaguucccugguucuuuuggucucccugggggcaaucagcuucuggauguguuccaaugggucuuugcaguguagaauaugcaucuaa

SEQ ID NO: 32490 - RNA, 1698 nt, Artificial Sequence
  derived and/or modified CDS sequence (wt) from hemagglutinin__InfluenzaA__ABB82216
augaaaguaaaacuacugguccuguuauguacauuuacagcuacauaugcagacacaauauguauaggcuaccaugccaacaacucaaccgacacuguugacacaguacuugagaagaaugugacagugacacacucugucaaccuacuugaggacagucacaauggaaaacuaugucuacuaaaaggaauagccccacuacaauuggguaauugcagcguugccggauggaucuuaggaaacccagaaugcgaauugcugauuuccaaggaaucaugguccuacauuguagaaacaccaaauccugagaauggaacauguuacccaggguauuucgccgacuaugaggaacugagggagcaauugaguucaguaucuucauuugagagguucgaaauauuccccaaagaaagcucauggcccaaccacaccguaaccggaguaucaucaucaugcucccauaaugggaaaagcaguuuuuacagaaauuugcuauggcugacggggaagaaugguuuguacccaaaccugagcaaguccuauguaaacaacaaagagaaagaaguccuuguacuaugggguguucaucacccgccuaacauaggggaccaaagggcccucuaucauacagaaaaugcuuaugucucuguagugucuucacauuauagcagaagauucaccccagaaauagccaaaagacccaaaguaagagaucaggaaggaagaaucaacuacuacuggacucugcuggaacccggggacacaauaauauuugaggcaaauggaaaucuaauagcgccaagguaugcuuucgcacugaguaggggcuuuggaucaggaaucaucaccucaaaugcaccaauggaugaaugugaugcgaagugucaaacaccucagggagcuauaaacagcagucuuccuuuccagaauguacacccagucacaauaggagaguguccaaaguaugucaggagugcaaaauuaaggaugguuacaggacuaaggaacaucccauccauucaauccagagguuuguuuggggccauugccgguuucauugaagggggguggacuggaaugguagaugguugguaugguuaucaucaucagaaugagcaaggaucuggcuaugcugcagaucaaaaaagcacacaaaaugccauuaacgggauuacaaacaaggugaauucuguaauugagaaaaugaacacucaauucacagcugugggcaaagaauucaauaaauuggaaagaaggauggaaaacuuaaauaaaaaaguugaugauggguuucuagacauuuggacauauaaugcagaauuguugguucuacuggaaaaugaaaggacuuuggauuuccaugacuccaaugugaagaaucuguaugagaaaguaaaaagccaauuaaagaauaaugccaaagaaauaggaaacggguguuuugaauucuaucacaaguguaacgaugaaugcauggagagugugaaaaauggaacuuaugacuauccaaaauauuccgaagaaucaaaguuaaacagggagaaaauugauggagugaaauuggaaucaaugggagucuaucagauucuggcgaucuacucaacagucgccaguucccugguucuuuuggucucccugggggcaaucagcuucuggauguguuccaaugggucuuugcaguguagaauaugcaucuaa

SEQ ID NO: 32491 - RNA, 1701 nt, Artificial Sequence
  derived and/or modified CDS sequence (wt) from hemagglutinin__InfluenzaA__ABB82227
augaagaccaucauugcuuugagcuacauuuucugucugacucucggccaagaccuuccaggaaaugacaacagcaaggcaacgcugugccugggacaucaugcggugccaaacggaacacuagugaaaacaaucacagaugaucagacugaagugacuaaugcuacugagcuaguucaaagcuccucaacggggaaaauaugcaacaauccucaucgaauccuugauggaauggacugcacacugauagaugcucuauugggggacccucauugugauguuuuucaaaaugagacaugggaccuuuucguugaacgcagcaaagcuuucagcaacuguuacccuuaugaugugccagauuaugccucccuuaggucacuagcugccucgucaggcacucuggaguuuaucacugaggguuucacuuggacuggggucacucagaaugggggaagcaaugcuugcaaaaggggaccugguagcgguuuuuucaguagacugaacugguugaccaaaucaggaaacaccuauccagugcugaacgugacuaugccaaacaaugacaauuuugacaaacuauacauuugggggguucaccacccgagcacggaccaagaacaaaccagccuguauguucaagcaucagggagagucacagucucuaccaggagaagccagcaaacuauaaucccgaauaucggauccagacccuggguaaggggucugucuaguagaauaagcaucuauuggacaauaguuaagccgggagacguacuuguaauuaauaguaaugggaaccuaaucgcuccucgggguuauuucaaaaugcgcacugggaaaagcucaauaaugaggucagaugcaccuauugauaccuguauuucugaaugcaucacuccaaauggaagcauucccaaugacaaacccuuucaaaacauaaacaagaucacauauggagcaugccccaaguauguuaagcaaaacacccuaaaguuggcaacagggaugcggaauguaccagagaaacaaaccagaggccuauucggcgcaauagcagguuucauagaaaaugguugggagggaaugauagacgguugguacgguuucaggcaucaaaauucugagggcacaggacaagcggcagaucuuaaaagcacucaagcagccaucgaccaaaucaaugggaaauugaacaggauaaucgagaagacgaacgagaaauuccaucaaaucgaaaaggaauucucagaaguagaagggagaauucaggaccucgagaaauacguugaagacacuaaaauagaucuauggucuuacaaugcggagcuucuugucgcuauggagaaucaacauacaauugaucugacugacucggaaaugaacaaacuguuugaaaaaacaagaaggcaacugagggaaaaugcugaagacaugggcaaugguugcuucaaaauauaccacaaaugugacaacgcuugcauagagucaaucagaaaugggacuuaugaccaugauguauacagagacgaagcauuaaacaacagguuucagaucaaagguguugaacugaagucuggauacaaagacuggauccuguggauuuccuuugccauaucaugcuuuuugcuuuguguuguuuugcugggguucaucaugugggccugccagagaggcaacauuaggugcaacauuugcauuuga

SEQ ID NO: 32492 - RNA, 1698 nt, Artificial Sequence
  derived and/or modified CDS sequence (wt) from hemagglutinin__InfluenzaA__ABB83026
augaaaguaaaacuacugauccuguuauguacauuuacagcuacauaugcagacacaauauguauaggcuaccaugccaacaacucaaccgacacuguugacacaguacuugagaagaaugugacagugacacacucugucaaccuacuugaggacagucacaauggaaaacuaugucuacuaaaaggaauagccccccuacaauuggguaauugcagcguugccggauggaucuuaggaaacccagaaugcgaauuacugauuuccaaggaaucaugguccuacauuguagaaacaccaaauccugagaauggaacauguuacccaggguauuucgccgacuaugaggagcuaagggagcaauugaguucaguaucuucauuugagagauucgaaauauuccccaaagaaagcucauggcccaaccacaccguaaccggaguaucagcaucaugcucccauaaugggaaaagcaguuuuuacagaaauuugcuauggcugacggagaagaaugguuuguacccaaaccugagcaaguccuaugcaaacaacaaagagaaagaaguccuuauacuaugggguguucaucacccgccuaacauaggggaccaaaggacccucuaucauacagaaaaugcuuaugucucuguagugucuucacauuauagcagaagauucaccccagaaauaaccaaaaggcccaaaguaagagaucaggaaggaagaaucaacuacuacuggacucugcuggaacccggggauacaauaauauuugaggcaaauggaaaucuaauagcgccaugguaugcuuucgcacugaguagaggcuuuggaucaggaaucaucaccucaaaugcaccaauggaugaaugugaugcgaagugucaaacaccucagggagcuauaaacagcagucuuccuuuccagaauguacacccagucacaauaggagaguguccaaaguaugucaggagugcaaaauuaaggaugguuacaggacuaaggaacaucccauccauucaauccagagguuuguuuggagccauugccgguuucauugaagggggguggacuggaaugguagacgggugguaugguuaucaucaucagaaugagcaaggaucuggcuaugcugcagaucaaaaaagcacacaaaacgccauuaacgggauuacaaacaaggugaauucuguaauugagaaaaugaacacucaauucacagcugugggcaaagaauucaacaaauuggaaagaaggauggaaaacuuaaauaaaaaaguugaugauggguuucuagacauuuggacauauaaugcagaauuguugguucuacuggaaaaugaaaggacuuuggauuuccacgacuccaaugugaagaaucuguaugagaaaguaaaaagccaauuaaagaauaaugccaaagaaauaggaaauggguguuuugaauucuaucacaaguguaacaaugaaugcauggagagugugaaaaauggaacuuaugacuauccaaaauauuccgaagaaucaaaguuaaacagggaaaaaaucgauggagugaaauuggaaucaaugggagucuaucagauucuggcgaucuacucaacugucgccaguucccugguucuuuuggucucccugggggcaaucagcuucuggauguguuccaaugggucuuugcaguguagaauaugcaucuga

SEQ ID NO: 32493 - RNA, 1698 nt, Artificial Sequence
  derived and/or modified CDS sequence (wt) from hemagglutinin__InfluenzaA__ABB83127
augaaaguaaaacuacugauccuguuauguacauuuacagcuacauaugcagacacaauauguauaggcuaccaugccaacaacucaaccgacacuguugacacaguacuugagaagaaugugacagugacacacucugucaaccuacuugaggacagucacaauggaaaacugugccuacuaaaaggaauagccccccuacaauuggguaauugcagcguugccggauggaucuuaggaaacccagaaugcgaauuacugauuuccaaggaaucaugguccuacauuguagaaacaccaaauccugagaauggagcauguuacccaggguauuucgccgacuaugaggagcuaagggagcaauugaguucaguaucuucauuugagagauucgaaauauuccccaaagaaagcucauggcccaaccacaccguaaccggaguaucagcaucaugcucccauaaugggaaaagcaguuuuuacagaaauuugcuauggcugacggggaagaaugguuuguacccaaaccugagcaaguccuaugcaaacaacaaagagaaagaaguccuuauacuaugggguguucaucacccgccuaacauaggggaccaaaggacccucuaucacacagaaaaugcuuaugucucuguagugucuucacauuauagcagaagauucaccccagaaauaaccaaaaggcccaaaguaagagaucaggaaggaagaaucaacuacuacuggacucugcuggaacccggggauacaauaauauuugaggcaaauggaaaucuaauagcgccaugguaugcuuucgcacugaguagaggcuuuggaucaggaaucaucaucucaaaugcaccaauggaugaaugugaugcgaagugucaaacaccucagggagcuauaaacagcagucuuccuuuccagaauguacacccagucacaauaggagaguguccaaaguaugucaggagugcaaaauuaaggaugguuacaggacuaaggaacaucccauccauucaauccagagguuuguuuggagccauugccgguuucauugaagggggguggacuggaaugguagaugggugguaugguuaucaucaucagaaugagcaaggaucuggcuaugcugcagaucaaaaaagcacacaaaaugccauuaacgggauuacaaacaaggugaauucuguaauugagaaaaugaacacucaauucacagcugugggcaaagaauucaacaaauuggaaagaaggauggaaaacuuaaauaaaaagguugaugauggguuucuagacauuuggacauauaaugcagaauuguugguucuacuggaaaaugaaaggacuuuggauuuccacgacuccaaugugaagaaucuguacgagaaaguaaaaagccaauuaaagaauaaugccaaagaaauaggaaauggguguuuugaauucuaucacaaguguaacaaugaaugcauggagagugugaaaaauggaacuuaugacuauccaaaauauuccgaagaaucaaaguuaaacagggaaaaaauugauggagugaaauuggacucaaugggggucuaucagauucuggcgaucuacucaacugucgccaguucccugguucuuuuggucucccugggggcaaucagcuucuggauguguuccaaugggucuuugcaguguagaauaugcaucuga

SEQ ID NO: 32494 - RNA, 1698 nt, Artificial Sequence
  derived and/or modified CDS sequence (wt) from hemagglutinin__InfluenzaA__ABB83138
augaaaguaaaacuacugauccuguuauguacauuuacagcuacauaugcagacacaauauguauaggcuaccaugccaacaacucaaccgacacuguugacacaguacuugagaagaaugugacagugacacacucugucaaccuacuugaggacagucacaauggaaaacugugccuacuaaaaggaauagccccccuacaauuggguaauugcagcguugccggauggaucuuaggaaacccagaaugcgaauuacugauuuccaaggaaucaugguccuacauuguagaaacaccaaauccugagaauggagcauguuacccaggguauuucgccgacuaugaggagcuaagggagcaauugaguucaauaucuucauuugagagauucgaaauauuccccaaagaaagcucauggcccaaccacaccguaaccggaguaucagcaucaugcucccauaaugggaaaagcaguuuuuacagaaauuugcuauggcugacggggaagaaugguuuguacccaaaccugagcaaguccuaugcaaacaacaaagagaaagaaguccuuauacuaugggguguucaucacccgccuaacauaggggaccaaaggacccucuaucacacagaaaaugcuuaugucucuguagugucuucacauuauagcagaagauucaccccagaaauaaccaaaaggcccaaaguaagagaucaggaaggaagaaucaacuacuacuggacucugcuggaacccggggauacaauaauauuugaggcaaauggaaaucuaauagcgccaugguaugcuuucgcacugaguagaggcuuuggaucaggaaucaucaccucaaaugcaccaauggaugaaugugaugcuaagugucaaacaccucagggagcuauaaacagcagucuuccuuuccagaauguacacccagucacaauaggagaguguccaaaguaugucaggagugcaaaauuaaggaugguuacaggacuaaggaacaucccauccauucaauccagagguuuguuuggagccauugccgguuucauugaagggggguggacuggaaugguagaugggugguaugguuaucaucaucagaaugagcaaggaucuggcuaugcugcagaucaaaaaagcacacaaaaugccauuaacgggauuacaaacaaggugaauucuguaauugagaaaaugaacacucaauucacagcugugggcaaagaauucaacaaauuggaaagaaggauggaaaacuuaaauaaaaagguugaugauggguuucuagacauuuggacauauaaugcagaauuguugguucuacuggaaaaugaaaggacuuuggauuuccacgacuccaaugugaagaaucuguacgagaaaguaaaaagccaauuaaagaauaaugccaaagaaauaggaaauggguguuuugaauucuaucacaaguguaacaaugaaugcauggagagugugaaaaauggaacuuaugacuauccaaaauauuccgaagaaucaaaguuaaacagggaaaaaauugauggagugaaauuggacucaaugggggucuaucagauucuggcgaucuacucaacugucgccaguucccugguucuuuuggucucccugggggcaaucagcuucuggauguguuccaaugggucuuugcaguguagaauaugcaucuga

SEQ ID NO: 32495 - RNA, 1701 nt, Artificial Sequence
  derived and/or modified CDS sequence (wt) from hemagglutinin__InfluenzaA__ABB86877
augaaggcaauacuauuaauauugcuguauacauuuacagccacaaaugcagacacacuauguauagguuaucaugcaaauaauucaacugacacuguugauacagugcuggaaaagaauguaacaguaacacauucuguuaaccuucuagaagacagacauaacggaaaacuaugcaaccuagggggaauagccccauuguacuuggguaauuguaacauugcuggauggcuuuugggaaacccagaaugugaauuacuauucacaguaagcucaugguccuacauuguggaaacaucuaacucagacaaugggacauguuacccuggagauuucaucaauuaugaagagcugagagagcaguugagcucaaugucaucauaugaaagauuugagauauuccccaaagaaaguucauggcccaaucaugaaacaaacaggggugugacugcagcaugccccuaugcuggagcaaacaguuucuacagaaacuuaauauggcugguaaaaaaaggaaauucauacccaaagaucaacaaauccuauguuaauaauaaagagaaggaaguccuugugcuauggggcauucaccauccaccuaccagugcugaccaacaaagucucuaucagaaugcagaugccuauguuucuguggagucaucaaaguacaacaagaaauuuaagccagaaauagcaacaagacccaaggugagaggucaagcagggagaaugaacuauuacuggacauuaguagagccuggagacacaauaacauucgaagcaacuggaaaccuagugguaccaagguaugccuuugcaaugaauagagguucuggaucugguaucauaauuucagauaccccaguucacgauuguaauacgacuugucaaacacccaaaggugcuauaaacaccagccucccauuucagaauguacauccagucacaauuggagaauguccaaaauaugucaaaagcacaaaauugagaauggcuacaggauuaaggaauaucccgucuauucaaucuagaggucuguuugaagccauugcuggcuuuauugaggggggauggacaggaaugauagauggaugguacgguuaucaccaucaaaaugagcagggaucaggauaugcagcugaccgaaagagcacacagaaugccauugacgggaucacuaacaaaguaaacucuguuauugaaaagaugaacacacaauucacagcaguggguaaagaauucaaccaccuggaaaaaagaauagagaauuuaaacaaaaagguugaugaugguuuucuggauguuuggacuuauaaugccgaacugcuaguucuauuggaaaaugaaagaacuuuagauuuccaugacucaaaugugaaaaaucuauaugagaaaguaagaagccagcuaaggaacaaugccaaggaaauugggaauggaugcuuugaauucuaccauaaaugugaugacacaugcauggagagcgucagaaaugggacuuaugauuaccuaaaguacucagaagaaucaaaacuaaauagagagaaaauagagggggugaaguuggauucagcaagaauuuaccagauuuuggcgauauauucaacugucgccaguucauugguacuauuggucucccugggggcaaucaguuucuggaugugcucuaaugggucuuuacagugcagaauauguauuuaa

SEQ ID NO: 32496 - RNA, 1701 nt, Artificial Sequence
  derived and/or modified CDS sequence (wt) from hemagglutinin__InfluenzaA__ABB86887
augaaggcaauacuauuaauauugcuguauacauuuacagccacaaaugcagacacacuauguauagguuaucaugcaaauaauucaacugacacuguugauacagugcuggaaaagaauguaacaguaacacauucuguuaaccuucuagaagacagacauaacggaaaacuaugcaaccuagggggaauagccccauuguacuuggguaauuguaacauugcuggauggcuuuugggaaacccagaaugugaauuacuauucacaguaagcucaugguccuacauuguggaaacaucuaacucagacaaugggacauguuacccuggagauuucaucaauuaugaagagcugagagagcaguugagcucaaugucaucauaugaaagauuugagauauuccccaaagaaaguucauggcccaaucaugaaacaaacaggggugugacugcagcaugccccuaugcuggagcaaacaguuucuacagaaacuuaauauggcugguaaaaaaaggaaauucauacccaaagaucaacaaauccuauguuaauaauaaagagaaggaaguccuugugcuauggggcauucaccauccaccuaccagugcugaccaacaaagucucuaucagaaugcagaugccuauguuucuguggagucaucaaaguacaacaagaaauuuaagccagaaauagcaacaagacccaaggugagaggucaagcagggagaaugaacuauuacuggacauuaguagagccuggagacacaauaacauucgaagcaacuggaaaucuagugguaccaagauaugccuucgcaaugaaaagagguucuggaucugguauuaucauuucagauacaccaguccacgauuguaauacgacuugucaaacacccaaaggugcuauaaacaccagccucccauuucagaauauacauccagucacaauuggagaauguccaaaauaugucaaaagcacaaaauugagaauggcuacaggacuaaggaauaucccgucuauucaaucuagaggucuguuuggagccauugcuggcuuuauugaggggggauggacaggaaugauagauggaugguacgguuaucaccaucaaaaugagcagggaucaggauaugcagcugaccgaaagagcacacagaaugccauugacggaaucacuaacaaaguaaacucuguuauugaaaagaugaacacacaauucacagcaguggguaaagaauucaaccaccuggaaaaaagaauagagaauuuaaacaaaaagguugaugaugguuuucuggauguuuggacuuauaaugccgaacugcuaguucuauuggaaaaugaaagaacuuuagauuuccaugacucaaaugugaaaaaucuauaugagaaaguaagaagccagcuaaggaacaaugccaaggaaauugggaauggaugcuuugaauucuaccauaaaugugaugacacaugcauggagagcgucagaaaugggacuuaugauuaccuaaaguacucagaagaaucaaaacuaaauagagagaaaauagagggggugaaguuggauucagcaagaauuuaccagauuuuggcgauauauucaacugucgccaguucauugguacuauuggucucccugggggcaaucaguuucuggaugugcucuaaugggucuuuacagugcagaauauguauuuaa

SEQ ID NO: 32497 - RNA, 1698 nt, Artificial Sequence
  derived and/or modified CDS sequence (wt) from hemagglutinin__InfluenzaA__ABB86899
augaaaguaaaacuacugauccuguuauguacauuuacagcuacauaugcagacacaauauguauaggcuaccaugccaacaacucaaccgacacuguugacacaguacuugagaagaaugugacagugacacacucugucaaccuacuugaggacagucacaauggaaaacugugccuacuaaaagggauagccccccuacaauuggguaauugcagcguugccggguggaucuuaggaaacccagaaugcgaauuacugauuucuaaggaaucaugguccuacauuguagaaacaccaaauccugagaauggagcauguuacccagggcauuucgccgacuaugaggagcuaagggagcaauugaguucaguaucuucauuugagagauucgaaauauuccccaaagaaagcucauggcccaaccacaccauaaccggaguaucagcaucaugcucccauaaugggaaacgcaguuuuuacagaaaucugcuauggcugacggggaagaaugguuuguacccaaaccugagcaaguccuaugcaaacaacaaagagaaagaaguccuuauacuaugggguguucaucacccgccuaacauaggggaccaaaggacccucuaucacacagaaaaugcuuaugucucuguagugucuucacauuauagcagaagauucaccccagaaauaaccaaaagacccaaaguaagagaucaggaaggaagaaucaacuacuacuggacucugcuggaacccggggauacaauaauauuugaggcaaauggaaauuuaauagcgccaugguaugcuuucgcacugaguagagguuuuggaucaggaaucaucaccucaaaugcaccaauggaugaaugugaugcgaagugucaaacaccucagggagcuauaaacagcagucuuccuuuccagaauguacacccagucacaauaggagaguguccaaaguaugucaggagugcaaaauuaaggaugguuacaggacuaaggaacaucccauccauucaauccagagguuuguuuggagccauugccgguuucauugaagggggguggacuggaaugguagaugggugguaugguuaucaucaucagaaugagcaaggaucuggcuaugcugcagaucaaaaaagcacacaaaaugccauuaacgggaucacaaacaaggugaauucuguaauugagaaaaugaacacucaguucacagcugugggcaaagaauucagcaaauuggaaagaaggauggaaaacuuaaauaaaaagguugaugauggguuucuagacauuuggacauauaaugcagaauuguugguucuacuggaaaaugaaaggacuuuggauuuccacgacuccaaugugaagaaucuguacgagaaaguaaaaggccaauuaaagaauaaugccaaagaaauaggaaauggguguuuugaauucuaucacaaguguaacaaugaaugcauggagagugugaaaaauggaacuuaugacuauccaaaauauuccgaagaaucaaaguuaaacagggaaaaaauugauggagugaaauuggacucaaugggggucuaucagauucuggcgaucuacucaacugucgccaguucccugauucuuuuggucucccugggggcuaucagcuucuggauguguuccaaugggucuuugcaguguagaauaugcaucuga

SEQ ID NO: 32498 - RNA, 1701 nt, Artificial Sequence
  derived and/or modified CDS sequence (wt) from hemagglutinin__InfluenzaA__ABB86907
augaaggcaauacuauuagucuuguuauacacauuuacauccacaaaugcagacacauuauguauagguuaucaugcaaauaauucaacugacacuguugauacgguauuagaaaagaauguaacaguaacacacucuguuaaucuucuggaagacaaacacaacggaaaguuaugcagacuagggggaauagccccguuacacuuggguaaauguaacauugcuggauggcuuuuaggaaacccagaaugugacuuacuacucacaguaagcucauggucuuacauuguggaaacaucuaacucauacaaugggacauguuacccaggagauuucaccaauuaugaggagcugagagagcaauugagcucagugucaucauucgaaagauuugagauauuccccaaggcaagcucauggcccaaucaugaaacaaacagaggugugacagcagcaugcccucaugcugggacaaacagcuuuuacagaaauuuaauauggcuggugaaaaaaggaaauacauauccaaagcucagcaaauccuauguuaacaauaaagggaaggagguucuuguauuauggggcauucaccacccaucuaccaguacugaucaacaaagucucuaccagaaugcagauaccuauguuuuuguggggacaucaaaguauaacaagaaauucaagccggaaauagcagugagacccaaagugaaagaccaagcagggagaaugaauuauuacuggacauuaguagaaccuggggacacaauaacauuugaagcaacuggaaaccuaguaguaccaagauaugccuuugcaaugaauagaggccauggauccgguauuauuauuucagacaccccaguccaugauuguaauacgacuugucaaacacccaaaggugcuauaaacaccagccucccauuucagaaugugcauccagucacaauuggaaaauguccaaaauaugucaaaagcacaagauugagaauggcuacaggauuaaggaauauuccaucuauucaaucuagaggccuguuuggagcuauugcugguuuuauugaaggaggauggacaggaaugauagauggaugguaugguuaucaccaccaaaaugggcagggaucaggauaugcagcugaccaaaagagcacacagaaugccauugacggaaucacuaacaaaguaaauucuguuauugaaaagaugaacacacaguucacagcaguggguaaagaauucaaccacuuggaaaaaagaauagaaaaucuaaacaaaaagguugaugaugguuuucuagauguuuggacuuacaaugccgaacuguugguccuauuggagaaugaaagaacuuuggauuuccacgacucgaaugugaagaaccuauaugaaaaaguaagacgccagcuaaagaacaaugcuaaggaaauugggaauggcuguuuugaguuuuaccauaauugugaugaugcauguauggagagugucaaaaauggaacuuaugauuacccaaaauacucagaagagucacgacuaaacagagaggaaauaaauggaauaaaauuggauucaacaagaauuuaucagauuuuggcgaucuauucaacugucgccagcucaucagugcuguuggucucccugggggcaaucaguuucuggaugugcuccaaugggucuuuacaaugcagaauauguauuuag

SEQ ID NO: 32499 - RNA, 1698 nt, Artificial Sequence
  derived and/or modified CDS sequence (wt) from hemagglutinin__InfluenzaA__ABB86917
augaaaguaaaacugcugauccuguuauguacauuuacagcuacauaugcagacccaauauguauaggcuaccaugccaacaacucaaccgacacuguugacacaguacuugagaagaauguggcaguaacacacucugucaaccuacuugaggacagucacaauggaaaacugugccuacuaaaaggaauagccccccuacaauuggguaauugcagcguugccggauggaucuuaggaaacccagaaugcgaauuacugauuuccaaggaaucaugguccuacauuguagaaacaccaaauccugagaauggagcauguuacccaggguauuucgccgacuaugaggagcuaagggagcaauugaguucaguaucuucauuugagagauucgaaauauuccccaaagaaagcucauggcccaaccacaccguaaccggaguaucagcaucaugcucccauaaugggaaaagcaguuuuuacagaaauuugcuauggcugacggggaagaaugguuuguacccaaaccugagcaaguccuaugcaaacaacaaagagaaagaaguccuuauacuaugggguguucaucacccgccuaacauaggggaccaaaggacccucuaucacacagaaaaugcuuaugucucuguagugucuucacauuauagcagaagauucaccccagaaauaaccaaaaggcccaaaguaagagaucaggaaggaagaaucaacuacuacuggacucugcuggaacccggggauacaauaauauuugaggcaaauggaaaucuaauagcgccaugguaugcuuucgcacugaguagaggcuuuggaucaggaaucaucaccucaaaugcaccaauggaugaaugugaugcgaagugucaaacaccucagggagcuauaaacagcagucuuccuuuccagaauguacacccagucacaauaggagaguguccaaaguaugucaggagugcaaaauuaaggaugguuacaggacuaaggaacaucccauccauucaauccagagguuuguuuggagccauugccgguuucauugaagggggguggacuggaaugguagaugggugguaugguuaucaucaucaaaaugagcaaggaucuggcuaugcugcagaucaaaaaagcacacaaaaugccauuaacgggauuacaaacaaggugaauucuguaauugagaaaaugaacacucaauucacagcugugggcaaagaauucaacaaauuggaaagaaggauggaaaacuuaaauaaaaagguugaugauggguuucuagacauuuggacauauaaugcagaauuguugguucuacuggaaaaugaaaggacuuuggauuuccacgacuccaaugugaagaaucuguacgagaaaguaaaaagccaauuaaagaauaaugccaaagaaauaggaaauggguguuuugaauucuaucacaaguguaacaaugaaugcauggagagugugaaaaauggaacuuaugacuauccaaaauauuccgaagaaucaaaauuaaacagggaaaaaauugauggagugaaauuggacucaaugggggucuaucagauucuggcgaucuacucaacugucgccaguucccugguucuuuuagucucccugggggcaaucagcuucuggauguguuccaaugggucuuugcaguguagaauaugcaucuga

SEQ ID NO: 32500 - RNA, 1698 nt, Artificial Sequence
  derived and/or modified CDS sequence (wt) from hemagglutinin__InfluenzaA__ABB86929
augaaaguaaaacuacugauccuguuauauacauuuacagcuacauaugcagacacaauauguauaggcuaccaugccaacaacucaaccgacacuguugacacaguacuugagaagaaugugacagugacacacucugucaaccuacuugaggacagucacaauggaaaacugugccuacuaaaagggauagccccccuacaauuggguaauugcagcguugccggguggaucuuaggaaacccagaaugcgaauuacugauuuccaaggaaucaugguccuacauuguagaaacaccaaauccugagaauggagcauguuacccagggcauuucgccgacuaugaggagcuaagggagcaauugaguucaguaucuucauuugagagauucgaaauauuccccaaagaaagcucauggcccaaccacaccauaaccggaguaucagcaucaugcucccacaaugggaaacgcaguuuuuacagaaaucugcuauggcugacggggaagaaugguuuguacccaaaccugagcaaguccuaugcaaacaacaaagagaaagaaguccuuauacuaugggguguucaucacccgccuaacauaggggaccaaaggacccucuaucacacagaaaaugcuuaugucucuguagugucuucacauuauagcagaagauucaccccagaaauaaccaaaagacccaaaguaagagaucaggaaggaagaaucaacuacuacuggacucugcuggaacccggggauacaauaauauuugaggcaaauggaaaucuaauagcgccaugguaugcuuucgcacugaguagagguuuuggaucaggaaucaucaccucaaaugcaccaauggaugaaugugaugcgaagugucaaacaccucagggagcuauaaacagcagucuuccuuuccagaauguacacccagucacaauaggagaguguccaaaguaugucaggagugcaaaauuaaggaugguuacaggacuaaggaacaucccauccauucaauccagagguuuguuuggagccauugccgguuucauugaagggggguggacuggaaugguagaugggugguaugguuaucaucaucagaaugagcaaggaucuggcuaugcugcagaucaaaaaagcacacaaaaugccauuaacgggaucacaaacaaggugaauucuguaauugagaaaaugaacacucaguucacagcugugggcaaagaauucagcaaauuggaaagaaggauggaaaacuuaaauaaaaagguugaugauggguuucuagacauuuggacauauaaugcagaauuguugguucuacuggaaaaugaaaggacuuuggauuuccacgacuccaaugugaagaaccuguacgagaaaguaaaaggccaauuaaagaauaaugccaaagaaauaggaaauggguguuuugaauucuaucacaaguguaacaaugaaugcauggagagugugaaaaauggaacuuaugacuauccaaaauauuccgaagaaucaaaguuaaacagggaaaaaauugauggagugaaauuggacucaaugggggucuaucagauucuggcgaucuacucaacugucgccaguucccugauucuuuuggucucccugggggcuaucagcuucuggauguguuccaaugggucuuugcaguguagaauaugcaucuga

SEQ ID NO: 32501 - RNA, 1701 nt, Artificial Sequence
  derived and/or modified CDS sequence (wt) from hemagglutinin__InfluenzaA__ABB86937
augaaagcaauacuauuagucuuguuauauacauuuacauccacaaaugcagacacauuauguauagguuaucaugcaaauaauucaacugacacuguugauacaguacuagaaaagaauguaacgguaacacacucuguuaaucuucuagaagacaaacacaauggaagguuaugcaaacuagggggaauagccccauuacacuuggguaaauguaacauugcuggauggcuuuugggaaacccagaaugugaauuacuauucacaguaagcucauggucuuacauuguggaaacaucuaacucauacaaugggacauguuacccaggggauuucaucaauuaugaggagcugagggagcaauugagcucagugucaucauucgaaagauuugagauauuccccaaggcaaguucauggcccaaucaugaaacaaacagaggugugacagcagcaugcccacaugcugggacaaacagcuuuuacagaaauuuaauauggcuggugaaaaaaggaaauacauauccaaagaucagcaaauccuauguuaacaauaaagggaaggaaguucuuguguuauggggcauucaccauccaucuaccaguaaugaucaacaaagucucuaccagaaugcagauaccuauguuuuugugggaccaucaaaguauaacaagaaauucaagccggaaauagcaacgagacccaaagugagagaucaagcagggagaaugaacuauuacuggacacuaguagaaccuggggauacuauaacauucgaagcaacuggaaaccuaguaguaccaagguaugccuuugcaaugaauagagguucugaaucugguauuauaauuucagacacaccaguucaugauuguaauacuacuugucaaacacccaaaggugcuauaaacaccagccucccauuccagaauguacauccagucacaauuggagaauguccaaaauaugucaaaagcacaagauugagaauggcuacaggauuaaggaauaucccaucuauccaaucuaggggucuguuuggagcuauugcugguuuuauugaggagggguggacaggaaugauagauggaugguaugguuaccaccaucaaaaugggcagggaucaggauaugcagcugaccaaaagagcacacaaaaugccauugacggaaucaccaacaaaguaaauucuguuauugaaaagaugaacacacaguucacagcaguagguaaagaauucaaccacuuagaaaaaagaauagaaaaucuaaacaaaaagguugaugaugguuuucuggauguuuggacuuacaaugccgaacuguugguccuauuggagaaugaaagaaccuuggauuuccacgacucgaaugugaagaaccuauaugaaaaaguaagacgccagcuaaagaacaaugcuaaggaaauugggaauggcuguuuugaguucuaccacaaaugugaugaugcauguauggagagugucaaaaaugggacuuaugauuacccaaaauacucagaagaaucacgacuaaacagagaggaaauaaauggaauaaaacuggauucaacaaggauuuaccagauuuuggcgaucuauucaacugucgccagcucaucgguacuguuggucucccugggggcaaucaguuucuggaugugcuccaaugggucuuuacagugcagaauauguauuuaa

SEQ ID NO: 32502 - RNA, 1701 nt, Artificial Sequence
  derived and/or modified CDS sequence (wt) from hemagglutinin__InfluenzaA__ABB86946
augaaagcaauacuauuagucuugcuauauacauuuacagccgcaaaugcagacacacuauguauagguuaucaugcaaauaauucaacugacacuguugauacaguacuagaaaagaauguaacaguaacacacucuguuaaccuucuagaagacagacauaacggaaaacuaugcaaacuaaggggaauagccccauugcacuuggguaaauguaacauugcuggauggcuuuugggaaacccagaaugugaaucacuauccacaguaagcucauggucuuacauuguggaaacaucuaacucagacaaugggacauguuacccaggagauuucaucaauuaugaggagcugagagagcagcugaguucagugucaucauuugaaagauuugagauauuccccaaggcaaguucauggcccaaucaugaaacaaacagagguacgacggcagcaugcccuuaugcuggagcaaacagcuucuacagaaauuuaauauggcuggugaaaaaaggaaauucauacccaaagcucaacaaauccuauguuaacaauaaggggaaggaaguccuugugcuauggggcauucaccauccaucaaccaguaaugagcaacaaagucucuaccagaaugcagauaccuauguuuuugugggaucaucaaaguauaacaagaaauucaagccagaaauagcaacaagacccaaagugagagaucaagcagggagaaugaacuauuacuggacauuaauagaaccuggggacacaauaacauucgaagcaacuggaaaccuagugguaccaagguaugccuuugcaaugaauagagguucuggaucugguauuauaauuucagauacaccaguucacgauuguaauacuacuugucaaacacccaaaggugcuauaaacaccagccucccauuucagaauguacauccagucacaauuggagaauguccaaaauaugucaaaagcacaaaauugagaauggcuacaggauuaaggaauaucccgucuauucaaucuagaggucuguuuggagcuauugcugguuuuauugaagggggauggacagguaugauagauggaugguaugguuaucaccaccaaaaugagcagggaucaggauaugcagcugaccaaaagagcacacagaaugccauugacgggaucacuaacaaaguaaauucuguuauugaaaagaugaacacacaguucacagcaguggguaaagaauucaaccacuuggaaaaaagaauagaaaauuuaaacaaaaagguugaugaugguuuucuggacguuuggacuuacaaugccgaacuguugguacuauuggaaaaugaaagaacuuuggauuuccacgacucuaauguuaagaaccuauaugaaaaaguaagaagccagcuaaagaacaaugcuaaggaaauugggaauggcuguuuugaguucuaccacaaaugcgaugaugcauguauggagagugucaaaaaugggacuuaugauuacccaaaauacucagaagaaucaagacuaaacagagaggaaauagauggaauaaaacuggauucaacaagaauuuaccagauuuuggcgaucuauucaacugucgccaguucaucaguacuguuggucucccugggggcaaucaguuucuggaugugcuccaaugggucuuuacagugcagaauauguauuuaa

SEQ ID NO: 32503 - RNA, 1701 nt, Artificial Sequence
  derived and/or modified CDS sequence (wt) from hemagglutinin__InfluenzaA__ABB96319
augaagacuaucauugcuuugagcuacauuuucugucagguuuucgcccaaaaccuuccaggaaaugacaacagcacagcaacgcugugccugggacaucaugcagugccaaacggaacgcuagugaaaacaaucacgaaugaucagauugaagugacuaaugcuacugagcugguucagaguuccucaacagguagaauaugcgacaauccucaucgaauccuugauggaaaaaacugcacacugauagaugcucuauugggggacccucauugugauggcuuucaaaaugagaaaugggaccuuuuuguugaacgcagcaaagcuuucagcaacuguuacccuuaugaugugccagauuaugccucccuuaggucacuaguugccucgucaggcacccuggaguuuuucaaugaaggcuucaauuggacuggggucacucagaaugggggaagcuaugcuuguaaaaggggaccugauaacaguuucuucaguagacugaacugguuguacaaaucagaaagcacauauccagugcugaacgugacuaugccaaacaaugacaauuuugacaaacuguacauuuggggaguucaccacccgagcacggacaaagaacaaaccaaccuauauguucaagcaucagggagagucacagucuccaccaagagaagccagcaaacuauaaucccgaaugucgggccuagacccuggguaaggggucugucuaguagaauaagcaucuauuggacaauagugaaaccgggagacguacuguuaauuaauaguaaugggaaccuaauugcuccucgggguuacuucaaaauacgcacugggaaaagcucaauaaugaggucagaugcacccauuggcaccugcaguucugaaugcaucacuccaaauggaagcauucccaaugacaagcccuuucaaaacguaaacaagaucacauauggggcaugucccaaguauguuaagcaaaacacucugaaguuggcaacagggaugcggaauguaccagagaaacaaacuagaggcauauucggcgcaauagcagguuucauagaaaaugguugggagggaaugauagacgguugguacgguuucaggcaucaaaauucugagggcacaggacaagcagcagaucuuaaaagcacucaagcagccaucgaccaaaucaaugggaaacugaauaggguaaucgagaaaacaaacgagaaauuccaucaaaucgaaaaggaauucucagaaguagaagggagaauucaggaccucgagaaauacguugaagacacuaaaauagaucucuggucuuacaaugcggagcuucuugucgcucuggagaaccaacauacaauugaucugacugacucggaaaugaacaaacuguuugaaaaaacaaggaggcaacugagggaaaaugcugaggacaugggcaaugguugcuucaaaauauaccacaaaugugacaaugcuugcauagggucaaucagaaauggaacuuaugaccaugauguauacagagacgaagcauuaaacaaccgguuucagaucaaagguguugagcugaagucaggauacaaagacuggauccuguggauuuccuuugccauaucaugcuuuuugcuuuguguuguuuugcugggguucaucaugugggccugccaaaaaggcaacauuaggugcaacauuugcauuuga

SEQ ID NO: 32504 - RNA, 1701 nt, Artificial Sequence
  derived and/or modified CDS sequence (wt) from hemagglutinin__InfluenzaA__ABB96330
augaagacuaucauugcuuugagcuacauuuucugucagguuuucgcccaaaaccuuccaggaaaugacaacagcacagcaacgcugugccugggacaucaugcagugccaaacggaacgcuagugaaaacaaucacgaaugaucagauugaagugacuaaugcuacugagcugguucagaguuccucaacagguagaauaugcgacaauccucaucgaauccuugauggaaaaaacugcacacugauagaugcucuauugggggacccucauugugauggcuuucaaaaugagaaaugggaccuuuuuguugaacgcagcaaagcuuucagcaacuguuacccuuaugaugugccagauuaugccucccuuaggucacuaguugccucgucaggcacccuggaguuuuucaaugaaggcuucaauuggacuggggucacucagaaugggggaagcuaugcuuguaaaaggggaccugauaacaguuucuucaguagacugaacugguuguacaaaucagaaagcacauauccagugcugaacguaacuaugccaaacaaugacaauuuugacaaacuguacauuuggggaguucaccacccgagcacggacaaagaacaaaccaaccuauauguucaagcaucagggagagucacagucuccaccaagagaagccagcaaacuauaaucccgaaugucgggucuagacccuggguaaggggucugucuaguagaauaagcaucuauuggacaauaguaaaaccgggagacguacuguuaauuaauaguaaugggaaccuaauugcuccucgggguuacuucaaaauacgcacugggaaaagcucaauaaugaggucagaugcacccauuggcaccugcaguucugaauguaucacuccaaauggaagcauucccaaugacaggcccuuucaaaacguaaacaagaucacauauggggcaugucccaaguauguuaagcaaaacacucugaaguuggcaacagggaugcggaauguaccagagaaacaaacuagaggcauauucggcgcaauagcagguuucauagaaaaugguugggagggaaugguagacgguugguacgguuucaggcaucaaaauucugagggcacaggacaagcagcagaucuuaaaagcacucaagcagccaucgaccaaaucaaugggaaacugaauaggguaaucgagaaaacaaacgagaaauuccaucaaaucgaaaaggaauucucagaaguagaagggagaauucagaaccucgagaaauacguugaagacacuaaaauagaucucuggucuuacaaugcggagcuucuugucgcucuggagaaccaacauacaauugaucugacugacucggaaaugaacaaacuguuugaaaaaacaaggaggcaacugagggaaaaugcugaggacaugggcaaugguugcuucaaaauauaccacaaaugugacaaugcuugcauagggucaaucagaaauggaacuuaugaccaugauguauacagagacgaagcauuaaacaaccgguuucagaucaaagguguugagcugaagucaggauacaaagacuggauccuguggauuuccuuugccauaucaugcuuuuugcuuuguguuguuuugcugggguucaucaugugggccugccaaaaaggcaacauuaggugcaacauuugcauuuga

SEQ ID NO: 32505 - RNA, 1701 nt, Artificial Sequence
  derived and/or modified CDS sequence (wt) from hemagglutinin__InfluenzaA__ABB96341
augaagacuaucauugcuuugagcuacauuuucugucagguuuuugcccaaaaccuuccaggaaaugacaacagcacagcaacgcugugccugggacaucaugcagugccaaacggaacgcuagugaaaacaaucacgaaugaucagauugaagugacuaaugcuacugagcugguucagaguuccucaacagguagaauaugcgacaauccucaucgaauccuugauggaaaaaacugcacacugauagaugcucuauugggggacccucauugugauggcuuucaaaaugagaaaugggaccuuuuuguugaacgcagcaaagcuuucagcaacuguuacccuuaugaugugccagauuaugccucccuuaggucacuaguugccucgucaggcacccuggaguuuuucaaugaaggcuucaauuggacuggggucacucagaaugggggaagcuaugcuuguaaaaagggaccugauaacaguuucuucaguagacugaacugguuguacaaaucagaaagcacauauccagugcugaacgugacuaugccaaacaaugacaauuuugacaaacuguacauuuggggaguucaccacccgagcacggacaaagaacaaaccaaccuauauguucaagcaucagggagagucacagucuccaccaagagaagccagcaaacuauaaucccgaaugucgggucuagacccuggguaaggggucugucuaguagaauaagcaucuauuggacaauaguaaaaccgggagacguacuguuaauuaauaguaaugggaaccuaauugcuccucgggguuacuucaaaauacgcacugggaaaagcucaauaaugaggucagaugcacccauuggcaccugcaguucugaaugcaucacuccaaauggaagcauucccaaugacaagcccuuucaaaacguaaacaagaucacauauggggcaugucccaaguauguuaagcaaaacacucugaaguuggcaacagggaugcggaauguaccagagaaacaaacuagaggcauauucggcgcaauagcagguuucauagaaaaugguugggagggaaugauagacgguugguacgguuucaggcaucaaaauucugagggcacagggcaagcagcagaucuuaaaagcacucaagcagccaucgaccaaaucaaugggaaacugaauaggguaaucgagaaaacaaacgagaaauuccaucaaaucgaaaaggaauucucagaaguagaagggagaauucaggaccucgagaaauacguugaagacacuaaaauagaucucuggucuuacaaugcggagcuucuugucgcucuggagaaccaacauacaauugaucugacugacucggaaaugaacaaacuguuugaaaaaacaaggaggcaacugagggaaaaugcugaggacaugggcaaugguugcuucaaaauauaccacaaaugugacaaugcuugcauagggucaaucagaaauggaacuuaugaccaugauguauacagagacgaagcauuaaacaaccgguuucagaucaaagguguugagcugaagucaggauacaaagacuggauccuguggauuuccuuugccauaucaugcuuuuugcuuuguguuguuuugcugggguucaucaugugggccugccaaaaaggcaacauuaggugcaacauuugcauuuga

SEQ ID NO: 32506 - RNA, 1701 nt, Artificial Sequence
  derived and/or modified CDS sequence (wt) from hemagglutinin__InfluenzaA__ABB96395
augaagacuaucauugcuuugagcuacauuuucugucagguuuucgcccaaaaccuuccaggaaaugacaacagcacagcaacgcugugccugggacaucaugcagugccaaacggaacgcuagugaaaacaaucacgaaugaucagauugaagugacuaaugcuacugagcugguucagaguuccucaacagguagaauaugcgacaguccucaucgaauccuugauggaaaaaacugcacacugauggaugcucuauugggggacccucauugugauggcuuucaaaaugagaaaugggaccuuuuuguugaacgcagcaaagcuuucagcaacuguuacccuuaugaugugccagauuaugccucccuuaggucacuaguugccucgucaggcacccuggaguuuaucaaugaaggcuucaauuggacuggggucacucagaaugggggaagcuaugcuugcaaaaggggaccugauaacaguuucuucaguagacugaacugguuguacaaaucagaaagcacauauccagugcugaacgugacuaugccaaacaaugacaauuuugacaaacuguacauuuggggaguucaccacccgagcacggacaaagaacaaaccaaccuauauguucaagcaucagggagagucacagucuccaccaagagaagccagcaaacuauaaucccgaaugucgggucuagacccuggguaaggggucugucuaguagaauaagcaucuauuggacaauaguaaaaccgggagacauacuguuaauuaauaguaaugggaaccuaauugcuccucgggguuacuucaaaauacgcacugggaaaagcucaauaaugagaucagaugcacccauuggcaccugcaguucugaaugcaucacuccaaauggaagcauucccaaugacaagcccuuucaaaacguaaacaagaucacauauggggcaugucccaaguauguuaagcaaaacacucugaaguuggcaacagggaugcggaauguaccagagaaacaaacuagaggcauauucggcgcaauagcagguuucauagaaaaugguugggagggaaugauagacgguugguacgguuucaggcaucaaaauucugagggcacaggacaagcagcagaucuuaaaagcacucaagcagccaucgaccaaaucaaugggaaacugaauaggguaaucgagagaacaaacgagaaauuccaucaaaucgaaaaggaauucucagaaguagaagggagaauucaggaccucgagaaauacguugaagacacuaaaauagaucucuggucuuacaaugcggagcuucuugucgcucuggagaaccaacauacaauugaucugacugacucggaaaugaacaaacuguuugaaaaaacaaggaggcaacugagggaaaaugcugaggacaugggcaaugguugcuucaaaauauaccacaaaugugacaaugcuugcauagggucaaucagaaauggaacuuaugaccaugauguauacagagacgaagcauuaaacaaccgguuucagaucaaagguguugagcugaagucaggauacaaagacuggauccuguggauuuccuuugccauaucaugcuuuuugcuuuguguuguuuugcugggguucaucaugugggccugccaaaaaggcaacauuaggugcaacauuugcauuuga

SEQ ID NO: 32507 - RNA, 1698 nt, Artificial Sequence
  derived and/or modified CDS sequence (wt) from hemagglutinin__InfluenzaA__ABB96487
augaaaguaaaacuacugauccuguuauguacauuuacagcuacauaugcagacacaauauguauaggcuaccaugccaacaacucaaccgacacuguugacacaguacuugagaagaaugugacagugacacacucugucaaccuacuugaggacagucacaauggaaaacugugccuacuaaaaggaauagccccccuacaauuggguaauugcagcguugccggauggaucuuaggaaacccagaaugcgaauuacugauuuccaaggaaucaugguccuacauuguagaaacaccaaauccugagaauggagcauguuacccaggguauuucgccgacuaugaggagcuaagggagcaauugaguucaguaucuucauuugagagauucgaaauauuucccaaaaaaagcucauggcccaaccacaccguaaccggaguaucagcaucaugcucccaugaugggaaaagcaguuuuuacagaaauuugcuauggcugacggggaagaaugguuuguacccaaaccugagcaaguccuaugcaaacaacaaagagaaagaaguccuuauacuaugggguguucaucacccgccuaacauaggggaccaaaggacccucuaucacacagaaaaugcuuaugucucuguagugucuucacauuauagcagaagauucaccccagaaauaaccaaaaggcccaaaguaagagaucaggaaggaagaaucaacuacuacuggacucugcuggaacccggggauacaauaauauuugaggcaaauggaaaucuaauagcgccaugguaugcuuucgcacugaguagaggcuuuggaucaggaaucaucaccucaaaugcaccaauggaugaaugugaugcgaagugucaaacaccucagggagcuauaaacagcagucuuccuuuccagaauguacacccagucacaauaggagaguguccaaaguaugucaggagugcaaaauuaaggaugguuacaggacuaaggaacaucccauccauucaauccagagguuuguuuggagccauugccgguuucauugaagggggguggacuggaaugguagaugggugguaugguuaucaucaucagaaugagcaaggaucuggcuaugcugcagaucaaaaaagcacacaaaaugccauuaacgggauuacaaacaaggugaauucuguaauugagaaaaugaacacucaauucacagcugugggcaaagaauucaacaaauuggaaagaaggauggaaaacuuaaauaaaaagguugaugauggguuucuagacauuuggacauauaaugcagaauuguugguucuacuggaaaaugaaaggacuuuggauuuccacgacuccaaugugaagaaucuguacgagaaaguaaaaagccaauuaaagaauaaugccaaagaaauaggaaauggguguuuugaauucuaucacaaguguaacaaugaaugcauggagagugugaaaaauggaacuuaugacuauccaaaauauuccgaagaaucaaaguuaaacagggaaaaaauugauggagugaaauuggacucaaugggggucuaucagauucuggcgaucuacucaacugucgccaguucccugguucuuuuggucucccugggggcaaucagcuucuggauguguuccaaugggucuuugcaguguagaauaugcaucuga

SEQ ID NO: 32508 - RNA, 1701 nt, Artificial Sequence
  derived and/or modified CDS sequence (wt) from hemagglutinin__InfluenzaA__ABB96520
augaagaccaucauugcuuugagcuacauuuucugucuggcucucggccaagaccuuccaggaaauggcaacagcacagcaacgcugugccugggacaucaugcggugccaaacggaacacuagugaaaacaaucacagaugaucagaucgaagugacuaaugcuacugagcuaguucagagcuccucaacggggaaaauaugcaacaauccucaucgaauccuugauggaauagacugcacacugauagaugcucuauugggggacccucauugugauguuuuucaaaaugagacaugggaccuuuucguugaacgcagcaaagcuuucagcaacuguuacccuuaugauguaccagauuaugccucccuuaggucacuaguugccucgucaggcacucuggaguuuaucacugaggguuucacuuggacuggggucacucagaaugggggaagcaaugcuugcaaaaggggaccugguagcgguuuuuucaguagacugaacugguugaccaaaucaggaagcacauauccagugcugaacgugacuaugccaaacaaugacaauuuugacaaacuauacauuugggggguucaucacccgagcacggaccaagaacaaaccagccuguauguucaagcaucagggagggucacagucucuaccaggagaagccagcaaacuauaaucccgaauaucggguccagacccuggguaaggggucugucuaguagaauaagcaucuauuggacaauaguuaagccgggagacguacugguaauuaauaguaaugggaaccuaaucgcuccucgggguuauuucaaaaugcgcacugggaaaagcucaauaaugaggucagaugcaccuauugauaccuguauuucugaaugcaucacuccaaauggaagcauucccaaugacaagcccuuucaaaacguaaacaagaucacauauggagcaugccccaaguauguuaagcaaaaaacccugaaguuggcaacagggaugcggaauauaccagagaaaaaaacuagaggcauauucggcgcaauagcagguuucauagaaaaugguugggaaggaaugauagacgguugguacgguuucaggcaucaaaauucugagggcacaggacaagcagcagaucuuaaaagcacucaagcagcaaucgaccaaaucaaugggaaauugaacaggguaaucgagaagacgaacgagaaauuccaucaaaucgaaaaggaauucucagaaguagaagggagaauucaggaccucgagaaauacguugaagacacuaaaauagaucucuggucuuacaaugcugagcuucuugucgcucuggagaaucaacauacaauugaccugacugacucggaaaugaacaagcuguuugaaaaaacaaggaggcaacugagggaaaaugcugaagacaugggcaaugguugcuucaaaauauaccacaaaugugacaacgcuugcauagagucaaucagaaaugggacuuaugaccaugauguauacagagacgaagcauuaaacaaccgguuucagaucaaagguguugaacugaagucuggauacaaagacuggauccuguggauuuccuuugccauaucaugcuuuuugcuuuguguuguuuugcugggguucaucaugugggccugccagagaggcaacauuaggugcaacauuugcauuuga

SEQ ID NO: 32509 - RNA, 1701 nt, Artificial Sequence
  derived and/or modified CDS sequence (wt) from hemagglutinin__InfluenzaA__ABB96531
augaagacuaucauugcuuugagcuacauuuuaugucugguuuccgcucaaaaaauucccggaaaugacagcagcacagcaacgcugugccugggacaccaugcagugccaaacggaacgcuagugaaaacaaucacgaaugaccaaauugaagugacuaaugcuacugagcugguucagaguuccucaacagguagaauaugcgacaguccucaccgaauccuugauggagaaaacugcacacugauagaugcucuauugggagacccucauugugauggcuuccaaaauaaggaaugggaccuuuuuguugaacgcagcaaagccuacagcaacuguuacccuuaugaugugccggauuaugccucccuuaggucacuaguugccucauccggcacccuggaguuuaacaaugaaagcuucaauuggacuggagucgcucagaauggaacaagcuaugcuugcaaaaggagaucuauuaaaaguuucuuuaguagauugaauugguugcaccaauuaaaauacaaauauccagcacugaacgugacuaugccaaacaaugacaaauuugacaaauuguacauuugggggguucaccacccgaguacggacagugaccaaaccagccuauaugcucaagcaucagggagagucacagucucuaccaaaagaagccaacaaacuguaaucccgaauaucggaucuagacccuggguaaggggugucuccagcagaauaagcaucuauuggacaauaguaaaaccgggagacauacuuuugauuaacagcacagggaaucuaauugcuccucgggguuacuucaaaauacgaagugggaaaagcucaauaaugaggucagaugcacccauuggcaaaugcaauucugaaugcaucacuccaaauggaagcauucccaaugacaaaccauuucaaaauguaaacaggaucacauauggggccugucccagauauguuaagcaaaacacucugaaauuggcaacagggaugcggaauguaccagagaaacaaacuagaggcauauucggcgcaaucgcagguuucauagaaaaugguugggagggaaugguagacgguugguacgguuucaggcaucaaaauucugagggcacaggacaagcagcagaucuuaaaagcacucaagcagcaaucaaccaaaucaacgggaaacugaauagguuaaucgagaaaacgaacgagaaauuccaucaaauugaaaaagaauucucagaaguagaagggagaauucaggaccucgagaaauauguugaggacacuaaaauagaucucuggucguacaacgcggagcuucuuguugcccuggagaaccaacauacaauugaucuaacugacucagaaaugaacaaacuguuugaaagaacaaggaagcaacugagggaaaaugcugaggauaugggcaaugguuguuucaaaauauaccacaaaugugacaaugccugcauagggucaaucagaaauggaacuuaugaccaugauguauacagagacgaagcauuaaacaaccgguuccagaucaaagguguugagcugaagucaggauacaaagauuggauccuauggauuuccuuugccauaucauguuuuuugcuuuguguuguuuugcugggguucaucaugugggccugccaaaaaggcaacauuaggugcaacauuugcauuuga

SEQ ID NO: 32510 - RNA, 1701 nt, Artificial Sequence
  derived and/or modified CDS sequence (wt) from hemagglutinin__InfluenzaA__ABC02234
augaagacuaucauugcuuugagcuacauuuuaugucugguuuucgcucaaaaacuucccggaaaugacaacagcacggcaacgcugugccugggacaccaugcagugccaaacggaacgcuagugaaaacaaucacgaaugaccaaauugaagugacuaaugcuacugagcugguucagaguuccucaacagguagaauaugcgacaguccucaccgaauccuugauggagaaaacugcacacugauugaugcucuauugggagacccucauugugauggcuuccaaaauaaggaaugggaccuuuuuguugaacgcagcaaagccuacagcaacuguuacccuuaugaugugccggauuaugccucccuuaggucacuaguugccucauccggcacccuggaguuuaacaaugaaagcuucaauuggacuggagucgcucagaauggaacaagcuaugcuugcaaaaggagaucuauuaaaaguuucuuuaguagauugaauugguugcaccaauuaaaauacaaauauccagcacugaacgugacuaugccaaacaaugacaaauuugacaaauuguacauuugggggguucaccacccgaguacggacagugaccaaaccagccuauaugcucaagcaucagggagagucacagucucuaccaaaauaagccaacaaacuguaaucccgaauaucggaucuagacccuggguaaggggugucuccagcagaauaagcaucuauuggacaauaguaaaaccgggagacauacuuuugauuaacagcacagggaaucuaauugcuccucgggguuacuucaaaauacgaagugggaaaagcucaauaaugaggucagaugcacccauuggcaaaugcaauucugaaugcaucacuccaaauggaagcauucccaaugacaaaccauuucaaaauguaaacaggaucacauauggggccugucccagauauguuaagcaaaacacccugaaauuggcaacagggaugcggaauguaccagagaaacaaacuagaggcauauucggcgcaaucgcagguuucauagaaaaugguugggagggaaugguagacgguugguacgguuucaggcaucaaaauucugagggcacaggacaagcagcagaccuuaaaagcacucaagcagcaaucaaccaaaucaacgggaaacugaauagguuaaucgagaaaacgaacgagaaauuccaucaaauugaaaaagaauucucagaaguagaagggagaauucaggaccucgagaaauauguugaggacacuaaaauagaucucuggucguacaacgcggagcuucuuguugcccuggagaaccaacauacaauugaucuaacugacucagaaaugaacaaacuguuugaaagaacaaggaagcaacugagggaaaaugcugaggauaugggcaaugguuguuucaaaauauaccacaaaugugacaaugccugcauagggucaaucagaaauggaacuuaugaccaugauguauacagagacgaagcauuaaacaaccgguuccagaucaaagguguugagcugaagucaggauacaaagauuggauccuauggauuuccuuugccaugucauguuuuuuguuuuguguuguuuugcugggguucaucaugugggccugccaaaaaggcaacauuaggugcaacauuugcauuuga

SEQ ID NO: 32511 - RNA, 1701 nt, Artificial Sequence
  derived and/or modified CDS sequence (wt) from hemagglutinin__InfluenzaA__ABC02255
augaagacuaucauugcuuugagcuacauuuucugucugguucucgcccaagaccuuccaggaaaugacaacagcacagcaacgcugugccugggacaucaugcggugccaaacggaacgcuagugaaaacaaucacgaaugaucagauugaagugacuaaugcuacugagcugguucagagcuccucaacggguaaaauaugcaacaauccucaucgaauccuugauggaauaaacugcacacugauagaugcucuauugggggacccucauugugauggcuuucaaaaugagaaaugggaccuuuucguugaacgcagcaaagcuuucagcaacuguuacccuuaugaugugccagacuaugccucccuuaggucacuaguugccucgucaggcacucuggaguuuaucaaugaaggcuucaauuggacuggggucacucagaaugggggaagcaaugcuugcaaaaggggaccugauagcgguuuuuucaguagacugaacugguuguacaaaucaggaagcacauauccagugcugaacgugacuaugccaaacaaugacaauuuugacaaacuauacauuugggggguucaccacccgagcacggaccaagaacaaaccaaccuauauguucaagcaucagggagagucacagucuccaccaagagaagccagcaaacuauaaucccgaauguugggucuagacccuggguaaggggucugucuaguagaauaagcaucuauuggacaauaguuaaaccgggagacauacugguaauuaauaguaaugggaaccuaauugcuccucggggucacuucaaaaugcgcacugggaagagcucaauaaugaggucagaugcaccuauuggcaccugcaguucugaaugcaucacuccaaauggaagcauucccaaugacaagcccuuucaaaacguaaacaagaucacauauggggcaugucccaaguauguuaagcaaaacacucugaaguuggcaacagggaugcggaauguaccagagaaacaaacuagaggcauauucggcgcaauagcagguuucauagaaaaugguugggagggaaugauagacgguugguacgguuucaggcaucaaaauucugagggcacaggacaagcagcagaucuuaaaagcacucaagcagcuaucgaccaaaucaaugggaaacugaauaggguaaucgagaagacgaacgagaaauuccaucaaaucgaaaaggaauucucagaaguagaagggagaauucaggaccucgagaaauacguugaagacacuaaaauagaucucuggucuuacaaugcggagcuucuugucgcucuggagaaccaacauacaauugaucugacugacucggaaaugaacaaacuguuugaaaaaacaaggaggcaacugagggaaaaugcugaggacaugggcaaugguugcuucaaaauauaccacaaaugugacaaugcuugcauagggucaaucagaaaugggacuuaugaccaugauguauacagagacgaagcauuaaacaaccgguuucagaucaaagguguugaacugaagucaggauacaaagacuggauccuguggauuuccuuugccauaucaugcuuuuugcuuuguguuguuuugcugggguucaucaugugggccugccaaaaaggcaacauuaggugcaacauuugcauuuga

SEQ ID NO: 32512 - RNA, 1701 nt, Artificial Sequence
  derived and/or modified CDS sequence (wt) from hemagglutinin__InfluenzaA__ABC02266
augaagacuaucauugcuuugagcuacauuuucugucugguuuucgcccaagaccuuccaggaaaugacaacagcacagcaacucugugccugggacaucaugcggugccaaacggaacgcuagugaaaacaaucacgaaugaucagauugaagugacuaaugcuacugaacugguucagaguuccucaacggguaaaauaugcgacaauccucaucgaauccuugauggaauaaacugcacacugauagaugcucuauugggggacccucauugugauggcuuucaaaaugagaaaugggaccuuuucguugaacgcagcaaagcuuucagcaacuguuacccuuaugaugugccagauuaugccucccuuaggucacuaguugccucgucaggcacucuggaguuuaucaaugaaggcuucaauuggacuggggucacucagaaugggggaagcagggcuugcaaaaggggaccugauaacgguuuuuucaguagacugaacugguuguacaaaucaggaagcacauauccagugcagaacgugaccaugccaaacaaugacaacucugacaaacuauacauuugggggguucaccacccgagcacggacaaagaacaaaccgaccuauauguucaagcaucagggaaagucacagucuccaccaagagaagccagcaaacuguaaucccgaaugucgggucuagacccuggguaaggggucugucuaguagaguaagcaucuauuggacaauaguuaaaccgggagacauacugguaauuaauaguaauggaaaccuaauugcuccucgggguuacuucaaaaugcgcacugggaaaagcucaauaaugaggucagaugcaccuauuggcaccugcagcucugaaugcaucacuccaaauggaagcauucccaaugacaagcccuuucaaaacguaaacaagaucacauauggggcaugucccaaguauguuaagcaaaacacucugaaguuggcaacagggaugcggaauguaccagagaaacaaacuagaggcauauucggcgcaauagcagguuucauagaaaaugguugggagggaaugauagacgguugguacgguuucaggcaucaaaauucugagggcacaggacaagcagcagaucuuaaaagcacucaagcagccaucgaccaaaucaaugggaaacugaauaggguaaucgagaagacgaacgagaaauuccaucaaaucgaaaaggaauucucagaaguagaagggagaauucaggaccucgagaaauacguugaagacacuaaaauagaucucuggucuuacaaugcggagcuucuugucgcucuggagaaccaacauacaauugaucugacugacucggaaaugaacaaacuguuugaaaaaacaaggaggcaacugagggaaaaugcugaggacaugggcaaugguugcuucaaaauauaccacaaaugugacaaugcuugcauagggucaaucagaaaugggacuuaugaccaugauguauacagagacgaagcauuaaacaaccgguuucagaucaaagguguugaacugaagucaggauacaaagacuggauccuguggauuuccuuugccauaucaugcuuuuugcuuuguguuguuuugcugggguucaucaugugggccugccagaaaggcaacauuaggugcaacauuugcauuuga

SEQ ID NO: 32513 - RNA, 1701 nt, Artificial Sequence
  derived and/or modified CDS sequence (wt) from hemagglutinin__InfluenzaA__ABC02288
augaagacuaucauugcuuugagcuacauuuuaugucugguuuucgcucaaaaaauucccggaaaugacaacagcacggcaacgcugugccugggacaccaugcagugccaaacggaacgcuagugaaaacaaucacgaaugaccaaauugaagugacuaaugcuacugagcugguucagaguuccucaacagguagaauaugcgacaguccucaccgaauccuugauggagaaaacugcacacugauagaugcucuauugggagacccucauugugauggcuuccaaaauaaggaaugggaccuuuuuguugaacgcagcaaagccuacagcaacuguuacccuuaugaugugccggauuaugccucccuuaggucacuaguugccucauccggcacccuggaguuuaacaaugaaagcuucaauuggacuggagucgcucagaauggaacaagcuaugcuugcaaaaggagaucuauuaaaaguuucuuuaguagauugaauugguugcaccaauuaaaauacaaauauccagcacugaacgugacuaugccaaacaaugacaaauuugacaaauuguacauuugggggguucaccacccgaguacggacagugaucaaaccagccuauaugcucaagcaucagggagagucacagucucuaccaaaagaagccaacaaacuguaaucccgaauaucggaucuagacccuggguaaggggugucuccagcagaauaagcaucuauuggacaauaguaaaaccgggagacauacuuuugauuaacagcacagggaaucuaauugcuccucgggguuacuucaaaauacgaagugggaaaagcucaauaaugaggucagaugcacccauuggcaaaugcaauucugaaugcaucacuccaaauggaagcauucccaaugacaaaccauuucaaaauguaaacaggaucacauauggggccugucccagauauguuaagcaaaacacucugaaauuggcaacagggaugcggaauguaccagagaaacaaacuagaggcauauucggcgcaaucgcagguuucauagaaaaugguugggagggaaugguagacgguugguacgguuucaggcaucaaaauucugagggcacaggacaagcagcagaucuuaaaagcacucaagcagcaaucaaccaaaucaaugggaaacugaauagguuaaucgagaaaacgaacgagaaauuccaucaaauugaaaaagaauucucagaaguagaagggagaauucaggaccucgagaaauauguugaggacacuaaaauagaucucuggucguacaaugcggagcuucuuguugcccuggagaaccaacauacaauugaucuaacugacucagaaaugaacaaacuguuugaaagaacaaggaagcaacugagggaaaaugcugaggauaugggcaaugguuguuucaaaauauaccacaaaugugacaaugccugcauagggucaaucagaaauggaacuuaugaccaugauguauacagagacgaagcauuaaacaaccgguuucagaucaaagguguugagcugaagucaggacacaaagauuggauccuauggauuuccuuugccauaucauguuuuuugcuuuguguuguuuugcugggguucaucaugugggccugccaaaaaggcaacauuaggugcaacauuugcauuuga

SEQ ID NO: 32514 - RNA, 1701 nt, Artificial Sequence
  derived and/or modified CDS sequence (wt) from hemagglutinin__InfluenzaA__ABC02299
augaagacuaucauugcuuugagcuacauuuuaugucugguuuucgcucaaaaaauucccggaaaugacaacagcacggcaacgcugugccugggacaccaugcagugccaaacggaacgcuagugaaaacaaucacgaaugaccaaauugaagugacuaaugcuacugagcugguucagaguuccucaacagguagaauaugcgacaguccucaccgaauccuugauggagaaaacugcacacugauagaugcucuauugggagacccucauugugauggcuuccaaaauaaggaaugggaccuuuuuguugaacgcagcaaagccuacagcaacuguuacccuuaugaugugccggauuaugccucccuuaggucacuaguugccucauccggcacccuggaguuuaacaaugaaagcuucaauuggacuggagucgcucagaauggaacaagcuaugcuugcaaaaggagaucuauuaaaaguuucuuuaguagauugaauugguugcaccaauuaaaauacaaauauccagcacugaacgugacuaugccaaacaaugacaaauuugacaaauuguacauuugggggguucaccacccgaguacggacagugaccaaaccagccuauaugcucaagcaucagggagagucacagucucuaccaaaagaagccaacaaacuguaaucccgaauaucggaucuagacccuggguaaggggugucuccagcagaauaagcaucuauuggacaauaguaaaaccgggagacauacuuuugauuaacagcacagggaaucuaauugcuccucgggguuacuucaaaauacgaagugggaaaagcucaauaaugaggucagaugcacccauuggcaaaugcaauucugaaugcaucacuccaaauggaagcauucccaaugacaaaccauuucaaaauguaaacaggaucacauauggggccugucccagauauguuaagcaaaacacucugaaauuggcaacagggaugcggaauguaccagagaaacaaacuagaggcauauucggcgcaaucgcagguuucauagaaaaugguugggagggaaugguagacgguugguacgguuucaggcaucaaaauucugagggcacaggacaagcagcagaucuuaaaagcacucaagcagcaaucaaccaaaucaacgggaaacugaauagguuaaucgagaaaacgaacgagaaauuccaucaaauugaaaaagaauucucagaaguagaagggagaauucaggaccucgagaaauauguugaggacacuaaaauagaucucuggucguacaacgcggagcuucuuguugcccuggagaaccaacauacaauugaucuaacugacucagaaaugaacaaacuguuugaaagaacaaggaagcaacugagggaaaaugcugaggauaugggcaaugguuguuucaaaauauaccacaaaugugacaaugccugcauagggucaaucagaaauggaacuuaugaccaugauguauacagagacgaagcauuaaacaaccgguuucagaucaaagguguugagcugaagucaggauacaaagauuggauccuauggauuuccuuugccauaucauguuuuuugcuuuguguuguuuugcugggguucaucaugugggccugccaaaaaggcaacauuaggugcaacauuugcauuuga

SEQ ID NO: 32515 - RNA, 1701 nt, Artificial Sequence; identical to SEQ ID NO: 32506
  derived and/or modified CDS sequence (wt) from hemagglutinin__InfluenzaA__ABC02310

SEQ ID NO: 32516 - RNA, 1701 nt, Artificial Sequence
  derived and/or modified CDS sequence (wt) from hemagglutinin__InfluenzaA__ABC02321
augaagacuaucauugcuuugagcuacauuuucugucugguucucgcccaagaccuuccaggaaaugacaacagcacagcaacgcugugccugggacaucaugcggugccaaacggaacgcuagugaaaacaaucacgaaugaucagauugaagugacuaaugcuacugagcugguucagagcuccucaacggguaaaauaugcaacaauccucaucgaauccuugauggaauaaacuguacacugauagaugcucuauugggggacccucauugugauggcuuucaaaaugagaaaugggaccuuuucguugaacgcagcaaagcuuucagcaacuguuacccuuaugaugugccagacuaugccucccuuaggucacuaguugccucgucaggcacucuggaguuuaucaaugaaggcuucaauuggacuggggucacucagaaugggggaagcaaugcuugcaaaaggggaccugauagcgguuuuuucaguagacugaacugguuguacaaaucaggaagcacauauccagugcugaacgugacuaugccaaacaaugacaauuuugacaaacuauacauuugggggguucaccacccgagcacggaccaagaacaaaccaaccuauauguucaagcaucagggagagucacagucuccaccaagagaagccagcaaacuauaaucccgaauguugggucuagacccuggguaaggggucugucuaguagaauaagcaucuauuggacaauaguuaaaccgggagacauacugguaauuaauaguaaugggaaccuaauugcuccucggggucacuucaaaaugcgcacugggaagagcucaauaaugaggucagaugcaccuauuggcaccugcaguucugaaugcaucacuccaaauggaagcauucccaaugacaagcccuuucaaaacguaaacaagaucacauauggggcaugucccaaguauguuaagcaaaacacucugaaguuggcaacagggaugcggaauguaccagagaaacaaacuagaggcauauucggcgcaauagcagguuucauagaaaaugguugggagggaaugauagacgguugguacgguuucaggcaucaaaauucugagggcacaggacaagcagcagaucuuaaaagcacucaagcagcuaucgaccaaaucaaugggaaacugaauaggguaaucgagaagacgaacgagaaauuccaucaaaucgaaaaggaauucucagaaguagaagggagaauucaggaccucgagaaauacguugaagacacuaaaauagaucucuggucuuacaaugcggagcuucuugucgcucuggagaaccaacauacaauugaucugacugacucggaaaugaacaaacuguuugaaaaaacaaggaggcaacugagggaaaaugcugaggacaugggcaaugguugcuucaaaauauaccacaaaugugacaaugcuugcauagggucaaucagaaaugggacuuaugaccaugauguauacagagacgaagcauuaaacaaccgguuucagaucaaagguguugaacugaagucaggauacaaagacuggauccuguggauuuccuuugccauaucaugcuuuuugcuuuguguuguuuugcugggguucaucaugugggccugccaaaaaggcaacauuaggugcaacauuugcauuuga

SEQ ID NO: 32517 - RNA, 1701 nt, Artificial Sequence
  derived and/or modified CDS sequence (wt) from hemagglutinin__InfluenzaA__ABC02332
augaagacuaucauugcuuugagcuacauuuucugucugguucucggccaagauuuuccaggaaaugacaacagcacagcaacgcugugccugggacaucaugcggugccaaacggaacacuagugaaaacaaucacaaaugaucagauugaagugacuaaugcuacugagcugguucagaguuccucaacggggaaaauaugcaacaauccucaucgaauccuugauggaauagacugcacacugauagaugcucuauugggggacccucauugugauggcuuucaaaaugagacaugggaccuuuucguugaacgcagcaaagcuuucagcaacuguuacccuuaugaugugccagauuaugccucccuuaggucacuaguugccucgucaggcacucuggaguuuaucaaugaaggcuucacuuggacuggggucacucagaaugggggaagcaaugcuugcaaaaggggaccugauagcgguuuuuucaguagacugaacugguuguacaaaucaggaagcacauauccagugcugaacgugacuaugccaaacaaugacaauuuugacaaacuauacauuugggggguucaccacccgagcacggaccaagaacaaaccagccuauauguucaagcaucagggagagucacagucucuaccaagagaagccagcaaacuauaaucccgaauaucgggucuagacccuggguaaggggucugucuaguagaauaagcaucuauuggacaauaguuaaaccaggagacauacugguaauuaauaguaaugggaaccuaauugcuccucgggguuauuucaaaaugcgcacugggaaaagcucaauaaugaggucagaugcaccuauuggcaccugcauuucugaaugcaucacuccaaauggaagcauucccaaugacaagcccuuucaaaacguaaacaagaucacauauggggcaugucccaaguauguuaagcaaaacacccugaaguuggcaacagggaugcggaauguaccagagaaacaaacuagaggccuauucggcgcaauagcagguuucauagaaaaugguugggagggaaugauagacgguugguacgguuucaggcaucaaaauucugagggcacaggacaagcagcagaucuuaaaagcacucaagcagccaucgaccaaaucaaugggaaacugaauaggguaaucgagaagacgaacgagaaauuccaucaaaucgaaaaggaauucucagaaguagaagggagaauucaggaccucgagaaauacguugaagacacuaaaauagaucucuggucuuacaaugcggagcuucuugucgcucuggagaaccaacauacaauugaucugacugacucggaaaugaacaaacuguuugaaaaaacaaggaggcaacugagggaaaaugcugaggacaugggcaaugguugcuucaaaauauaccacaaaugugacaaugcuugcauagggucaaucagaaaugggacuuaugaccaugauguauacagagacgaagcauuaaacaaccgguuucagaucaaagguguugaacugaagucaggauacaaagacuggauccuguggauuuccuuugccauaucaugcuuuuugcuuuguguuguuuugcugggguucaucaugugggccugccagaaaggcaacauuaggugcaacauuugcauuuga

SEQ ID NO: 32518 - RNA, 1701 nt, Artificial Sequence
  derived and/or modified CDS sequence (wt) from hemagglutinin__InfluenzaA__ABC39805
augaagaccaucauugcuuugagcuacauucucugucugguuuucgcccaaaaccuucccggaaaugacaacagcacagcaacgcugugccugggacaucaugcagugccaaacggaacacuagugaaaacaauaacgaaugaucaaauugaagugaccaaugcuacugagcugguucagaguuccucagcagguagaauaugcgacaguccccaccgaauccuugaugggaaaaacugcacacugauagaugcucuauugggagauccucauugugauggcuuucaaaaugagaaaugggaccuuuuuguugaacgcagcaaagcuuucagcaacuguuacccuuaugaugugcaagauuaugccucccuuaggucacuaguugccucgucaggcacccuggaguuuaucaaugaaggcuucaauuggacuggggucacucagagugggggaagcuaugcuugcaaaaggggaucugguaacaguuucuucaguagacugaacugguuguacaaaucagaaagcaaauauccagcgcugaacgugacuaugccaaacaauggcaauuuugacaaacuguacauuugggggguucaucacccgagcacggacaaagaacaaaccaaccuauauguucgagcgucagggagagucacagucucuaccaagagaagccagcaaacuguaaucccgaauaucgggccuagacccuggguaaggggccugucuaguagaauaaguaucuauuggacaauagugaaaccgggagacauacuguuaauuaauaguagugggaaccuaauugcuccucgggguuauuucaaaauacgcacugggaaaagcucaauaaugaggucagaugcaccuauuggcaccugcaguucugaaugcaucacuccaaauggaagcauucccaaugacaagcccuuccaaaacguaaacaagaucacauauggggcaugucccaaguauguuaagcaaaauacucuaaaauuggcaacagggaugcggaauauaccagagaaacaaacuagaggcauauucggcgcaauagcagguuucauagaaaaugguugggagggaaugguagacggcugguacgguuucaggcaucaaaauucugagggcacaggacaagcagcagaucuuaaaagcacucaagcagcaaucgaccaaaucaaugggaaacugaauaggguaaucgagaaaacuaacgagaaauuccaucaaaucgaaaaggaauucucagaaguagaagggagaauucaggaccucgagaaauacguugaagacacuaaaauagaucucuggucuuacaacgcagagcuucuuguugcucuggagaaccaacauacaauugaucugacugacucggaaaugaacaaacuguuugaaaaaacaaggaggcaacugagggaaaaugcugaggacaugggcaaugguugcuucaaaauauaccacaaaugugacaaugcuugcauagggucaaucagaaauggaacuuaugaccaugauguauacagagacgaagcauuaaacaaccgguuucagaucaaagguguugagcugaagucaggauacaaagacuggauccuguggauuuccuuugccauaucaugcuuuuugcuuuguguuguuuugcugggguucaucaugugggccugccaaaaaggcaacauuaggugcaacauuugcauuuga

SEQ ID NO: 32519 - RNA, 1698 nt, Artificial Sequence
  derived and/or modified CDS sequence (wt) from hemagglutinin__InfluenzaA__ABC40522
augaaaguaaaacuacugauccuguuauguacauuuacagcuacauaugcagacacaauauguauaggcuaccaugccaacaacucaaccgacacuguugacacaguacuugagaagaaugugacagugacacacucugucaaccuacuugaggacagucacaauggaaaacugugccuacuaaaaggaauagccccccuacaauuggguaauugcagcguugccggauggaucuuaggaaacccagaaugcgaauuacugauuuccaaggaaucaugguccuacauuguagaaacaccaaauccugagaauggagcauguuacccaggguauuucgccgacuaugaggagcuaagggagcaauugaguucaguaucuucauuugagagauucgaaauauuccccaaagaaagcucauggcccaaccacaccguaaccggaguaucagcaucaugcucccauaaugggaaaagcaguuuuuacaaaaauuugcuauggcugacggggaagaaugguuuguacccaaaccugagcaaguccuaugcaaacaacaaagagaaagaaguccuuauacuaugggguguucaucacccgccuaacauaggggaccaaaggacccucuaucacacagaaaaugcuuaugucucuguagugucuucacauuauagcagaagauucaccccagaaauaaccaaaaggcccaaaguaagagaucaggaaggaagaaucaacuacuacuggacucugcuggaacccggggauacaauaauauuugaggcaaauggaaaucuaauagcgccaugguaugcuuucgcacugaguagaggcuuuggaucaggaaucaucaccucaaaugcaccaauggaugaaugugaugcuaagugucaaacaccucagggagcuauaaacagcagucuuccuuuccagaauguacacccagucacaauaggagaguguccaaaguaugucaggagugcaaaauuaaggaugguuacaggacuaaggaacaucccauccauucaauccagagguuuguuuggagccauugccgguuucauugaagggggguggacuggaaugguagaugggugguaugguuaucaucaucagaaugagcaaggaucuggcuaugcugcagaucaaaaaagcacacaaaaugccauuaacgggauuacaaacaaggugaauucuguaauugagaaaaugaacacucaauucacagcugugggcaaagaauucaacaaauuggaaagaaggauggaaaacuuaaauaaaaagguugaugauggguuucuagacauuuggacauauaaugcagaauuguugguucuacuggaaaaugaaaggacuuuggauuuccacgacuccaaugugaagaaucuguacgagaaaguaaaaagccaauuaaagaauaaugccaaagaaauaggaaauggguguuuugaauucuaucacaaguguaacaaugaaugcauggagagugugaaaaauggaacuuaugacuauccaaaauauuccgaagaaucaaaguuaaacagggaaaaaauugauggagugaaauuggacucaaugggggucuaucagauucuggcgaucuacucaacugucgccaguucccugguucuuuuggucucccugggggcaaucagcuucuggauguguuccaaugggucuuugcaguguagaauaugcaucuga

SEQ ID NO: 32520 - RNA, 1698 nt, Artificial Sequence; identical to SEQ ID NO: 32369
  derived and/or modified CDS sequence (wt) from hemagglutinin__InfluenzaA__ABC40533

SEQ ID NO: 32521 - RNA, 1701 nt, Artificial Sequence
  derived and/or modified CDS sequence (wt) from hemagglutinin__InfluenzaA__ABC40555
augaagacuaucauugcuuugagcuacauuuucugucugguuuucgcccaaaaccuccccagaaaugacaaaagcacagcaacgcugugccugggacaccaugcagugccaaacggaacgcuagugaaaacaaucacgaaugaucagauugaagugacuaaugcuacugagcugguucagaguuccucaacagguagaauaugcgacaguccucaccgaauccuugaugggaaaaacugcacacugguagaugcucuauugggagacccucauugugauggcuuucagaaugagaaaugggaccuuuuuguugaacgcagcaaagcuuucagcaacuguuacccuuaugaugugccagauuaugccucccuuaggucacuaguugccucgucaggcacccuggaguuuaucaaugaaagcuucaauuggacuggagucacucagagugggggaagcuaugcuugcaaaaggggaucugauaacaguuucuucaguagacugaauugguuguacgaaucagaaagcaaauauccagugcugaacgugacuaugccaaacaauggcaauuuugacaaacuguacauuugggggguucaccacccgagcacggacaaagaacaaaccaaccuauauguucgagcaucagggagagucacagucucuaccaagagaagccagcaaacuauaaucccgaauaucgggucuagacccuggguaaggggucugucuagcagaauaagcaucuauuggacaauaguaaaaccgggagacauacuguuaauuaauaguaaugggaaccuaauugcuccucgggguuacuucaaaauacgcacugggaaaagcucaauaaugaggucagaugcaccuauuggcaccugcaguucugaaugcaucacuccaaauggaagcauucccaaugacaagcccuuucaaaauguaaacaagaucacauauggggcaugucccaaguauguuaagcaaaacacucugaaguuggcaacagggaugcggaauguaccagagaaacaaacuagaggcauauucggcgcaauagcagguuucauagaaaaugguugggagggaaugguagacgguugguacgguuucaggcaucaaaauucugagggcacaggacaagcagcagaucuuaaaagcacucaagcagcaaucgaccaaaucaaugggaaacugaauaggguaaucgagaaaacgaacgagaaauuccaucaaaucgaaaaggaauucucagaaguagaagggagaauucaggaccucgagaaauacguugaagacacuaaaauagaucucuggucuuacaacgcggagcuucuugucgcucuggagaaccaacauacaauugaucugacugacucggaaaugaacaaacuguuugaaaaaacaaggaggcaacugagggaaaaugcugaggacaugggcaaugguugcuucaaaauauaccacaaaugugacaaugcuugcauagggucaaucagaaauggaacuuaugaccaugauguauacagagacgaagcauuaaacaaccgguuucagaucaaagguguugagcugaagucaggauacaaagacuggauccuguggauuuccuuugccauaucaugcuuuuugcuuuguguuguuuugcugggguucaucaugugggccugccaaaaaggcaacauuaggugcaacauuugcauuuga

SEQ ID NO: 32522 - RNA, 1701 nt, Artificial Sequence
  derived and/or modified CDS sequence (wt) from hemagglutinin__InfluenzaA__ABC40608
augaagacuaucauugcuuugagcuacauuuuaugucugguuuucgcucaaaaacuucccggaaaugacaacagcacggcaacgcugugccugggacaccaugcagugccaaacggaacgcuagugaaaacaaucacgaaugaccaaauugaagugacuaaugcuacugagcugguucagaguuccucaacagguagaauaugcgacaguccucaccgaauccuugauggagaaaacugcacacugauagaugcucuauugggagacccucauugugauggcuuccaaaauaaggaaugggaccuuuuuguugaacgcagcaaagccuacagcaacuguuacccuuaugaugugccggauuaugccucccuuaggucacuaguugccucauccggcacccuggaguuuaacaaugaaagcuucaauuggacuggagucgcucagaauggaacaagcucugcuugcaaaaggagauccauuaaaaguuucuuuaguagauugaauugguugcaccaauuaaaauacaaauauccagcacugaacgugacuaugccaaacaaugacaaauuugacaaauuguacauuugggggguucaccacccgaguacggacagugaccaaaccagccuauaugcucaagcaucagggagagucacagucucuaccagaagaagccaacaaacuguaaucccgaacaucggaucuagacccuggguaaggggugucuccagcagaauaagcaucuauuggacaauaguaaaaccgggagacauacuuuugauuaacagcacagggaaucuaauugcuccucgggguuacuucaaaauacgaagugggaaaagcucaauaaugaggucagaugcacccauuggcaaaugcaauucugaaugcauuacuccaaauggaagcauucccaaugacaaaccauuucaaaguguaaacaggaucacauauggggccugucccagauauguuaagcaaaacacucugaaauuggcaacagggaugcggaauguaccagagaaacaaacuagaggcauauucggcgcaaucgcugguuucauagaaaaugguugggagggaaugguggacgguugguacgguuucaggcaucaaaauucugagggcacaggacaagcagcagaucuuaaaagcacucaagcagcaaucaaccaaaucaacgggaaacugaauagguuaaucgagaaaacgaacgagaaauuccaucaaauugaaaaagaauucucagaaguagaagggagaauucaagaccucgagaaauauguugaggacacuaaaauagaucucuggucguacaacgcggagcuucuuguugcccuggagaaccaacauacaauugaucuaacugacucagaaaugaacaaacuguuugaaagaacaaggaagcaacugagggaaaaugcugaggauaugggcaaugguuguuucaaaauauaccacaaaugugacaaugccugcauagggucaaucagaaauggaacuuaugaccaugauguauacagagacgaagcauuaaacaaccgguuccaaaucaaagguguugagcugaagucaggauacaaagauuggauccuauggauuuccuuugccauaucauguuuuuugcuuuguguuguuuugcugggguucaucaugugggccugccaaaaaggcaacauuaggugcaacauuugcauuuga

SEQ ID NO: 32523 - RNA, 1701 nt, Artificial Sequence
  derived and/or modified CDS sequence (wt) from hemagglutinin__InfluenzaA__ABC40619
augaagacuaucauugcuuugagcuacauuuucugucugguucucggccaagacuuuucaggaaaugacaacagcacagcaacgcugugccugggacaucaugcggugccaaacggaacacuagugaaaacaaucacaaaugaucagauugaagugacuaaugcuacugagcugguucagaguuccucaacggggaaaauaugcaacaauccucaucgaauccuugauggaauagacugcacacugauagaugcucuauugggggacccucauugugauggcuuucaaaaugagacaugggaccuuuucguugaacgcagcaaagcuuucagcaacuguuacccuuaugaugugccagauuaugccucccuuaggucacuaguugccucgucaggcacucuggaguuuaucaaugaaggcuucaauuggacuggggucacucagaaugggggaagcaaugcuugcaaaaggggaccugauagcgguuuuuucaguagacugaacugguuguacaaaucaggaagcacauauccagugcugaacgugaguaugccaaacaaugacaauuuugacaaacuauacauuugggggguucaccacccgagcacggaccaagaacaaaccaaccuauauguucaagcaucagggagagucacagucuccaccaagagaagucagcaaacuauaaucccgaauaucgggucuagacccuggguaaggggucugucuaguagaauaagcaucuauuggacaauaguuaaaccgggagacauacugguaauuaauaguaaugggaaccuaauugcuccucgggguuauuucaaaaugcgcacuggaaaaagcucaauaaugaggucagaugcaccuauuggcaccugcauuucugaaugcaucacuccaaauggaagcauucccaaugacaaacccuuucaaaacguaaacaagaucacauauggugcaugucccaaguauguuaagcaaaacacccugaaguuggcaacagggaugcggaauguaccagagaaacaaacuagaggcauauucggcgcaauagcagguuucauagaaaaugguugggagggaaugauagacgguugguacgguuucaggcaucaaaauucugagggcacaggacaagcagcagaucuuaaaagcacucaagcagccaucgaccaaaucaaugggaaacugaauaggauaaucgagaagacgaacgagaaauuccaucaaauagaaaaggaauucucagaaguagaagggagaauucaggaccucgagaaauacguugaagacacuaaaauagaucucuggucuuacaaugcggagcuucuugucgcucuggagaaccaacauacaauugaucugacugacucggaaaugaacaaacuguuugaaaaaacaaggaggcaacugagggaaaaugcugaggacaugggcaaugguugcuucaaaauauaccacaaaugugacaaugcuugcauagggucaaucagaaaugggacuuaugaccaugauguauacagagacgaagcauuaaacaaccgguuucagaucaaagguguugaacugaagucaggauacaaagacuggauccuguggauuuccuuugccauaucaugcuuuuugcuuuguguuguuuugcugggguucaucaugugggccugccagaaaggcaacauuaggugcaacauuugcauuuga

SEQ ID NO: 32524 - RNA, 1698 nt, Artificial Sequence
  derived and/or modified CDS sequence (wt) from hemagglutinin__InfluenzaA__ABC40631
augaaaguaaaacuacugaucuuguuauguacauuuacagcuacauaugcagacacaauauguauaggcuaccaugccaacaacucaaccgacacuguugacacaguacuugagaagaaugugacagugacacacucugucaaccuacuugaggacagucacaauggaaaacuaugucuacuaaaaggaauagccccccuacaauuggguaauugcagcguugccggauggaucuuaggaaacccagaaugcgaauuacugauuuccaaggaaucaugguccuacauuguagaaacaccaaauccugagaauggaacauguuacccaggguauuucgccgacuaugaggagcuaagggagcaauugaguucaguaucuucauuugagagauucgaaauauuccccaaagaaagcucauggcccaaccacaccguaaccggaguaucagcaucaugcucccauaaugggaaaagcaguuuuuacagaaauuugcuauggcugacggggaagaaugguuuguacccaaaccugagcaaguccuaugcaaacaacaaagagaaagaaguccuuauacuaugggguguucaucacccgccuaacauaggggaccaaaggacccucuaucauacagaaaaugcuuaugucucuguagugucuucacauuauagcagaagauucaccccagaaauaaccaaaaggcccaaaguaagagaucaggaaggaagaaucaacuacuacuggacucugcuggaacccggggauacaauaauauuugaggcaaauggaaaucuaauagcgccaugguaugcuuucgcacugaguagaggcuuuggaucaggaaucaucaccucaaaugcaccaauggaugaaugugaugcgaagugucaaacaccucagggagcuauaaacagcagucuuccuuuccagaauguacacccagucacaauaggagaguguccaaaguaugucaggagugcaaaauuaaggaugguuacaggacuaaggaacaucccauccauucaauccagagguuuguuuggagccauugccgguuucauugaagggggguggacuggaaugguagaugggugguaugguuaucaucaucagaaugagcaaggaucuggcuaugcugcagaucaaaaaagcacacaaaacgccauuaacgggauuacaaacaaggugaauucuguaauugagaaaaugaacacucaauucacagcugugggcaaagaauucaacaaauuggaaagaaggauggaaaacuuaaauaaaaaaguugaugauggauuucuagacauuuggacauauaaugcagaauuguugguucuacuggaaaaugaaaggacuuuggauuuccacgacuccaaugugaagaaucuguaugagaaaguaaaaagccaauuaaagaauaaugccaaagaaauaggaaauggguguuuugaauucuaucacaaguguaacaaugaaugcauggagagugugaaaaauggaacuuaugacuauccaaaauauuccgaagaaucaaaguuaaacagggaaaaaauugauggagugaaauuggaaucaaugggagucuaucagauucuggcgaucuacucaacugucgccaguucccugguucuuuuggucucccugggggcaaucagcuucuggauguguuccaaugggucuuugcaguguagaauaugcaucuga

SEQ ID NO: 32525 - RNA, 1701 nt, Artificial Sequence
  derived and/or modified CDS sequence (wt) from hemagglutinin__InfluenzaA__ABC41692
augaagacuaucauugcuuugagcuacauucuaugucugguuuucgcucaaaaaccucccggaaaugacaacagcacggcaacgcugugccuugggcaccaugcaguaccaaacggaacgauagugaaaacaaucacaaaugaccaaauugaaguuacuaaugcuacugagcugguucagaguuccucaacagguggaauaugcgacaguccucaucagauccuugauggagaaaacugcacacuaauagaugcucuauugggagacccucagugugauggcuuccaaaauaagaaaugggaccuuuuuguugaacgcagcaaagccuacagcaacuguuacccuuaugaugugccggaucaugccucccuuaggucacuaguugccucauccggcacacuggaguuuaacaaugaaagcuucgauuggacuggagucacucagaauggaacaagcucugcuugcaaaaggagaucuaauaaaaguuucuuuaguagauugaauugguugacccacuuaaaauacaaauacccagcauugaacgugacuaugccaaacaaugaaaaauuugacaaauuguacauuugggggguucaccacccggguacggacagugaccaaaucagccuauaugcucaagcaucaggaagaaucacagucucuaccaaaagaagccaacaaacuguaaucccgaauaucggaucuagacccaggguaagggaugucuccagccgaauaagcaucuauuggacaauaguaaaaccgggagacauacuuuugauuaacagcacagggaaucuaauugcuccucgggguuacuucaaaauacgaagugggaaaagcucaauaaugagaucagaugcacccauuggcaaaugcaauucugaaugcaucacuccaaauggaagcauucccaaugacaaaccauuucaaaauguaaacaggaucacauauggggccugucccagauauguuaagcaaaacacucugaaauuggcaacagggaugcgaaauguaccagagaaacaaacuagaggcauauuuggcgcaaucgcggguuucauagaaaaugguugggagggaaugguggacgguugguacgguuucaggcaucaaaauucugagggcacaggacaagcagcagaucucaaaagcacucaagcagcaaucaaccaaaucaaugggaaacugaauagguuaaucgggaaaacaaacgagaaauuccaucagauugaaaaagaauucucagaaguagaagggagaauucaggaccucgagaaauauguugaggacacuaaaauagaucucuggucauacaacgcggagcuucuuguugcccuggagaaccaacauacaauugaucuaacugacucagaaaugaacaaacuguuugaaagaacaaagaagcaacugagggaaaaugcugaggauaugggcaaugguuguuucaaaauauaccacaaaugugacaaugccugcauagggucaaucagaaauggaacuuaugaccaugauguguacagagaugaagcauuaaacaaccgguuccagaucaaagguguugagcugaagucaggauauaaagauuggauccuauggauuuccuuugccauaucauguuuuuugcuuuguguugcuuuguugggguucaucaugugggccugccaaaaaggcaacauuaggugcaacauuugcauuuga

SEQ ID NO: 32526 - RNA, 1698 nt, Artificial Sequence
  derived and/or modified CDS sequence (wt) from hemagglutinin__InfluenzaA__ABC41714
augaaaguaaaacuacugguucuguuauguacauuuacagcuacauaugcagacacaauauguauaggcuaccaugccaacaacucaaccgacacuguugacacaguacuugagaagaaugugacagugacacacucugucaaccuacuugaggacagucacaauggaaaacuaugucuacuaaaaggaauagccccacuacaauuggguaauugcagcguugccggauggaucuuaggaaacccagaaugcgaauuacugauuuccaaggaaucaugguccuacauuguagaaacaccaaauccugagaauggaacauguuauccaggguauuucgccgacuaugaggaacugagggagcaauugaguucaguaucuucauuugagagguucgaaauauuccccaaagagagcucauggcccaaccacaccguaaccggaguaucagcaucaugcucccauaacgggaaaagcaguuuuuacagaaauuugcuauggcugacggggaagaaugguuuauacccaaaccugagcaaguccuaugcaaacaacaaagagaaagaaguccuuguacuaugggguguucaucacccgccuaacauaggggaccaaagggcccucuaucauacagaaaaugcuuaugucucuguagugucuucacauuauagcagaagauucaccccagaaauagccaaaagacccaagguaagagaucaggaaggaagaaucaacuacuacuggacucugcuggaacccggggauacaauaauauuugaggcaaauggaaaucuaauagcgccaagguaugcuuucgcacugaguagaggcuuuggaucaggaaucaucaccucaaaugcaccaauggaugaaugugaugcgaagugucaaacaccucagggagcuauaaacagcagucuuccuuuccagaauguacacccagucacaauaggagaguguccaaaguaugucaggagugcaaaauuaaggaugguuacaggacuaaggaacaucccauccauucaauccagagguuuguuuggagccauugccgguuucauugaagggggguggacuggaaugguagaugguugguaugguuaucaucaucagaaugagcaaggaucuggguaugcugcagaucaaaaaagcacacaaaaugccauuaacgggauuacaaacaaggugaauucuguaauugagaaaaugaacacucaauucacagcugugggcaaagaauucaacaaauuggaaagaaggauggaaaacuuaaauaaaaaaguugaugauggauuucuagacauuuggacauauaaugcagaauuguugguucuacuggaaaaugaaaggacuuuggauuuccaugacuccaacgugaagaaucuguaugagaaaguaaaaagccaauuaaagaauaaugccaaagaaauaggaaacggguguuuugaauucuaucacaaguguaacgaugaaugcauggagagugugaaaaauggaacuuaugacuauccaaaauauuccgaagaaucaaaguuaaacagggagaaaauugauggagugaaauuggaaucaaugggagucuaucagauucuggcgaucuacucaacagucgccaguucccugguucuuuuggucucccugggggcaaucagcuucuggauguguuccaaugggucuuugcaguguagaauaugcaucuaa

SEQ ID NO: 32527 - RNA, 1701 nt, Artificial Sequence
  derived and/or modified CDS sequence (wt) from hemagglutinin__InfluenzaA__ABC41725
augaagacuaccauugcuuugagcuacauucuaugucugguuuucgcucaaaaacuucccggaaaugacaacagcacggcaacgcugugccuugggcaccaugcaguaccaaacggaacgauagugaaaacaaucacaaaugaccaaauugaaguuacuaaugcuacugagcugguucagaguuccucaacagguggaauaugcgacaguccucaucagauccuugauggagaaaacugcacacuaauagaugcucuauugggagacccucagugugauggcuuccaaaauaagaaaugggaccuuuuuguugaacgcagcaaagccuacagcaacuguuacccuuaugaugugccggaucaugccucccuuaggucacuaguugccucauccggcacacuggaguuuaacaaugaaagcuucgauuggacuggagucacucagaauggaacaagcucugcuugcaaaaggagaucuaauaaaaguuucuuuaguagauugaauugguugacccacuuaaaauacaaauacccagcauugaacgugacuaugccaaacaaugaaaaauuugacaaauuguacauuugggggguucaccacccggguacggacagugaccaaaucagccuauaugcucaagcaucaggaagaaucacagucucuaccaaaagaagccaacaaacuguaaucccgaauaucggaucuagacccaggguaagggaugucuccagccgaauaagcaucuauuggacaauaguaaaaccgggagacauacuuuugauuaacagcacagggaaucuaauugcuccucgggguuacuucaaaauacgaagugggaaaagcucaauaaugagaucagaugcacccauuggcaaaugcaauucugaaugcaucacuccaaauggaagcauucccaaugacaaaccauuucaaaauguaaacaggaucacauauggggccugucccagauauguuaagcaaaacacucugaaauuggcaacagggaugcgaaauguaccagagaaacaaacuagaggcauauuuggcgcaaucgcggguuucauagaaaaugguugggagggaaugguggacgguugguacgguuucaggcaucaaaauucugagggcacaggacaagcagcagaucucaaaagcacucaagcagcaaucaaccaaaucaaugggaaacugaauagguuaaucgggaaaacaaacgagaaauuccaucagauugaaaaagaauucucagaaguagaagggagaauucaggaccucgagaaauauguugaggacacuaaaauagaucucuggucauacaacgcggagcuucuuguugcccuggagaaccaacauacaauugaucuaacugacucagaaaugaacaaacuguuugaaagaacaaagaagcaacugagggaaaaugcugaggauaugggcaaugguuguuucaaaauauaccacaaaugugacaaugccugcauagggucaaucagaaauggaacuuaugaccaugauguguacagagaugaagcauuaaacaaccgguuccagaucaaagguguugagcugaagucaggauauaaagauuggauccuauggauuuccuuugccauaucauguuuuuugcuuuguguugcuuuguugggguucaucaugugggccugccaaaaaggcaacauuaggugcaacauuugcauuuga

SEQ ID NO: 32528 - RNA, 1701 nt, Artificial Sequence
  derived and/or modified CDS sequence (wt) from hemagglutinin__InfluenzaA__ABC41736
augaagacuaucauugcuuugagcuacauucuaugccugguuuucgcucaaaaacuucccggaaaugacaacagcacggcaacgcugugccuugggcaccaugcaguaccaaacggaacgauagugaaaacaaucacaaaugaccaaauugaaguuacuaaugcuacugagcugguucagaguuccucaacagguggaauaugcgacaguccucaucagauccuugauggagaaaacugcacacuaauagaugcucuauugggagacccucagugugauggcuuccaaaauaagaaaugggaccuuuuuguugaacgcagcaaagccuacagcaacuguuacccuuaugaugugccggaucaugccucccuuaggucacuaguugccucauccggcacacuggaguuuaacaaugaaagcuucgauuggacuggagucacucagaauggaacaagcucugcuugcaaaaggagaucuaauaaaaguuucuuuaguagauugaauugguugacccacuuaaaauacaaauacccagcauugaacgugacuaugccaaacaaugaaaaauuugacaaauuguacauuugggggguucaccacccggguacggacagugaccaaaucagccuauaugcucaagcaucaggaagaaucacagucucuaccaaaagaagccaacaaacuguaaucccgaauaucggaucuagacccaggguaagggaugucuccagccgaauaagcaucuauuggacaauaguaaaaccgggagacauacuuuugauuaacagcacagggaaucuaauugcuccucgggguuacuucaaaauacgaagugggaaaagcucaauaaugagaucagaugcacccauuggcaaaugcaauucugaaugcaucacuccaaauggaagcauucccaaugacaaaccauuucaaaauguaaacaggaucacauauggggccugucccagauauguuaagcaaaacacucugaaauuggcaacagggaugcgaaauguaccagagaaacaaacuagaggcauauuuggcgcaaucgcggguuucauagaaaaugguugggagggaaugguggacgguugguacgguuucaggcaucaaaauucugagggcacaggacaagcagcagaucucaaaagcacucaagcagcaaucaaccaaaucaaugggaaacugaauagguuaaucgggaaaacaaacgagaaauuccaucagauugaaaaagaauucucagaaguagaagggagaauucaggaccucgagaaauauguugaggacacuaaaauagaucucuggucauacaacgcggagcuucuuguugcccuggagaaccaacauacaauugaucuaacugacucagaaaugaacaaacuguuugaaagaacaaagaagcaacugagggaaaaugcugaggauaugggcaaugguuguuucaaaauauaccacaaaugugacaaugccugcauagggucaaucagaaauggaacuuaugaccaugauguguacagagaugaagcauuaaacaaccgguuccagaucaaagguguugagcugaagucaggauauaaagauuggauccuauggauuuccuuugccauaucauguuuuuugcuuuguguugcuuuguugggguucaucaugugggccugccaaaaaggcaacauuaggugcaacauuugcauuuga

SEQ ID NO: 32529 - RNA, 1701 nt, Artificial Sequence; identical to SEQ ID NO: 32528
  derived and/or modified CDS sequence (wt) from hemagglutinin__InfluenzaA__ABC41952

SEQ ID NO: 32530 - RNA, 1701 nt, Artificial Sequence
  derived and/or modified CDS sequence (wt) from hemagglutinin__InfluenzaA__ABC41953
augaagacuaucauugcuuugagcuacauucuaugccugguuuucgcucaaaaacuucccggaaaugacaacagcacggcaacgcugugccuugggcaccaugcaguaccaaacggaacgauagugaaaacaaucacaaaugaccaaauugaaguuacuaaugcuacugagcugguucagaguuccucaacagguggaauaugcgacaguccucaucagauccuugauggagaaaacugcacacuaauagaugcucuauugggagacccucagugugauggcuuccaaaauaagaaaugggaccuuuuuguugaacgcagcaaagccuacagcaacuguuacccuuaugaugugccggaucaugccucccuuaggucacuaguugccucauccggcacacuggaguuuaacaaugaaagcuucgauuggacuggagucacucagaauggaacaagcucugcuugcaaaaggagaucuaauaaaaguuucuuuaguagauugaauugguugacccacuuaaaauacaaauacccagcauugaacgugacuaugccaaacaaugaaaaauuugacaaauuguacauuugggggguucaccacccggguacggacagugaccaaaucagccuauaugcucaagcaucaggaagaaucacagucucuaccaaaagaagccaacaaacuguaaucccgaauaucggaucuagacccaggguaagggaugucuccagccgaauaagcaucuauuggacaauaguaaaaccgggagacauacuuuugauuaacagcacagggaaucuaauugcuccucgggguuacuucaaaauacgaagugggaaaagcucaauaaugagaucagaugcacccauuggcaaaugcaauucugaaugcaucacuccaaauggaagcauucccaaugacaaaccauuucaaaauguaaacaggaucacauauggggccugucccagauauguuaagcaaaacacucugaaauuggcaacagggaugcgaaauguaccagagaaacaaacuagaggcauauuuggcgcaaucgcggguuucauagaaaaugguugggagggaaugguggacgguugguacgguuucaggcaucaaaauucugagggcacaggacaagcagcagaucucaaaagcacucaagcagcaaucaaccaaaucaaugggaaacugaauagguuaaucgggaaaacaaacgagaaauuccaucagauugaaaaagaauucucagaaguagaagggagaauucaggaccucgagaaauauguugaggacacuaaaauagaucucuggucauacaacgcggagcuucuuguugcccuggagaaccaacauacaauugaucuaacugacucagaaaugaacaaacuguuugaaagaacaaagaagcaacugagggaaaaugcugaggauaugggcaaugguuguuucaaaauauaccacaaaugugacaaugccuguauagggucaaucagaaauggaacuuaugaccaugauguguacagagaugaagcauuaaacaaccgguuccagaucaaagguguugagcugaagucaggauauaaagauuggauccuauggauuuccuuugccauaucauguuuuuugcuuuguguugcuuuguugggguucaucaugugggccugccaaaaaggcaacauuaggugcaacauuugcauuuga

SEQ ID NO: 32531 - RNA, 1701 nt, Artificial Sequence
  derived and/or modified CDS sequence (wt) from hemagglutinin__InfluenzaA__ABC41964
augaagacuaucauugcuuugagcuacauucuaugucugguuuucgcucaaaaacuucccggaaaugacaacagcacggcaacgcugugccuugggcaccaugcaguaccaaacggaacgauagugaaaacaaucacaaaugaccaaauugaaguuacuaaugcuacugagcugguucagaguuccucaacagguggaauaugcgacaguccucaucagauccuugauggagaaaacugcacacuaauagaugcucuauugggagacccucagugugauggcuuccaaaauaagaaaugggaccuuuuuguugaacgcagcaaagccuacagcaacuguuacccuuaugaugugccggaucaugccucccuuaggucacuaguugccucauccggcacacuggaguuuaacaaugaaagcuucgauuggacuggagucacucagaauggaacaagcucugcuugcaaaaggagaucuaauaaaaguuucuuuaguagauugaauugguugacccacuuaaaauacaaauacccagcauugaacgugacuaugccaaacaaugaaaaauuugacaaauuguacauuugggggguucaccacccggguacggacagugaccaaaucagccuauaugcucaagcaucaggaagaaucacagucucuaccaaaagaagccaacaaacuguaaucccgaauaucggaucuagacccaggguaagggaugucuccagccgaauaagcaucuauuggacaauaguaaaaccgggagacauacuuuugauuaacagcacagggaaucuaauugcuccucgggguuacuucaaaauacgaagugggaaaagcucaauaaugagaucagaugcacccauuggcaaaugcaauucugaaugcaucacuccaaauggaagcauucccaaugacaaaccauuucaaaauguaaacaggaucacauauggggccugucccagauauguuaagcaaaacacucugaaauuggcaacagggaugcgaaauguaccagagaaacaaacuagaggcauauuuggcgcaaucgcggguuucauagaaaaugguugggagggaaugguggacgguugguacgguuuuaggcaucaaaauucugagggcacaggacaagcagcagaucucaaaagcacucaagcagcaaucaaccaaaucaaugggaaacugaauagguuaaucgggaaaacaaacgagaaauuccaucagauugaaaaagaauucucagaaguagaagggagaauucaggaccucgagaaauauguugaggacacuaaaauagaucucuggucauacaacgcggagcuucuuguugcccuggagaaccaacauacaauugaucuaacugacucagaaaugaacaaacuguuugaaagaacaaagaagcaacugagggaaaaugcugaggauaugggcaaugguuguuucaaaauauaccacaaaugugacaaugccugcauagggucaaucagaaauggaacuuaugaccaugauguguacagagaugaagcauuaaacaaccgguuccagaucaaagguguugagcugaagucaggauauaaagauuggauccuauggauuuccuuugccauaucauguuuuuugcuuuguguugcuuuguugggguucaucaugugggccugccaaaaaggcaacauuaggugcaacauuugcauuuga

SEQ ID NO: 32532 - RNA, 1701 nt, Artificial Sequence
  derived and/or modified CDS sequence (wt) from hemagglutinin__InfluenzaA__ABC42014
augaagacuaucauugcuuugagcuacauucuaugucugguuuucgcucaaaaacuucccggaaaugacaacagcacggcaacgcugugccuugggcaccaugcaguaccaaacggaacgauagugaaaacaaucacaaaugaccaaauugaaguuacuaaugcuacugagcugguucagaguuccucaacagguggaauaugcgacaguccucaucagauccuugauggagaaaacugcacacuaauagaugcucuauugggagacccucagugugauggcuuccaaaauaagaaaugggaccuuuuuguugaacgcagcaaagccuacagcaacuguuacccuuaugaugugccggaucaugccucccuuaggucacuaguugccucauccggcacacuggaguuuaacaaugaaagcuucgauuggacuggagucacucagaauggaacaagcucugcuugcaaaaggagaucuaauaaaaguuucuuuaguagauugaauugguugacccacuuaaaauacaaauacccagcauugaacgugacuaugccaaacaaugaaaaauuugacaaauuguacauuugggggguucaccacccggguacggacagugaccaaaucagccuauaugcucaagcaucaggaagaaucacagucucuaccaaaagaagccaacaaacuguaaucccgaauaucggaucuagacccaggguaagggaugucuccagccgaauaagcaucuauuggacaauaguaaaaccgggagacauacuuuugauuaacagcacagggaaucuaauugcuccucgggguuacuucaaaauacgaagugggaaaagcucaauaaugagaucagaugcacccauuggcaaaugcaauucugaaugcaucacuccaaauggaagcauucccaaugacaaaccauuucaaaauguaaacaggaucacauauggggccugucccagauauguuaagcaaaacacucugaaauuggcaacagggaugcgaaauguaccagagaaacaaacuagaggcauauuuggcgcaaucgcggguuucauagaaaaugguugggagggaaugguggacgguugguacgguuucaggcaucaaaauucugagggcacaggacaagcagcagaucucaaaagcacucaagcagcaaucaaccaaaucaaugggaaacugaauagguuaaucgggaaaacaaacgagaaauuccaucagauugaaaaagaauucucagaaguagaagggagaauucaggaccucgagaaauauguugaggacacuaaaauagaucucuggucauacaacgcggagcuucuuguugcccuggagaaccaacauacaauugaucuaacugacucagaaaugaacaaacuguuugaaagaacaaagaagcaacugagggaaaaugcugaggauaugggcaaugguuguuucaaaauauaccacaaaugugacaaugccugcauagggucaaucagaaauggaacuuaugaccaugauguguacagagaugaagcauuaaacaaccgguuccagaucaaagguguugagcugaagucaggauauaaagauuggauccuauggauuuccuuugccauaucauguuuuuugcuuuguguugcuuuguugggguucaucaugugggccugccaaaaaggcaacauuaggugcaacauuugcauuuga

SEQ ID NO: 32533 - RNA, 1701 nt, Artificial Sequence; identical to SEQ ID NO: 32528
  derived and/or modified CDS sequence (wt) from hemagglutinin__InfluenzaA__ABC42114

SEQ ID NO: 32534 - RNA, 1701 nt, Artificial Sequence; identical to SEQ ID NO: 32532
  derived and/or modified CDS sequence (wt) from hemagglutinin__InfluenzaA__ABC42125

SEQ ID NO: 32535 - RNA, 1701 nt, Artificial Sequence; identical to SEQ ID NO: 32532
  derived and/or modified CDS sequence (wt) from hemagglutinin__InfluenzaA__ABC42136

SEQ ID NO: 32536 - RNA, 1701 nt, Artificial Sequence
  derived and/or modified CDS sequence (wt) from hemagglutinin__InfluenzaA__ABC42147
augaagacuaucauugcuuugagcuacauucuaugccugguuuucgcucaaaaacuucccggaaaugacaacagcacggcaacgcugugccuugggcaccaugcaguaccaaacggaacgauagugaaaacaaucacaaaugaccaaauugaaguuacuaaugcuacugagcugguucagaguuccucaacagguggaauaugcgacaguccucaucagauccuugauggagaaaacugcacacuaauagaugcucuauugggagacccucagugugauggcuuccaaaauaagaaaugggaccuuuuuguugaacgcagcaaagccuacagcaacuguuacccuuaugaugugccggaucaugccucccuuaggucacuaguugccucauccggcacacuggaguuuaacaaugaaagcuucgauuggacuggagucacucagaauggaacaagcucugcuugcaaaaggagaucuaauaaaaguuucuuuaguagauugaauugguugacccacuuaaaauacaaauacccagcauugaacgugacuaugccaaacaaugaaaaauuugacaaauuguacauuugggggguucaccacccggguacggacagugaccaaaucagccuauaugcucaagcaucaggaagaaucacagucucuaccaaaagaagccaacaaacuguaaucccgaauaucggauccagacccaggguaagggaugucuccagccgaauaagcaucuauuggacaauaguaaaaccgggagacauacuuuugauuaacagcacagggaaucuaauugcuccucgggguuauuucaaaauacgaagugggaaaagcucaauaaugagaucagauguacccauuggcaaaugcaauucugaaugcaucacuccaaauggaagcauucccaaugacaaaccauuucaaaauguaaacaggaucacauauggggccugucccagauauguuaagcaaaacacucugaaauuggcaacagggaugcgaaauguaccagagaaacaaacuagaggcauauuuggcgcaaucgcggguuucauagaaaaugguugggagggaaugguggacgguugguacgguuucaggcaucaaaauucugagggcacaggacaagcagcagaucucaaaagcacucaagcagcaaucaaccaaaucaaugggaaacugaauagguuaaucgggaaaacaaacgagaaauuccaucagauugaaaaagaauucucagaaguagaagggagaauucaggaccucgagaaauauguugaggacacuaaaauagaucucuggucauacaacgcggagcuucuuguugcccuggagaaccaacauacaauugaucuaacugacucagaaaugaacaaacuguuugaaagaacaaagaagcaacugagggaaaaugcugaggauauggguaaugguuguuucaaaauauaccacaaaugugacaaugccugcauagggucaaucagaaauggaacuuaugaccaugauguguacagagaugaagcauuaaacaaccgguuccagaucaaagguguugagcugaagucaggauauaaagauuggauccuauggauuuccuuugccauaucauguuuuuugcuuuguguugcuuuguugggguucaucaugugggccugccaaaaaggcaacauuaggugcaacauuugcauuuga

SEQ ID NO: 32537 - RNA, 1701 nt, Artificial Sequence; identical to SEQ ID NO: 32532
  derived and/or modified CDS sequence (wt) from hemagglutinin__InfluenzaA__ABC42158

SEQ ID NO: 32538 - RNA, 1701 nt, Artificial Sequence; identical to SEQ ID NO: 32532
  derived and/or modified CDS sequence (wt) from hemagglutinin__InfluenzaA__ABC42169

SEQ ID NO: 32539 - RNA, 1701 nt, Artificial Sequence; identical to SEQ ID NO: 32532
  derived and/or modified CDS sequence (wt) from hemagglutinin__InfluenzaA__ABC42180

SEQ ID NO: 32540 - RNA, 1701 nt, Artificial Sequence; identical to SEQ ID NO: 32532
  derived and/or modified CDS sequence (wt) from hemagglutinin__InfluenzaA__ABC42192

SEQ ID NO: 32541 - RNA, 1701 nt, Artificial Sequence; identical to SEQ ID NO: 32528
  derived and/or modified CDS sequence (wt) from hemagglutinin__InfluenzaA__ABC42307

SEQ ID NO: 32542 - RNA, 1701 nt, Artificial Sequence
  derived and/or modified CDS sequence (wt) from hemagglutinin__InfluenzaA__ABC42318
augaagacuaucauugcuuugagcuacauucuaugccugguuuucgcucaaaaacuucccggaaaugacaacagcacggcaacgcugugccuugggcaccaugcaguaccaaacggaacgauagugaaaacaaucacaaaugaccaaauugaaguuacuaaugcuacugagcugguucagaguuccucaacagguggaauaugcgacaguccucaucagauccuugauggagaaaacugcacacuaauagaugcucuauugggagacccucagugugauggcuuccaaaauaagaaaugggaccuuuuuguugaacgcagcaaagccuacagcaacuguuacccuuaugaugugccggaucaugccucccuuaggucacuaguugccucauccggcacacuggaguuuaacaaugaaagcuucgauuggacuggagucacucagaauggaacaagcucugcuugcaaaaggagaucuaauaaaaguuucuuuaguagauugaauugguugacccacuuaaaauacaaauacccagcauugaacgugacuaugccaaacaaugaaaaauuugacaaauuguacauuugggggguucaccacccggguacggacagugaccaaaucagccuauaugcucaagcaucaggaagaaucacagucucuaccaaaagaagccaacaaacuguaaucccgaauaucggaucuagacccaggguaagggaugucuccagccgaauaagcaucuauuggacaauaguaaaaccgggagacauacuuuugauuaacagcacagggaaucuaauugcuccucgggguuacuucaaaauacgaagugggaaaagcucaauaaugagaucagaugcgcccauuggcaaaugcaauucugaaugcaucacuccaaauggaagcauucccaaugacaaaccauuucaaaauguaaacaggaucacauauggggccugucccagauauguuaagcaaaacacucugaaauuggcaacagggaugcgaaauguaccagagaaacaaacuagaggcauauuuggcgcaaucgcggguuucauagaaaaugguugggagggaaugguggacgguugguacgguuucaggcaucaaaauucugagggcacaggacaagcagcagaucucaaaagcacucaagcagcaaucaaccaaaucaaugggaaacugaauagguuaaucgggaaaacaaacgagaaauuccaucagauugaaaaagaauucucagaaguagaagggagaauucaggaccucgagaaauauguugaggacacuaaaauagaucucuggucauacaacgcggaguuucuuguugcccuggagaaccaacauacaauugaucuaacugacucagaaaugaacaaacuguuugaaagaacaaagaagcaacugagggaaaaugcugaggauaugggcaaugguuguuucaaaauauaccacaaaugugacaaugccugcauagggucaaucagaaauggaacuuaugaccaugauguguacagagaugaagcauuaaacaaccgguuccagaucaaagguguugagcugaagucaggauauaaagauuggauccuauggauuuccuuugccauaucauguuuuuugcuuuguguugcuuuguugggguucaucaugugggccugccaaaaaggcaacauuaggugcaacauuugcauuuga

SEQ ID NO: 32543 - RNA, 1701 nt, Artificial Sequence; identical to SEQ ID NO: 32532
  derived and/or modified CDS sequence (wt) from hemagglutinin__InfluenzaA__ABC42346

SEQ ID NO: 32544 - RNA, 1701 nt, Artificial Sequence; identical to SEQ ID NO: 32532
  derived and/or modified CDS sequence (wt) from hemagglutinin__InfluenzaA__ABC42461

SEQ ID NO: 32545 - RNA, 1701 nt, Artificial Sequence; identical to SEQ ID NO: 32528
  derived and/or modified CDS sequence (wt) from hemagglutinin__InfluenzaA__ABC42494

SEQ ID NO: 32546 - RNA, 1701 nt, Artificial Sequence; identical to SEQ ID NO: 32532
  derived and/or modified CDS sequence (wt) from hemagglutinin__InfluenzaA__ABC42505

SEQ ID NO: 32547 - RNA, 1701 nt, Artificial Sequence
  derived and/or modified CDS sequence (wt) from hemagglutinin__InfluenzaA__ABC42516
augaagacuaucauugcuuugagcuacauucuaugucugguuuucgcucaaaaacuucccggaaaugacaacagcacggcaacgcugugccuugggcaccaugcaguaccaaacggaacgauagugaaaacaaucacaaaugaccaaauugaaguuacuaaugcuacugagcugguucagaguuccucaacagguggaauaugcgacaguccucaucagauccuugauggagaaaacugcacacuaauagaugcucuauugggagacccucagugugauggcuuccaaaauaagaaaugggaccuuuuuguugaacgcagcaaagccuacagcaacuguuacccuuaugaugugccggaucaugccucccuuaggucacuaguugccucauccggcacacuggaguuuaacaaugaaagcuucgauuggacuggagucacucagaauggaacaagcucugcuugcaaaaggagaucuaauaaaaguuucuuuaguagauugaauugguugacccacuuaaaauacaaauacccagcauugaacgugacuaugccaaacaaugaaaaauuugacaaauuguacauuugggggguucaccacccggguacggacagugaccaaaucagccuauaugcucaagcaucaggaagaaucacagucucuaccaaaagaagccaacaaacuguaaucccgaauaucggaucuagacccaggguaagggaugucuccagccgaauaagcaucuauuggacaauaguaaaaccgggagacauacuuuugauuaacagcacagggaaucuaauugcuccucgggguuacuucaaaauacgaagugggaaaagcucaauaaugagaucagaugcacccauuggcaaaugcaauucugaaugcaucacuccaaauggaagcauucccaaugacaaaccauuucaaaauguaaacaggaucacauauggggccugucccagauauguuaagcaaaacacucugaaauuggcaacagggaugcgaaauguaccagagaaacaaacuagaggcauauuuggcgcaaucgcggguuucauagaaaaugguugggagggaaugguggacgguugguacgguuucaggcaucaaaauucugagggcacaggacaagcagcagaucucaaaagcacucaagcagcaaucaaccaaaucaaugggaaacugaauaaguuaaucgggaaaacaaacgagaaauuccaucagauugaaaaagaauucucagaaguagaagggagaauucaggaccucgagaaauauguugaggacacuaaaauagaucucuggucauacaacgcggagcuucuuguugcccuggagaaccaacauacaauugaucuaacugacucagaaaugaacaaacuguuugaaagaacaaagaagcaacugagggaaaaugcugaggauaugggcaaugguuguuucaaaauauaccacaaaugugacaaugccugcauagggucaaucagaaauggaacuuaugaccaugauguguacagagaugaagcauuaaacaaccgguuccagaucaaagguguugagcugaagucaggauauaaagauuggauccuauggauuuccuuugccauaucauguuuuuugcuuuguguugcuuuguugggguucaucaugugggccugccaaaaaggcaacauuaggugcaacauuugcauuuga

SEQ ID NO: 32548 - RNA, 1701 nt, Artificial Sequence; identical to SEQ ID NO: 32528
  derived and/or modified CDS sequence (wt) from hemagglutinin__InfluenzaA__ABC42527

SEQ ID NO: 32549 - RNA, 1701 nt, Artificial Sequence; identical to SEQ ID NO: 32528
  derived and/or modified CDS sequence (wt) from hemagglutinin__InfluenzaA__ABC42574

SEQ ID NO: 32550 - RNA, 1701 nt, Artificial Sequence
  derived and/or modified CDS sequence (wt) from hemagglutinin__InfluenzaA__ABC42585
augaagacuaucauugcuuugagcuacauucuaugucugguuuucgcucaaaaacuucccggaaaugacaacagcacggcaacgcugugccuugggcaccaugcaguaccaaacggaacgauagugaaaacaaucacaaaugaccaaauugaaguuacuaaugcuacugagcugguucagaguuccucaacagguggaauaugcgacaguccucaucagauccuugauggagaaaacugcacacuaauagaugcucuauugggagacccucagugugauggcuuccaaaauaagaaaugggaccuuuuuguugaacgcagcaaagccuacagcaacuguuacccuuaugaugugccggaucaugccucccuuaggucacuaguugccucauccggcacacuggaguuuaacaaugaaagcuucgauuggacuggagucacucagaauggaacaagcucugcuugcaaaaggagaucuaauaaaaguuucuuuaguagauugaauugguugacccacuuaaaauacaaauacccagcauugaacgugacuaugccaaacaaugaaaaauuugacaaauuguacauuugggggguucaccacccggguacggacagugaccaaaucagccuauaugcucaagcaucaggaagaaucacagucucuaccaaaagaagccaacaaacuguaaucccgaauaucggaucuagacccaggguaagggaugucuccagccgaauaagcaucuauuggacaauaguaaaaccgggagacauacuuuugauuaacagcacagggaaucuaauugcuccucgggguuacuucaaaauacgaagugggaaaagcucaauaaugagaucagaugcacccauuggcaaaugcaauucugaaugcaucacuccaaauggaagcauucccaaugacaaaccauuucaaaauguaaacaggaucacauauggggccugucccagauauguuaagcaaaacacucugaaauuggcaacagggaugcgaaauguaccagagaaacaaacuagaggcauauuuggcgcaaucgcggguuucauagaaaaugguugggagggaaugguggacgguugguacgguuucaggcaucaaaauucugagggcacaggacaagcagcagaucucaaaagcacucaagcagcaaucaaccaaaucaaugggaaacugaauagguuaaucgggaaaacaaacgagaaauuccaucagauugaaaaagaauucucagaaguagaagggagaauucaggaccucgagaaauauguugaggacacuaaaauagaucucuggucauacaacgcggagcuucuuguugcccuggagaaccaacauacaauugaucuaacugacucagaaaugaacaaacuguuugaaagaacaaagaagcaacugagggaaaaugcugaggauaugggcaaugguuguuucaaaauauaccacaaaugugacaaugccugcauaggcucaaucagaaauggaacuuaugaccaugauguguacagagaugaagcauuaaacaaccgguuccagaucaaagguguugagcugaagucaggauauaaagauuggauccuauggauuuccuuugccauaucauguuuuuugcuuuguguugcuuuguugggguucaucaugugggccugccaaaaaggcaacauuaggugcaacauuugcauuuga

SEQ ID NO: 32551 - RNA, 1701 nt, Artificial Sequence; identical to SEQ ID NO: 32330
  derived and/or modified CDS sequence (wt) from hemagglutinin__InfluenzaA__ABC42596

SEQ ID NO: 32552 - RNA, 1701 nt, Artificial Sequence; identical to SEQ ID NO: 32334
  derived and/or modified CDS sequence (wt) from hemagglutinin__InfluenzaA__ABC42607

SEQ ID NO: 32553 - RNA, 1701 nt, Artificial Sequence; identical to SEQ ID NO: 32334
  derived and/or modified CDS sequence (wt) from hemagglutinin__InfluenzaA__ABC42618

SEQ ID NO: 32554 - RNA, 1701 nt, Artificial Sequence
  derived and/or modified CDS sequence (wt) from hemagglutinin__InfluenzaA__ABC42629
augaagacuaucauugcuuugagcuacauucuaugucugguuuucgcucaaaaacuucccggaaaugacaacagcacggcaacgcugugccuugggcaccaugcaguaccaaacggaacgauagugaaaacaaucacgaaugaccaaauugaaguuacuaaugcuacugagcugguucagaguuccucaacagguggaauaugcgacaguccucaucagauccuugauggagaaaacugcacacuaauagaugcucuauugggagacccucagugugauggcuuccaaaauaagaaaugggaccuuuuuguugaacgcagcaaagccuacagcaacuguuacccuuaugaugugccggaucaugccucccuuaggucacuaguugccucauccggcacacuggaguuuaacaacgaaagcuucaauuggacuggagucacucaaaauggaacaagcucugcuugcaaaaggagaucuaauaacaguuucuuuaguagauugaauugguugacccauuuaaaauucaaauacccagcauugaacgugacuaugccaaacaaugaaaaauuugacaaauuguacauuugggggguucaccacccggguacggacaaugaccaaaucagccuauaugcucaagcaucaggaagaaucacagucucuaccaaaagaagccaacaaacuguaaucccgaauaucggaucuagacccaggguaagggauauccccagcagaauaagcaucuauuggacaauaguaaaaccgggagacauacuuuugauuaacagcacagggaaucuaauugcuccucgggguuacuucaaaauacgaagugggaaaagcucaauaaugagaucagaugcacccauuggcaaaugcaauucugaaugcaucacuccaaauggaagcauucccaaugacaaaccauuucaaaauguaaacaggaucacauauggggccugucccagauauguuaagcaaaacacucugaaauuggcaacagggaugcgaaauguaccagagaaacaaacuagaggcauauuuggcgcaaucgcggguuucauagaaaaugguugggagggaaugguggaugguugguacgguuucaggcaucaaaauucugagggaacgggacaagcagcagaucucaaaagcacucaagcagcaaucaaccaaaucaaugggaagcugaauagguugaucgggaaaaccaacgagaaauuccaucagauugaaaaagaauucucagaaguagaagggagaauucaggaccucgagaaauauguugaggacacuaaaauagaucucuggucauacaacgcggagcuucuuguugcccuggagaaccaacauacaauugaucuaacugacucagaaaugaacaaacuguuugaaagaacaaagaagcaacugagggaaaaugcugaggauaugggcaaugguuguuucaaaauauaccacaaaugugacaaugccugcauagggucaaucagaaauggaacuuaugaccaugauguauacagagaugaagcauuaaacaaccgguuccagaucaaagguguugagcugaagucaggauacaaagauuggauccuauggauuuccuuugccauaucauguuuuuugcuuuguguugcuuuguugggguucaucaugugggccugccaaaaaggcaacauuaggugcaacauuugcauuuga

SEQ ID NO: 32555 - RNA, 1701 nt, Artificial Sequence
  derived and/or modified CDS sequence (wt) from hemagglutinin__InfluenzaA__ABC42640
augaagacuaucauugcuuugagcuacauucuaugucugguuuucgcucaaaaaauucccggaaaugacaacagcacggcaacgcugugccuugggcaccaugcaguaccaaacggaacgauagugaaaacaaucacgaaugaccaaauugaaguuacuaaugcuacugagcugguucagaguuccucaacagguggaauaugcgacaguccucaucagauccuugauggagaaaacugcacacuaauagaugcucuauugggagacccucagugugauggcuuccaaaauaagaaaugggaccuuuuuguugaacgcagcaaagccuacagcaacuguuacccuuaugaugugccggauuaugccucccuuaggucacuaguugccucauccggcacacuggaguuuaacaaugaaagcuucaauuggacuggagucacucaaaauggaacaagcucugcuugcaaaaggagaucuaauaacaguuucuuuaguagauugaauugguugacccauuuaaaauucaaauacccagcauugaacgugacuaugccaaacaaugaaaaauuugacaaauuguacauuugggggguucaccacccggguacggacaaugaccaaaucagccuauaugcucaagcaucaggaagaaucacagucucuaccaaaagaagccaacaaacuguaaucccgaauaucggaucuagacccaggguaagggauauccccagcagaauaagcaucuauuggacaauaguaaaaccgggagacauacuuuugauuaacagcacagggaaucuaauugcuccucgggguuacuucaaaauacgaagugggaaaagcucaauaaugagaucagaugcacccauuggcaaaugcaauucugaaugcaucacuccaaauggaagcauucccaaugacaaaccauuucaaaauguaaacaggaucacauauggggccugucccagauauguuaagcaaaacacucugaaauuggcaacagggaugcgaaauguaccagagaaacaaacuagaggcauauuuggcgcaaucgcggguuucauagaaaaugguugggagggaaugguggaugguugguacgguuucaggcaucaaaauucugagggaauaggacaagcagcagaucucaaaagcacucaagcagcaaucaaccaaaucaaugggaagcugaauagguugaucgggaaaaccaacgagaaauuccaucagauugaaaaagaauucucagaaguagaagggagaauucaggaccucgagaaauauguugaggacacuaaaauagaucucuggucauacaacgcggagcuucuuguugcccuggagaaccaacauacaauugaucuaacugacucagaaaugaacaaacuguuugaaagaacaaagaagcaacugagggaaaaugcugaggauaugggcaaugguuguuucaaaauauaccacaaaugugacaaugccugcauagggucaaucagaaauggaacuuaugaccaugauguauacagagaugaagcauuaaacaaccgguuccagaucaaagguguugagcugaagucaggauacaaagauuggauccuauggauuuccuuugccauaucauguuuuuugcuuuguguugcuuuguugggguucaucaugugggccugccaaaaaggcaacauuaggugcaacauuugcauuuga

SEQ ID NO: 32556 - RNA, 1701 nt, Artificial Sequence
  derived and/or modified CDS sequence (wt) from hemagglutinin__InfluenzaA__ABC42651
augaagacuaucauugcuuugagcuacauucuaugucugguuuucgcucaaaaacuucccggaaaugacaacagcacggcaacgcugugccuugggcaccaugcaguaccaaacggaacgauagugaaaacaaucacgaaugaccaaauugaaguuacuaaugcuacugagcugguucagaguuccucaacagguggaauaugcgacaguccucaucagauccuugauggagaaaacugcacacuaauagaugcucuauugggagacccucagugugauggcuuccaaaauaagaaaugggaccuuuuuguugaacgcagcaaagccuacagcaacuguuacccuuaugaugugccggauuaugccucccuuaggucacuaguugccucauccggcacacuggaguuuaacaaugaaagcuucaauuggacuggagucacucaaaauggaacaagcucugcuugcaaaaggagaucuaauaacaguuucuuuaguagauugaauugguugacccauuuaaaauucaaauacccagcauugaacgugacuaugccaaacaaugaaaaauuugacaaauuguacauuugggggguucaccacccggguacggacaaugaccaaaucagccuauaugcucaagcaucaggaagaaucacagucucuaccaaaagaagccaacaaacuguaaucccgaauaucggaucuagacccaggguaagggauauccccagcagaauaagcaucuauuggacaauaguaaaaccgggagacauacuuuugauuaacagcacagggaaucuaauugcuccucgggguuacuucaaaauacgaagugggaaaagcucaauaaugagaucagaugcacccauuggcaaaugcaauucugaaugcaucacuccaaauggaagcauucccaaugacaaaccauuucaaaauguaaacaggaucacauauggggccugucccagauauguuaagcaaaacacucugaaauuggcaacagggaugcgaaauguaccagagaaacaaacuagaggcauauuuggcgcaaucgcggguuucauagaaaaugguugggagggaaugguggaugguugguacgguuucaggcaucaaaauucugagggaauaggacaagcagcagaucucaaaagcacucaagcagcaaucaaccaaaucaaugggaagcugaauagguugaucgggaaaaccaacgagaaauuccaccagauugaaaaagaauucucagaaguagaagggagaauucaggaccucgagaaauauguugaggacacuaaaauagaucucuggucauacaacgcggagcuucuuguugcccuggagaaccaacauacaauugaucuaacugacucagaaaugaacaaacuguuugaaagaacaaagaagcaacugagggaaaaugcugaggauaugggcaaugguuguuucaaaauauaccacaaaugugacaaugccugcauagggucaaucagaaauggaacuuaugaccaugauguauacagagaugaagcauuaaacaaccgguuccagaucaaagguguugagcugaagucaggauacaaagauuggauccuauggauuuccuuugccauaucauguuuuuugcuuuguguugcuuuguugggguucaucaugugggccugccaaaaaggcaacauuaggugcaacauuugcauuuga

SEQ ID NO: 32557 - RNA, 1701 nt, Artificial Sequence
  derived and/or modified CDS sequence (wt) from hemagglutinin__InfluenzaA__ABC42662
augaagacuaucauugcuuugagcuacauucuaugucugguuuucgcucaaaaacuucccggaaaugacaacagcacggcaacgcugugccuugggcaccaugcaguaccaaacggaacgauagugaaaacaaucacgaaugaccaaauugaaguuacuaaugcuacugagcugguucagaguuccucaacagguggaauaugcgacaguccucaucagauccuugauggagaaaacugcacacuaauagaugcucuauugggagacccucagugugauggcuuccaaaauaagaaaugggaccuuuuuguugaacgcagcaaagccuacagcaacuguuacccuuaugaugugccggauuaugccucccuuaggucacuaguugccucauccggcacacuggaguuuaacaaugaaagcuucaauuggacuggagucacucaaaauggaacaagcucugcuugcaaaaggagaucuaauaacaguuucuuuaguagauugaauugguugacccauuuaaaauucaaauacccagcauugaacgugacuaugccaaacaaugaaaaauuugacaaauuguacauuugggggguucaccacccggguacggacaaugaccaaaucagccuauaugcucaagcaucaggaagaaucacagucucuaccaaaagaagccaacaaacuguaaucccgaauaucggaucuagacccaggguaagggauauccccagcagaauaagcaucuauuggacaauaguaaaaccgggagacauacuuuugauuaacagcacagggaaucuaauugcuccucgggguuacuucaaaauacgaagugggaaaagcucaauaaugagaucagaugcacccauuggcaaaugcaauucugaaugcaucacuccaaauggaagcauucccaaugacaaaccauuucaaaauguaaacaggaucacauauggggccugucccagauauguuaagcaaaacacucugaaauuggcaacagggaugcgaaauguaccagagaaacaaacuagaggcauauuuggcgcaaucgcggguuucauagaaaaugguugggagggaaugguggaugguugguacgguuucaggcaucaaaauucugagggaauaggacaagcagcagaucucaaaagcacucaagcagcaaucaaccaaaucaaugggaagcugaauagguugaucgggaaaaccaacgagaaauuccaucagauugaaaaagaauucucagaaguagaagggagaauucaggaccucgagaaauauguugaggacacuaaaauagaucucuggucauacaacgcggaguuucuuguugcccuggagaaccaacauacaauugaucuaacugacucagaaaugaacaaacuguuugaaagaacaaagaagcaacugagggaaaaugcugaggauaugggcaaugguuguuucaaaauauaccacaaaugugacaaugccugcauagggucaaucagaaauggaacuuaugaccaugauguauacagagaugaagcauuaaacaaccgguuccagaucaaagguguugagcugaagucaggauacaaagauuggauccuauggauuuccuuugccauaucauguuuuuugcuuuguguugcuuuguugggguucaucaugugggccugccaaaaaggcaacauuaggugcaacauuugcauuuga

SEQ ID NO: 32558 - RNA, 1701 nt, Artificial Sequence
  derived and/or modified CDS sequence (wt) from hemagglutinin__InfluenzaA__ABC42673
augaagacuaucauugcuuugagcuacauucuaugucugauuuucgcucaaaaacuucccggaaaugacaacagcacggcaacgcugugccuugggcaccaugcaguaccaaacggaacgauagugaaaacaaucacgaaugaccaaauugaaguuacuaaugcuacugagcugguucagaguuccucaacagguggaauaugcgacaguccucaucagauccuugauggagaaaacugcacacuaauagaugcucuauugggagacccucagugugauggcuuccaaaauaagaaaugggaccuuuuuguugaacgcagcaaagccuacagcaacuguuacccuuaugaugugccggauuaugccucccuuaggucacuaguugccucauccggcacacuggaguuuaacaaugaaagcuucaauuggacuggagucacucaaaauggaacaagcucugcuugcaaaaggagaucuaauaacaguuucuuuaguagauugaauugguugacccauuuaaaauucaaauacccagcauugaacgugacuaugccaaacaaugaaaaauuugacaaauuguacauuugggggguucaccacccggguacggacaaugaccaaaucagccuauaugcucaagcaucaggaagaaucacagucucuaccaaaagaagccaacaaacuguaaucccgaauaucggaucuagacccaggguaagggauauccccagcagaauaagcaucuauuggacaauaguaaaaccgggagacauacuuuugauuaacagcacagggaaucuaauugcuccucgggguuacuucaaaauacgaagugggaaaagcucaauaaugagaucagaugcacccauuggcaaaugcaauucugaaugcaucacuccaaauggaagcauucccaaugacaaaccauuucaaaauguaaacaggaucacauauggggccugucccagauauguuaagcaaaacacucugaaauuggcaacagggaugcgaaauguaccagagaaacaaacuagaggcauauuuggcgcaaucgcggguuucauagaaaaugguugggagggaaugguggaugguugguacgguuucaggcaucaaaauucugagggaauaggacaagcagcagaucucaaaagcacucaagcagcaaucaaccaaaucaaugggaagcugaauagguugaucgggaaaaccaacgagaaauuccaucagauugaaaaagaauucucagaaguagaagggagaauucaggaccucgagaaauauguugaggacacuaaaauagaucucuggucauacaacgcggagcuucuuguugcccuggagaaccaacauacaauugaucuaacugacucagaaaugaacaaacuguuugaaagaacaaagaagcaacugagggaaaaugcugaggauaugggcaaugguuguuucaaaauauaccacaaaugugacaaugccugcauagggucaaucagaaauggaacuuaugaccaugauguauacagagaugaagcauuaaacaaccgguuccagaucaaagguguugagcugaagucaggauacaaagauuggauccuauggauuuccuuugccauaucauguuuuuugcuuuguguugcuuuguugggguucaucaugugggccugccaaaaaggcaacauuaggugcaacauuugcauuuga

SEQ ID NO: 32559 - RNA, 1701 nt, Artificial Sequence; identical to SEQ ID NO: 32330
  derived and/or modified CDS sequence (wt) from hemagglutinin__InfluenzaA__ABC42684

SEQ ID NO: 32560 - RNA, 1701 nt, Artificial Sequence; identical to SEQ ID NO: 32330
  derived and/or modified CDS sequence (wt) from hemagglutinin__InfluenzaA__ABC42695

SEQ ID NO: 32561 - RNA, 1701 nt, Artificial Sequence
  derived and/or modified CDS sequence (wt) from hemagglutinin__InfluenzaA__ABC42706
augaagacuaucauugcuuugagcuacauucuaugucugguuuucgcucaaaaacuucccggaaaugacaacagcacggcaacgcugugccuugggcaccaugcaguaccaaacggaacgacagugaaaacaaucacgaaugaccaaauugaaguuacuaaugcuacugagcugguucagaguuccucaacagguggaauaugcgacaguccucaucagauccuugauggagaaaacugcacacuaauagaugcucuauugggagacccucagugugauggcuuccaaaauaagaaaugggaccuuuuuguugaacgcagcaaagccuacagcaacuguuacccuuaugaugugccggauuaugccucccuuaggucacuaguugccucauccggcacacuggaguuuaacaaugaaagcuucaauuggacuggagucacucaaaauggaacaagcucugcuugcaaaaggagaucuaauaacaguuucuuuaguagauugaauugguugacccauuuaaaauucaaauacccagcauugaacgugacuaugccaaacaaugaaaaauuugacaaauuguacauuugggggguucaccacccggguacggacaaugaccaaaucagccuauaugcucaagcaucaggaagaaucacagucucuaccaaaagaagccaacaaacuguaaucccgaauaucggaucuagacccaggguaagggauauccccagcagaauaagcaucuauuggacaauaguaaaaccgggagacauacuuuugauuaacagcacagggaaucuaauugcuccucgggguuacuucaaaauacgaagugggaaaagcucaauaaugagaucagaugcacccauuggcaaaugcaauucugaaugcaucacuccaaauggaagcauucccaaugacaaaccauuucaaaauguaaacaggaucacauauggggccugucccagauauguuaagcaaaacacucugaaauuggcaacagggaugcgaaauguaccagagaaacaaacuagaggcauauuuggcgcaaucgcggguuucauagaaaaugguugggagggaaugguggaugguugguacgguuucaggcaucaaaauucugagggaauaggacaagcagcagaucucaaaagcacucaagcagcaaucaaccaaaucaaugggaagcugaauagguugaucgggaaaaccaacgagaaauuccaucagauugaaaaagaauucucagaaguagaagggagaauucaggaccucgagaaauauguugaggacacuaaaauagaucucuggucauacaacgcggagcuucuuguugcccuggagaaccaacauacaauugaucuaacugacucagaaaugaacaaacuguuugaaagaacaaagaagcaacugagggaaaaugcugaggauaugggcaaugguuguuucaaaauauaccacaaaugugacaaugccugcauagggucaaucagaaauggaacuuaugaccaugauguauacagagaugaagcauuaaacaaccgguuccagaucaaagguguugagcugaagucaggauacaaagauuggauccuauggauuuccuuugccauaucauguuuuuugcuuuguguuguuuuguugggguucaucaugugggccugccaaaaaggcaacauuaggugcaacauuugcauuuga

SEQ ID NO: 32562 - RNA, 1701 nt, Artificial Sequence; identical to SEQ ID NO: 32330
  derived and/or modified CDS sequence (wt) from hemagglutinin__InfluenzaA__ABC42717

SEQ ID NO: 32563 - RNA, 1701 nt, Artificial Sequence
  derived and/or modified CDS sequence (wt) from hemagglutinin__InfluenzaA__ABC42728
augaagacuaucauugcuuugagcuacauucuaugucugguuuucgcucaaaaacuucccggaaaugacaacagcacggcaacgcugugccuugggcaccaugcaguaccaaacggaacgguagugaaaacaaucacaaaugaccaaauugaaguuacuaaugcuacugagcugguucagaguuccucaacagguggaauaugcgacaguccucaucagauccuugauggagaaaacugcacacuaauggaugcucuauugggagacccucagugugauggcuuccaaaauaagaaaugggaccuuuuuguugaacgcagcagagccuacagcaacuguuacccuuaugaugugccggauuaugccucccuuaggucacuaguugccucauccggcacacuggaguuuaacaaugaaagcuucaauuggacuggagucacucaaaauggaacaagcucugcuugcaaaaggagaucuaauaacaguuucuuuaguagauugaauugguugacccacuuaaaauucaaauacccagcauugaacgugacuaugccaaacaaugaaaaauuugacaaauuguacauuugggggguucaccacccggguacggacaaugaccaaaucagccuauaugcucaagcaucaggaagaaucacagucucuaccaaaagaagccaacaaacuguaaucccgaauaucggaucuagacccaggguaagggauauccccagcagaauaagcaucuauuggacaauaguaaaaccgggagacauacuuuugauuaacagcacagggaaucuaauugcuccucgggguuacuucaaaauacgaagugggaaaagcucaauaaugagaucagaugcacccauuggcaaaugcaauucugaaugcaucacuccaaauggaagcauucccaaugacaaaccauuucaaaauguaaacaggaucacauauggggccugucccagauauguuaagcaaaacacucugaaauuggcaacagggaugcgaaauguaccagagaaacaaacuagaggcauauuuggcgcaaucgcggguuucauagaaaaugguugggagggaaugguggaugguugguacgguuucaggcaucaaaauucugagggaacaggacaagcagcagaucucaaaagcacucaagcagcaaucaaccaaaucaaugggaagcugaauagguugaucgggaaaaccaacgagaaauuccaucagauugaaaaagaauucucagaaguagaagggagaauucaggaccucgagaaauauguugaggacacuaaaauagaucucuggucauacaacgcggagcuucuuguugcccuggagaaccaacauacaauugaucuaacugacucagaaaugaacaaacuguuugaaagaacaaaaaagcaacugagggaaaaugcugaggauaugggcaaugguuguuucaaaauauaccacaaaugugacaaugccugcauaggaucaaucagaaauggaacuuaugaccaugauguauacagagaugaagcauuaaacaaccgguuccagaucaaagguguugagcugaagucaggauacaaagauuggauccuauggauuuccuuugccauaucauguuuuuugcuuuguguuguuuuguugggguucaucaugugggccugccaaaaaggcaacauuaggugcaacauuugcauuuga

SEQ ID NO: 32564 - RNA, 1701 nt, Artificial Sequence
  derived and/or modified CDS sequence (wt) from hemagglutinin__InfluenzaA__ABC42739
augaagacuaucauugcuuugagcuacauucuaugucugguuuucgcucaaaaacuucccggaaaugacaacagcacggcaacgcugugccuugggcaccaugcaguaccaaacggaacgauagugaaaacaaucacgaaugaccaaauugaaguuacuaaugcuacugagcugguucagaguuccucaacagguggaauaugcgacaguccucaucagauccuugauggagaaaacugcacacuaauagaugcccuauugggagacccucagugugauggcuuccaaaauaagaaaugggaccuuuuuguugaacgcagcaaagccuacagcaacuguuacccuuaugaugugccggauuaugccucccuuaggucacuaguugccucauccggcacacuggaguuuaacaaugaaagcuucaauuggacuggagucacucaaaauggaacaagcucugcuugcaaaaggagaucuaauaacaguuucuuuaguagauugaauugguugacccauuuaaaauucaaauacccagcauugaacgugacuaugccaaacaaugaaaaauuugacaaauuguacauuugggggguucaccacccggguacggacaaugaccaaaucagccuauaugcucaagcaucaggaagaaucacagucucuaccaaaagaagccaacaaacuguaaucccgaauaucggaucuagacccaggguaagggauauccccagcagaauaagcaucuauuggacaauaguaaaaccgggagacauacuuuugauuaacagcacagggaaucuaauugcuccucgggguuacuucaagauacgaagugggaaaagcucaauaaugagaucagaugcacccauuggcaaaugcaauucugaaugcaucacuccaaauggaagcauucccaaugacaaaccauuucaaaauguaaacaggaucacauauggggccugucccagauauguuaagcaaaacacucugaaauuggcaacagggaugcgaaauguaccagagaaacaaacuagaggcauauuuggcgcaaucgcggguuucauagaaaaugguugggagggaaugguggaugguugguacgguuucaggcaucaaaauucugagggaauaggacaagcagcagaucucaaaagcacucaagcagcaaucaaccaaaucaaugggaagcugaauagguugaucgggaaaaccaacgagaaauuccaucagauugaaaaagaauucucagaaguagaagggagaauucaggaccucgagaaauauguugaggacacuaaaauagaucucuggucauacaacgcggagcuucuuguugcccuggagaaccaacauacaauugaucuaacugacucagaaaugaacaaacuguuugaaagaacaaagaagcaacugagggaaaaugcugaggauaugggcaaugguuguuucaaaauauaccacaaaugugacaaugccugcauagggucaaucagaaauggaacuuaugaccaugauguauacagagaugaagcauuaaacaaccgguuccagaucaaagguguugagcugaagucaggauacaaagauuggauccuauggauuuccuuugccauaucauguuuuuugcuuuguguugcuuuguugggguucaucaugugggccugccaaaaaggcaacauuaggugcaacauuugcauuuga

SEQ ID NO: 32565 - RNA, 1698 nt, Artificial Sequence
  derived and/or modified CDS sequence (wt) from hemagglutinin__InfluenzaA__ABC42750
augaaaguaaaacuacugguccuguuaugcacauuuacagcuacauaugcagacacaauauguauaggcuaccaugccaacaacucaaccgacacuguugacacaguacuugaaaagaaugugacagugacacacucugucaaccugcuugaggacagucacaauggaaaacuaugucuauuaaaaggaauagccccacuacaauuggguaauugcagcguugccggguggaucuuaggaaacccagaaugcgaauuacugauuuccaaggaaucaugguccuacauuguagaaaaaccaaauccugagaauggaacauguuacccagggcauuucgcugacuaugaggaacugagggagcaauugaguucaguaucuucauuugagagguucgaaauauuccccaaagaaagcucauggcccaaccacaccguaaccggaguaucagcaucaugcucccauaaugggaaaagcaguuuuuacaaaaauuugcuauggcugacggggaagaaugguuuguacccaaaccugagcaaguccuaugcaaacaacaaagagaaagaaguccuuguacuaugggguguucaucacccgccaaacauaggugaccaaaaggcccucuaucauacagaaaaugcuuaugucucuguagugucuucacauuauagcagaaaauucaccccagaaauagccaaaagacccaaaguaagagaucaagaaggaagaaucaacuacuacuggacucugcuugaacccggggauacaauaauauuugaggcaaauggaaaucuaauagcgccaagauaugcuuucgcacugaguagaggcuuuggaucaggaaucaucaacucaaaugcaccaauggaugaaugugaugcgaagugccaaacaccucagggagcuauaaacagcagucuuccuuuccagaauguacacccagucacaauaggagaguguccaaaguaugucaggagugcaaaauuaaggaugguuacaggacuaaggaacaucccauccauucaauccagagguuuguuuggagccauugccgguuucauugaagggggguggacuggaaugguagaugguugguaugguuaucaucaucagaaugagcaaggaucuggcuaugcugcagaucaaaaaagcacacaaaaugccauuaaugggauuacaaacaaggugaauucuguaauugagaaaaugaacacucaauucacagcugugggcaaagaauucaacaaauuggaaagaaggauggaaaacuuaaauaaaaaaguugaugauggguuuauagacauuuggacauauaaugcagaacuguugguucuacuggaaaaugaaaggacuuuggauuuccaugacuccaaugugaagaaucuguaugagaaaguaaaaagccaauuaaagaauaaugccaaagaaauaggaaauggguguuuugaauucuaucacaaguguaacgaugaaugcauggagaguguaaaaaauggaacuuaugacuauccaaaauauuccgaagaaucaaaguuaaacagggagaaaauugauggagugaaauuggaaucaaugggagucuaucagauucuggcgaucuacucaacagucgccaguucucugguucuuuuggucucccugggggcaaucagcuucuggauguguuccaaugggucuuugcaguguagaauaugcaucuaa

SEQ ID NO: 32566 - RNA, 1701 nt, Artificial Sequence
  derived and/or modified CDS sequence (wt) from hemagglutinin__InfluenzaA__ABC42761
augaagacuaucauugcuuugagcuacauucuaugucugguuuucgcucaaaaacuucccggaaaugacaacagcacggcaacgcugugccuugggcaccaugcaguaccaaacggaacgauagugaaaacaaucacgaaugaccaaauugaaguuacuaaugcuacugagcugguucagaguuccucaacagguggaauaugcgacaguccucaucagauccuugauggagaaaacugcacacuaauagaugcucuauugggagacccucagugugauggcuuccaaaauaagaaaugggaccuuuuuguugaacgcagcaaagccuacagcaacuguuacccuuaugaugugccggauuaugccucccuuaggucacuaguugccucauccggcacacuggaguuuaacaaugaaagcuucaauuggacuggagucacucaaaauggaacaagcucugcuugcaaaaggagaucuaauaacaguuucuuuaguagauugaauugguugacccauuuaaaauucaaauacccagcauugaacgugacuaugccaaacaaugaaaaauuugacaaauuguacauuugggggguucaccacccggguacggacaaugaccaaaucagccuauaugcucaagcaucaggaagaaucacagucucuaccaaaagaagccaacaaacuguaaucccgaauaucggaucuagacccaggguaagggauauccccagcagaauaagcaucuauuggacaauaguaaaaccgggagacauacuuuugauuaacagcacagggaaucuaauugcuccucgggguuacuucaaaauacgaagugggaaaagcucaauaaugagaucagaugcacccauuggcaaaugcaauucugaaugcaucacuccaaauggaagcauucccaaugacaaaccauuucaaaauguaaacaggaucacauauggggccugucccagauauguuaagcaaaacacucugaaauuggcaacagggaugcgaaauguaccagagaaacaaacuagaggcauauuuggcgcaaucgcggguuucauagaaaaugguugggagggaaugguggaugguugguacgguuucaggcaucaaaauucugagggaauaggacaagcagcagaucucaaaagcacucaagcagcaaucaaccaaaucaaugggaagcugaauagguugaucgggaaaaccaacgagaaauuccaucagauugaaaaagaauucucagaaguagaagggagaauucaggaccucgagaaauauguugaggacacuaaaauagaucucuggucauacaacgcggagcuucuuguugcccuggagaaccaacauaccauugaucuaacugacucagaaaugaacaaacuguuugaaagaacaaagaagcaacugagggaaaaugcugaggauaugggcaaugguuguuucaaaauauaccacaaaugugacaaugccugcauagggucaaucagaaauggaacuuaugaccaugauguauacagagaugaagcauuaaacaaccgguuccagaucaaagguguugagcugaagucaggauacaaagauuggauccuauggauuuccuuugccauaucauguuuuuugcuuuguguugcuuuguugggguucaucaugugggccugccaaaaaggcaacauuaggugcaacauuugcauuuga

SEQ ID NO: 32567 - RNA, 1701 nt, Artificial Sequence
  derived and/or modified CDS sequence (wt) from hemagglutinin__InfluenzaA__ABC42772
augaagacuaucauugcuuugagcuacauucuaugucugguuuucgcucaaaaacuucccggaaaugacaacagcacggcaacgcugugccuugggcaccaugcaguaccaaacggaacgauagugaaaacaaucacgaaugaccaaauugaaguuacuaaugcuacugagcugguucagaguuccucaacagguggaauaugcgacaguccucaucagauccuugauggagaaaacugcacacuaauagaugcucuauugggagacccucagugugauggcuuccaaaauaagaaaugggaccuuuuuguugaacgcagcaaagccuacagcaacuguuacccuuaugaugugccggauuaugccucccuuaggucacuaguugccucauccggcacacuggaauuuaacaaugaaagcuucaauuggacuggagucacucaaaauggaacaagcucugcuugcaaaaggagaucuaauaacaguuucuuuaguagauugaauugguugacccauuuaaaauucaaauacccagcauugaacgugacuaugccaaacaaugaaaaauuugacaaauuguacauuugggggguucaccacccggguacggacaaugaccaaaucagccuauaugcucaagcaucaggaagaaucacagucucuaccaaaagaagccaacaaacuguaaucccgaauaucggaucuagacccaggguaagggauauccccagcagaauaagcaucuauuggacaauaguaaaaccgggagacauacuuuugauuaacagcacagggaaucuaauugcuccucgggguuacuucaaaauacgaagugggaaaagcucaauaaugagaucagaugcacccauuggcaaaugcaauucugaaugcaucaccccaaauggaagcauucccaaugacaaaccauuucaaaauguaaacaggaucacauauggggccugucccagauauguuaagcaaaacacucugaaauuggcaacagggaugcgaaauguaccagagaaacaaacuagaggcauauuuggcgcaaucgcggguuucauagaaaaugguugggagggaaugguggaugguugguacgguuucaggcaucaaaauucugagggaauaggacaagcagcagaucucaaaagcacucaagcagcaaucaaccaaaucaaugggaagcugaauagguugaucgggaaaaccaacgagaaauuccaucagauugaaaaagaauucucagaaguagaagggagaauucaggaccucgagaaauauguugaggacacuaaaauagaucucuggucauacaacgcggagcuucuuguugcccuggagaaccaacauacaauugaucuaacugacucagaaaugaacaaacuguuugaaagaacaaagaagcaacugagggaaaaugcugaggauaugggcaaugguuguuucaaaauauaccacaaaugugacaaugccugcauagggucaaucagaaauggaacuuaugaccaugauguauacagagaugaagcauuaaacaaccgguuccagaucaaaaguguugagcugaagucaggauacaaagauuggauccuauggauuuccuuugccauaucauguuuuuugcuuuguguugcuuuguugggguucaucaugugggccugccaaaaaggcaacauuaggugcaacauuugcauuuga

SEQ ID NO: 32568 - RNA, 1701 nt, Artificial Sequence; identical to SEQ ID NO: 32330
  derived and/or modified CDS sequence (wt) from hemagglutinin__InfluenzaA__ABC42783

SEQ ID NO: 32569 - RNA, 1701 nt, Artificial Sequence; identical to SEQ ID NO: 32330
  derived and/or modified CDS sequence (wt) from hemagglutinin__InfluenzaA__ABC42794

SEQ ID NO: 32570 - RNA, 1701 nt, Artificial Sequence; identical to SEQ ID NO: 32330
  derived and/or modified CDS sequence (wt) from hemagglutinin__InfluenzaA__ABC42805

SEQ ID NO: 32571 - RNA, 1701 nt, Artificial Sequence; identical to SEQ ID NO: 32334
  derived and/or modified CDS sequence (wt) from hemagglutinin__InfluenzaA__ABC42816

SEQ ID NO: 32572 - RNA, 1701 nt, Artificial Sequence
  derived and/or modified CDS sequence (wt) from hemagglutinin__InfluenzaA__ABC42827
augaagacuaucauugcuuugagcuacauucuaugucugguuuucgcucaaaaacuucccggaaaugacaacagcacggcaacgcugugccuugggcaccaugcaguaccaaacggaacgauagugaaaacaaucacgaaugaccaaauugaaguuacuaaugcuacugagcugguucagaguuccucaacagguggaauaugcgacaguccucaucagauccuugauggagaaaacugcacacuaauagaugcucuauugggagacccucagugugauggcuuccaaaauaagaaaugggaccuuuuuguugaacgcagcaaagccuacagcaacuguuacccuuaugaugugccggauuaugccucccuuaggucacuaguugccucauccggcacacuggaguuuaacaaugaaagcuucaauuggacuggagucacucaaaauggaacaagcucugcuugcaaaaggagaucuaauaacaguuucuuuaguagauugaauugguugacccauuuaaaauucaaauacccagcauugaacgugacuaugccaaacaaugaaaaauuugacaaauuguacauuugggggguucaccacccggguacggacaaugaccaaaucagccuauaugcucaagcaucaggaagaaucacagucucuaccaaaagaagccaacaaacuguaaucccgaauaucggaucuagacccaggguaagggauauccccagcagaaugagcaucuauuggacaauaguaaaaccgggagacauacuuuugauuaacagcacagggaaucuaauugcuccucgggguuacuucaaaauacgaagugggaaaagcucaauaaugagaucagaugcacccauuggcaaaugcaauucugaaugcaucacuccaaauggaagcauucccaaugacaaaccauuucaaaauguaaacaggaucacauauggggccugucccagauauguuaagcaaaacacucugaaauuggcaacagggaugcgaaauguaccagagaaacaaacuagaggcauauuuggcgcaaucgcggguuucauagaaaaugguugggagggaaugguggaugguugguacgguuucaggcaucaaaauucugagggaauaggacaagcagcagaucucaaaagcacucaagcagcaaucaaccaaaucaaugggaagcugaauagguugaucgggaaaaccaacgagaaauuccaucagauugaaaaagaauucucagaaguagaagggagaauucaggaccucgagaaauauguugaggacacuaaaauagaucucuggucauacaacgcggagcuucuuguugcccuggagaaccaacauacaauugaucuaacugacucagaaaugaacaaacuguuugaaagaacaaagaagcaacugagggaaaaugcugaggauaugggcaaugguuguuucaaaauauaccacaaaugugacaaugccugcauagggucaaucagaaauggaacuuaugaccaugauguauacagagaugaagcauuaaacaaccgguuccagaucaaagguguugagcugaagucaggauacaaagauuggauccuauggauuuccuuugccauaucauguuuuuugcuuuguguugcuuuguugggguucaucaugugggccugccaaaaaggcaacauuaggugcaacauuugcauuuga

SEQ ID NO: 32573 - RNA, 1701 nt, Artificial Sequence
  derived and/or modified CDS sequence (wt) from hemagglutinin__InfluenzaA__ABC42849
augaagacuaucauugcuuugagcuacauucuaugucugguuuucgcucaaaaacuucccggaaaugacaacagcacggcaacgcugugccuugggcaccaugcaguaccaaacggaacgauagugaaaacaaucacgaaugaccaaauugaaguuacuaaugcuacugagcugguucagaguuccucaacagguggaauaugcgacaguccucaucagauccuugauggagaaaacugcacacuaauagaugcucuauugggagacccucagugugauggcuuccaaaauaagaaaugggaccuuuuuguugaacgcagcaaagccuacagcaacuguuacccuuaugaugugccggauuaugccucccuuaggucacuaguugccucauccggcacacuggaguuuaacaaugaaagcuucaauuggacuggagucacucaaaauggaacaagcucugcuugcaaaaggagaucuaauaacaguuucuuuaguagauugaauugguugacccauuuaaaauucaaauacccagcauugaacgugacuaugccaaacaaugaaaaauuugacaaauuguacauuugggggguucaccacccggguacggacaaugaccaaaucagccuauaugcucaagcaucaggaagaaucacagucucuaccaaaagaagccaacaaacuguaaucccgaauaucggaucuagacccaggguaagggauauccccagcagaauaagcaucuauuggacaauagugaaaccgggagacauacuuuugauuaacagcacagggaaucuaauugcuccucgggguuacuucaaaauacgaagugggaaaagcucaauaaugagaucagaugcacccauuggcaaaugcaauucugaaugcaucacuccaaauggaagcauucccaaugacaaaccauuucaaaauguaaacaggaucacauauggggccugucccagauauguuaagcaaaacacucugaaauuggcaacagggaugcgaaauguaccagagaaacaaacuagaggcauauuuggcgcaaucgcggguuucauagaaaaugguugggagggaaugguggaugguugguacgguuucaggcaucaaaauucugagggaauaggacaagcagcagaucucaaaagcacucaagcagcaaucaaccaaaucaaugggaagcugaauagguugaucgggaaaaccaacgagaaauuccaucagauugaaaaagaauucucagaaguagaagggagaauucaggaccucgagaaauauguugaggacacuaaaauagaucucuggucauacaacgcggagcuucuuguugcccuggagaaccaacauacaauugaucuaacugacucagaaaugaacaaacuguuugaaagaacaaagaagcaacugagggaaaaugcugaggauaugggcaaugguuguuucaaaauauaccacaaaugugacaaugccugcauagggucaaucagaaauggaacuuaugaccaugauguauacagagaugaagcauuaaacaaccgguuccagaucaaagguguugagcugaagucaggauacaaagauuggauccuauggauuuccuuugccauaucauguuuuuugcuuuguguugcuuuguugggguucaucaugugggccugccaaaaaggcaacauuaggugcaacauuugcauuuga

SEQ ID NO: 32574 - RNA, 1701 nt, Artificial Sequence
  derived and/or modified CDS sequence (wt) from hemagglutinin__InfluenzaA__ABC42882
augaagacuaucauugcuuugagcuacauuuuaugccugguuuucgcucaaaaacuucccggaaaugacaacagcacggcaacgcugugucuggggcaucaugcagugccaaacggaacgcuagugaaaacaaucacgaaugaccaaauugaaguaacuaaugcuacugagcugguucagaguuccucaacagguagaauaugcgacaguccucaccaaauccuugauggagaaaacugcacacuaauagaugcucuauugggagacccucauugugauggcuuccaaaauaaggaaugggaccuuuuuguugaacgcagcaaagccuacagcaacuguuacccuuaugaugugccggauuaugucucccuuaggucacuaguugccucaucaggcacgcuggaguuuaacaaugaaagcuucaauuggacuggagucgcucagaauggaacaagcucugcuugcaaaaggagaucugauaaaaguuucuuuaguagauugaauugguugcaccaauuaaaauacaaauauccagcacugaacgugacuaugccaaacaaugaaaaauuugacaaauuguacauuugggggguucaccacccggguacagacagugaccaaaucagccuauaugcucaagcaucggggagagucacagucucuaccaaaagaagccaacaaacuguaaucccgaauaucggaucuagacccuggguaaggggugucuccagcagaauaagcaucuauuggacaauaguaaaaccgggagacauacuuuugauuaacagcacagggaaucuaauugcuccucgggguuacuucaaaauacgaagugggaaaagcucaauaaugaggucagaugcacccauuggcaaaugcaauucugaaugcaucacuccaaauggaagcauucccaaugacaaaccauuucaaaauguaaacaggaucacauauggggccugucccagauauguuaagcaaaacacucugaaauuggcaacagggaugcggaaugugccagagaaacaaacuagaggcauauucggugcaaucgcgggcuucauagaaaaugguugggagggaaugauggacgguugguacgguuucaggcaucaaaauucugagggcacagggcaagcagcagaucuuaaaagcacucaagcagcaaucaaccaaaucaacgggaaacugaauagguuaaucgagaaaacgaacgagaaauuccaucaaauugaaaaagaauucucagaaguagaagggagaauucaggaccucgagaaauauguugaggacacuaaaauagaucucuggucguacaaugcggagcuucuuguugcccuggagaaccaacauacaauugaucuaacugacucagaaaugaacaaacuguuugaaagaacaaagaagcaacugagggaaaaugcugaggauaugggcaaugguuguuucaaaauauaccacaaaugugacaaugccugcauagggucaaucagaaauggaacuuaugaccaugauguauacagagacgaagcauugaacaaccgguuccagaucaaagguguugagcugaagucaggauacaaagauuggguccuauggauuuccuuugccauaucauguuuuuugcuuuguauuguuuugcugggguucaucaugugggccugccaaaaaggcaacauuaggugcaacauuugcauuuga

SEQ ID NO: 32575 - RNA, 1701 nt, Artificial Sequence; identical to SEQ ID NO: 32574
  derived and/or modified CDS sequence (wt) from hemagglutinin__InfluenzaA__ABC42893

SEQ ID NO: 32576 - RNA, 1701 nt, Artificial Sequence
  derived and/or modified CDS sequence (wt) from hemagglutinin__InfluenzaA__ABC42929
augaagacuaucauugcuuugagcuacauucuaugccugguuuucgcucaaaaacuucccggaaaugacaacagcacggcaacgcugugccuugggcaccaugcaguaccaaacggaacgauagugaaaacaaucacaaaugaccaaauugaaguuacuaaugcuacugagcugguucagaguuccucaacagguggaauaugcgacaguccucaucagauccuugauggagaaaacugcacacuaauagaugcucuauugggagacccucagugugauggcuuccaaaauaagaaaugggaccuuuuuguugaacgcagcaaagccuacagcaacuguuacccuuaugaugugccggaucaugccucccuuaggucacuaguugccucauccggcacacuggaguuuaacaaugaaagcuucgauuggacuggagucacucagaauggaacaagcucugcuugcaaaaggagaucuaauaaaaguuucuuuaguagauugaauugguugacccacuuaaaauacaaauacccagcauugaacgugacuaugccaaacaaugaaaaauuugacaaauuguacauuugggggguucaccacccggguacggacagugaccaaaucagccuauaugcucaagcaucaggaagaaucacagucucuaccaaaagaagccaacaaacuguaaucccgaauaucggaucuagacccaggguaagggaugucuccagccgaauaagcaucuauuggacaauaguaaaaccgggagacauacuuuugauuaacagcacagggaaucuaauugcuccucgggguuacuucaaaauacgaagugggaaaagcucaauaaugagaucagaugcacccauuggcaaaugcaauucugaaugcaucacuccaaauggaagcauucccaaugacaaaccauuucaaaauguaaacaggaucacauauggggccugucccagauauguuaagcaaaacacucugaaauuggcaacagggaugcgaaauguaccagagaaacaaacuagaggcauauuuggcgcaaucgcggguuucauagaaaaugguugggagggaaugguggacgguugguacgguuucaggcaucaaaauucugagggcacaggacaagcagcagaucucaaaagcacucaagcagcaaucaaccaaaucaaugggaaacugaauagguuaaucgggaaaacaaacgagaaauuccaucagauugaaaaagaauucucagaaguagaagggagaauucaggaccucgagaaauauguugaggacacuaaaauagaucucuggucauacaacgcggagcuucuuguugcccuggagaaccaacauacaauugaucuaacugacucagaaaugaacaaacuguuugaaagaacaaagaaacaacugagggaaaaugcugaggauaugggcaaugguuguuucaaaauauaccacaaaugugacaaugccugcauagggucaaucagaaauggaacuuaugaccaugauguguacagagaugaagcauuaaacaaccgguuccagaucaaagguguugagcugaagucaggauauaaagauuggauccuauggauuuccuuugccauaucauguuuuuugcuuuguguugcuuuguugggguucaucaugugggccugccaaaaaggcaacauuaggugcaacauuugcauuuga

SEQ ID NO: 32577 - RNA, 1701 nt, Artificial Sequence; identical to SEQ ID NO: 32532
  derived and/or modified CDS sequence (wt) from hemagglutinin__InfluenzaA__ABC42940

SEQ ID NO: 32578 - RNA, 1701 nt, Artificial Sequence; identical to SEQ ID NO: 32532
  derived and/or modified CDS sequence (wt) from hemagglutinin__InfluenzaA__ABC42951

SEQ ID NO: 32579 - RNA, 1701 nt, Artificial Sequence; identical to SEQ ID NO: 32532
  derived and/or modified CDS sequence (wt) from hemagglutinin__InfluenzaA__ABC42962

SEQ ID NO: 32580 - RNA, 1701 nt, Artificial Sequence; identical to SEQ ID NO: 32528
  derived and/or modified CDS sequence (wt) from hemagglutinin__InfluenzaA__ABC42973

SEQ ID NO: 32581 - RNA, 1701 nt, Artificial Sequence
  derived and/or modified CDS sequence (wt) from hemagglutinin__InfluenzaA__ABC42995
augaagacuaucauugcuuugagcuacauucuaugucugguuuucgcucaaaaacuucccggaaaugacaacagcacggcaacgcugugccuugggcaccaugcaguaccaaacggaacgauagugaaaacaaucacaaaugaccaaauugaaguuacuaaugcuacugagcugguucagaguuccucaacagguggaauaugcgacaguccucaucagauucuugauggagaaaacugcacacuaauagaugcucuauugggagacccucagugugauggcuuccaaaauaagaaaugggaccuuuuuguugaacgcagcaaagccuacagcaacuguuacccuuaugaugugccggaucaugccucccuuaggucacuaguugccucauccggcacacuggaguuuaacaaugaaagcuucgauuggacuggagucacucagaauggaacaagcucugcuugcaaaaggagaucuaauaaaaguuucuuuaguagauugaauugguugacccacuuaaaauacaaauacccagcauugaacgugacuaugccaaacaaugaaaaauuugacaaauuguacauuugggggguucaccacccggguacggacagugaccaaaucagccuauaugcucaagcaucaggaagaaucacagucucuaccaaaagaagccaacaaacuguaaucccgaauaucggaucuagacccaggguaagggaugucuccagccgaauaagcaucuauuggacaauaguaaaaccgggagacauacuuuugauuaacagcacagggaaucuaauugcuccucgggguuacuucaaaauacgaagugggaaaagcucaauaaugagaucagaugcacccauuggcaaaugcaauucugaaugcaucacuccaaauggaagcauucccaaugacaaaccauuucaaaauguaaacaggaucacauauggggccugucccagauauguuaagcaaaacacucugaaauuggcaacagggaugcgaaauguaccagagaaacaaacuagaggcauauuuggcgcaaucgcggguuucauagaaaaugguugggagggaaugguggacgguugguacgguuucaggcaucaaaauucugagggcacaggacaagcagcagaucucaaaagcacucaagcagcaaucaaccaaaucaaugggaaacugaauagguuaaucgggaaaacaaacgagaaauuccaucagauugaaaaagaauucucagaaguagaagggagaauucaggaccucgagaaauauguugaggacacuaaaauagaucucuggucauacaacgcggagcuucuuguugcccuggagaaccaacauacaauugaucuaacugacucagaaaugaacaaacuguuugaaagaacaaagaagcaacugagggaaaaugcugaggauaugggcaaugguuguuucaaaauauaccacaaaugugacaaugccugcauagggucaaucagaaauggaacuuaugaccaugauguguacagagaugaagcauuaaacaaccgguuccagaucaaagguguugagcugaagucaggauauaaagauuggauccuauggauuuccuuugccauaucauguuuuuugcuuuguguugcuuuguugggguucaucaugugggccugccaaaaaggcaacauuaggugcaacauuugcauuuga

SEQ ID NO: 32582 - RNA, 1701 nt, Artificial Sequence
  derived and/or modified CDS sequence (wt) from hemagglutinin__InfluenzaA__ABC43006
augaagacuaucauugcuuugagcuacauucuaugucugguuuucgcucaaaaacuucccggaaaugacaacagcacggcaacgcugugccuugggcaccaugcaguaccaaacggaacgauagugaaaacaaucacaaaugaccaaauugaaguuacuaaugcuacugagcugguucagaguuccucaacagguggaauaugcgacaguccucaucagauccuugauggagaaaacugcacacuaauagaugcucuauugggagacccucagugugauggcuuccaaaauaagaaaugggaccuuuuuguugaacgcagcaaagccuacagcaacuguuacccuuaugaugugccggaucaugccucccuuaggucacuaguugccucauccggcacacuggaguuuaacaaugaaagcuucgauuggacuggagucacucagaauggaacaagcucugcuugcaaaaggagaucuaauaaaaguuucuuuaguagauugaauugguugacccacuuaaaauacaaauacccagcauugaacgugacuaugccaaacaaugaaaaauuugacaaauuguacauuugggggguucaccacccggguacggacagugaccaaaucagccuauaugcucaagcaucaggaagaaucacagucucuaccaaaagaagccaacaaacuguaaucccgaauaucggaucuagacccaggguaagggaugucuccagccgaauaagcaucuauuggacaauaguaaaaccgggagacauacuuuugauuaacagcacagggaaucuaauugcuccucgggguuacuucaaaauacgaagugggaaaagcucaauaaugagaucagaugcacccauuggcaaaugcaauucugaaugcaucacuccaaauggaagcauuccaaaugacaaaccauuucaaaauguaaacaggaucacauauggggccugccccagauauguuaagcaaaacacucugaaauuggcaacagggaugcgaaauguaccagagaaacaaacuagaggcauauuuggcgcaaucgcggguuucauagaaaaugguugggagggaaugguggacgguugguacgguuucaggcaucaaaauucugagggcacaggacaagcagcagaucucaaaagcacucaagcagcaaucaaccaaaucaaugggaaacugaauagguuaaucgggaaaacaaacgagaaauuccaucagauugaaaaagaauucucagaaguagaagggagaauucaggaccucgagaaauauguugaggacacuaaaauagaucucuggucauacaacgcggagcuucuuguugcccuggagaaccaacauacaauugaucuaacugacucagaaaugaacaaacuguuugaaagaacaaagaagcaacugagggaaaaugcugaggauaugggcaaugguuguuucaaaauauaccacaaaugugacaaugccugcauagggucaaucagaaauggaacuuaugaccaugauguguacagagaugaagcauuaaacaaccgguuccagaucaaagguguugagcugaagucaggauauaaagauuggauccuauggauuuccuuugccauaucauguuuuuugcuuuguguugcuuuguugggguucaucaugugggccugccaaaaaggcaacauuaggugcaacauuugcauuuga

SEQ ID NO: 32583 - RNA, 1701 nt, Artificial Sequence
  derived and/or modified CDS sequence (wt) from hemagglutinin__InfluenzaA__ABC43028
augaagacuaucauugcuuugagcuacauucuaugucugguuuucgcucaaaaacuucccggaaaugacaacagcacggcaacgcugugccuugggcaccaugcaguaccaaacggaacgauagugaaaacaaucacaaaugaccaaauugaaguuacuaaugcuacugagcugguucagaguuccucaacagguggaauaugcgacaguccucaucagauccuugauggagaaaacugcacacuaauagaugcucuauugggagacccucagugugauggcuuccaaaauaagaaaugggaccuuuuuguugaacgcagcaaagccuacagcaacuguuacccuuaugaugugccggaucaugccucccuuaggucacuaguugccucauccggcacacuggaguuuaacaaugaaagcuucgauuggacuggagucacucagaauggaacaagcucugcuugcaaaaggagaucuaauaaaaguuucuuuaguagauugaauugguugacccacuuaaaauacaaauacccagcauugaacgugacuaugccaaacaaugaaaaauuugacaaauuguacauuugggggguucaccacccggguacggacagugaccaaaucagccuauaugcucaagcaucaggaagaaucacagucucuaccaaaagaagucaacaaacuguaaucccgaauaucggaucuagacccaggguaagggaugucuccagccgaauaagcaucuauuggacaauaguaaaaccgggagacauacuuuugauuaacagcacagggaaucuaauugcuccucgggguuacuucaaaauacgaagugggaaaagcucaauaaugagaucagaugcacccauuggcaaaugcaauucugaaugcaucacuccaaauggaagcauucccaaugacaaaccauuucaaaauguaaacaggaucacauauggggccugucccagauauguuaagcaaaacacucugaaauuggcaacagggaugcgaaauguaccagagaaacaaacuagaggcauauuuggcgcaaucgcggguuucauagaaaaugguugggagggaaugguggacgguugguacgguuucaggcaucaaaauucugagggcacaggacaagcagcagaucucaaaagcacucaagcagcaaucaaccaaaucaaugggaaacugaauagguuaaucgggaaaacaaacgagaaauuccaucagauugaaaaagaauucucagaaguagaagggagaauucaggaccucgagaaauauguugaggacacuaaaauagaucucuggucauacaacgcggagcuucuuguugcccuggagaaccaacauacaauugaucuaacugacucagaaaugaacaaacuguuugaaagaacaaagaagcaacugagggaaaaugcugaggauaugggcaaugguuguuucaaaauauaccacaaaugugacaaugccugcauagggucaaucagaaauggaacuuaugaccaugauguguacagagaugaagcauuaaacaaccgguuccagaucaaagguguugagcugaagucaggauauaaagauuggauccuauggauuuccuuugccauaucauguuuuuugcuuuguguugcuuuguugggguucaucaugugggccugccaaaaaggcaacauuaggugcaacauuugcauuuga

SEQ ID NO: 32584 - RNA, 1701 nt, Artificial Sequence; identical to SEQ ID NO: 32532
  derived and/or modified CDS sequence (wt) from hemagglutinin__InfluenzaA__ABC43039

SEQ ID NO: 32585 - RNA, 1701 nt, Artificial Sequence
  derived and/or modified CDS sequence (wt) from hemagglutinin__InfluenzaA__ABC43050
augaagacuaucauugcuuugagcuacauucuaugucugguuuucgcucaaaaacuucccggaaaugacaacagcacggcaacgcugugccuugggcaccaugcaguaccaaacggaacgauagugaaaacaaucacaaaugaccaaauugaaguuacuaaugcuacugagcugguucagaguuccucaacagguggaauaugcgacaguccucaucagauccuugauggagaaaacugcacacuaauagaugcucuauugggagacccucagugugauggcuuccaaaauaagaaaugggaccuuuuuguugaacgcagcaaagccuacagcaacuguuacccuuaugaugugccggaucaugccucccuuaggucacuaguugccucauccggcacacuggaguuuaacaaugaaagcuucgauuggacuggagucacucagaauggaacaagcucugcuugcaaaaggagaucuaauaaaaguuucuuuaguagauugaauugguugacccacuuaaaauacaaauacccagcauugaacgugacuaugccaaacaaugaaaaauuugacaaauuguacauuugggggguucaccacccggguacggacagugaccaaaucagccuauaugcucaagcaucaggaagaaucacagucucuaccaaaagaagccaacaaacuguaaucccgaauaucggaucuagacccaggguaagggaugucuccagccgaauaagcaucuauuggacaauaguaaaaccaggagacauacuuuugauuaacagcacagggaaucuaauugcuccucgggguuacuucaaaauacgaagugggaaaagcucaauaaugagaucagaugcacccauuggcaaaugcaauucugaaugcaucacuccaaauggaagcauucccaaugacaaaccauuucaaaauguaaacaggaucacauauggggccugucccagauauguuaagcaaaacacucugaaauuggcaacagggaugcgaaauguaccagagaaacaaacuagaggcauauuuggcgcaaucgcggguuucauagaaaaugguugggagggaaugguggacgguugguacgguuucaggcaucaaaauucugagggcacaggacaagcagcagaucucaaaagcacucaagcagcaaucaaccaaaucaaugggaaacugaauagguuaaucgggaaaacaaacgagaaauuccaucagauugaaaaagaauucucagaaguagaagggagaauucaggaccucgagaaauauguugaggacacuaaaauagaucucuggucauacaacgcggagcuucuuguugcccuggagaaccaacauacaauugaucuaacugacucagaaaugaacaaacuguuugaaagaacaaagaagcaacugagggaaaaugcugaggauaugggcaaugguuguuucaaaauauaccacaaaugugacaaugccugcauagggucaaucagaaauggaacuuaugaccaugauguguacagagaugaagcauuaaacaaccgguuccagaucaaagguguugagcugaagucaggauauaaagauuggauccuauggauuuccuuugccauaucauguuuuuugcuuuguguugcuuuguugggguucaucaugugggccugccaaaaaggcaacauuaggugcaacauuugcauuuga

SEQ ID NO: 32586 - RNA, 1701 nt, Artificial Sequence; identical to SEQ ID NO: 32532
  derived and/or modified CDS sequence (wt) from hemagglutinin__InfluenzaA__ABC43061

SEQ ID NO: 32587 - RNA, 1701 nt, Artificial Sequence
  derived and/or modified CDS sequence (wt) from hemagglutinin__InfluenzaA__ABC43072
augaagacuaucauugcuuugagcuacauucuaugucugguuuucgcucaaaaacuucccggaaaugacaacagcacggcaacgcugugccuugggcaccaugcaguaccaaacggaacgauagugaaaacaaucacaaaugaccaaauugaaguuacuaaugcuacugagcugguucagaguuccucaacagguggaauaugcgacaguccucaucagauccuugauggagaaaacugcacacuaauagaugcucuauugggagacccucagugugauggcuuccaaaauaagaaaugggaccuuuuuguugaacgcagcaaagccuacagcaacuguuacccuuaugaugugccggaucaugccucccuuaggucacuaguugccucauccggcacacuggaguuuaacaaugaaagcuucgauuggacuggagucacucagaauggaacaagcucugcuugcaaaaggagaucuaauaaaaguuucuuuaguagauugaauugguugacccacuuaaaauacaaauacccagcauugaacgugacuaugccaaacaaugaaaaauuugacaaauuguacauuugggggguucaccacccggguacggacagugaccaaaucagccuauaugcucaagcaucaggaagaaucacagucucuaccaaaagaagccaacaaacuguaaucccgaauaucggaucuagacccaggguaagggaugucuccagccgaauaagcaucuauuggacaauaguaaaaccgggagacauacuuuugauuaacagcacagggaaucuaauugcuccucgggguuacuucaaaauacgaagugggaaaagcucaauaaugagaucagaugcacccauuggcaaaugcaauucugaaugcaucacuccaaauggaagcauucccaaugacaaaccauuucaaaauguaaacaggaucacauauggggccugucccagauauguuaagcaaaacacucugaaauuggcaacagggaugcgaaauguaccagagaaacaaacuagaggcauauuuggcgcaaucgcggguuucauagaaaaugguugggagggaaugguggacgguugguacgguuucaggcaucaaaauucugagggcacaggacaagcagcagaucucaaaagcacucaagcagcaaucaaccaaaucaaugggaaacugaauagguuaaucgggaaaacaaacgagaaauuccaucagauugaaaaagaauucucagaaguagaagggagaauucaggaccucgagaaauauguugaggacacuaaaauagaucucuggucauacaacgcggagcuucuuguugcccuggagaaccaacauacaauugaucuaacugacucagaaaugaacaaacuguuugaaaaaacaaagaagcaacugagggaaaaugcugaggauaugggcaaugguuguuucaaaauauaccacaaaugugacaaugccugcauaggcucaaucagaaauggaacuuaugaccaugauguguacagagaugaagcauuaaacaaccgguuccagaucaaagguguugagcugaagucaggauauaaagauuggauccuauggauuuccuuuaccauaucauguuuuuugcuuuguguugcuuuguugggguucaucaugugggccugccaaaaaggcaacauuaggugcaacauuugcauuuga

SEQ ID NO: 32588 - RNA, 1701 nt, Artificial Sequence; identical to SEQ ID NO: 32528
  derived and/or modified CDS sequence (wt) from hemagglutinin__InfluenzaA__ABC43083

SEQ ID NO: 32589 - RNA, 1701 nt, Artificial Sequence
  derived and/or modified CDS sequence (wt) from hemagglutinin__InfluenzaA__ABC43094
augaagacuaucauugcuuugagcuacauucuaugucugguuuucgcucaaaaacuucccggaaaugacaacagcacggcaacgcugugccuugggcaccaugcaguaccaaacggaacgauagugaaaacaaucacaaaugaccaaauugaaguuacuaaugcuacugaguugguucagaguuccucaacagguggaauaugcgacaguccucaucagauccuugauggagaaaacugcacacuaauagaugcucuauugggagacccucagugugauggcuuccaaaauaagaaaugggaccuuuuuguugaacgcagcaaagccuacagcaacuguuacccuuaugaugugccggaucaugccucccuuaggucacuaguugccucauccggcacacuggaguuuaacaaugaaagcuucgauuggacuggagucacucagaauggaacaagcucugcuugcaaaaggagaucuaauaaaaguuucuuuaguagauugaauugguugacccacuuaaaauacaaauacccagcauugaacgugacuaugccaaacaaugaaaaauuugacaaauuguacauuugggggguucaccacccggguacggacagugaccaaaucagccuauaugcucaagcaucaggaagaaucacagucucuaccaaaagaagccaacaaacuguaaucccgaauaucggaucuagacccaggguaagggaugucuccagccgaauaagcaucuauuggacaauaguaaaaccgggagacauacuuuugauuaacagcacagggaaucuaauugcuccucgggguuacuucaaaauacgaagugggaaaagcucaauaaugagaucagaugcacccauuggcaaaugcaauucugaaugcaucacuccaaauggaagcauucccaaugacaaaccauuucaaaauguaaacaggaucacauauggggccugucccagauauguuaagcaaaacacucugaaauuggcaacagggaugcgaaauguaccagagaaacaaacuagaggcauauuuggcgcaaucgcggguuucauagaaaaugguugggagggaaugguggacgguugguacgguuucaggcaucaaaauucugagggcacaggacaagcagcagaucucaaaagcacucaagcagcaaucaaccaaaucaaugggaaacugaauagguuaaucgggaaaacaaacgagaaauuccaucagauugaaaaagaauucucagaaguagaagggagaauucaggaccucgagaaauauguugaggacacuaaaauagaucucuggucauacaacgcggagcuucuuguugcccuggagaaccaacauacaauugaucuaacugacucagaaaugaacaaacuguuugaaagaacaaagaagcaacugagggaaaaugcugaggauaugggcaaugguuguuucaaaauauaccacaaaugugacaaugccugcauagggucaaucagaaauggaacuuaugaccaugauguguacagagaugaagcauuaaacaaccgguuccagaucaaagguguugagcugaagucaggauauaaagauuggauccuauggauuuccuuugccauaucauguuuuuugcuuuguguugcuuuguugggguucaucaugugggccugccaaaaaggcaacauuaggugcaacauuugcauuuga

SEQ ID NO: 32590 - RNA, 1701 nt, Artificial Sequence; identical to SEQ ID NO: 32582
  derived and/or modified CDS sequence (wt) from hemagglutinin__InfluenzaA__ABC43116

SEQ ID NO: 32591 - RNA, 1701 nt, Artificial Sequence; identical to SEQ ID NO: 32330
  derived and/or modified CDS sequence (wt) from hemagglutinin__InfluenzaA__ABC43127

SEQ ID NO: 32592 - RNA, 1701 nt, Artificial Sequence
  derived and/or modified CDS sequence (wt) from hemagglutinin__InfluenzaA__ABC43138
augaagacuaucauugcuuugagcuacauucuaugucugguuuucgcucaaaaacuucccggaaaugacaacagcacggcaacacugugccuugggcaccaugcaguaccaaacggaacgauagugaaaacaaucacgaaugaccaaauugaaguuacuaaugcuacugagcugguucagaguuccucaacagguggaauaugcgacaguccucaucagauccuugauggagaaaacugcacacuaauagaugcucuauugggagacccucagugugauggcuuccaaaauaagaaaugggaccuuuuuguugaacgcagcaaagccuacagcaacuguuacccuuaugaugugccggauuaugccucccuuaggucacuaguugccucauccggcacacuggaguuuaacaaugaaagcuucaauuggacuggagucacucaaaauggaacaagcucugcuugcaaaaggagaucuaauaacaguuucuuuaguagauugaauugguugacccauuuaaaauucaaauacccagcauugaacgugacuaugccaaacaaugaaaaauuugacaaauuguacauuugggggguucaccacccggguacgaacaaugaccaaaucagccuauaugcucaagcaucaggaagaaucacagucucuaccaaaagaagccaacaaacuguaaucccgaauaucggaucuagacccaggguaagggauauccccagcagaauaagcaucuauuggacaauaguaaaaccgggagacauacuuuugauuaacagcacagggaaucuaauugcuccucgggguuacuucaaaauacgaagugggaaaagcucaauaaugagaucagaugcacccauuggcaaaugcaauucugaaugcaucacuccaaauggaagcauucccaaugacaaaccauuccaaaauguaaacaggaucacauauggggccugucccagauauguuaagcaaaacacucugaaauuggcaacagggaugcgaaauguaccagagaaacaaacuagaggaauauuuggcgcaaucgcggguuucauagaaaaugguugggagggaaugguggaugguugguacgguuucaggcaucaaaauucugagggaauaggacaagcagcagaucucaaaagcacucaagcagcaaucaaccaaaucaaugggaagcugaauagguugaucgggaaaaccaacgagaaauuccaucagauugaaaaagaauucucagaaguagaagggagaauucaggaccucgagaaauauguugaggacacuaaaauagaucucuggucauacaacgcggagcuucuuguugcccuggagaaccaacauacaauugaucuaacugacucagaaaugaacaaacuguuugaaagaacaaagaagcaacugagggaaaaugcugaggauaugggcaaugguuguuucaaaauauaccacaaaugugacaaugccugcauagggucaaucagaaauggaacuuaugaccaugauguguacagagaugaagcauuaaacaaccgguuccagaucaaagguguugagcugaagucaggauacaaagauuggauccuauggauuuccuuugccauaucauguuuuuugcuuuguguugcuuuguugggguucaucaugugggccugccaaaaaggcaacauuaggugcaacauuugcauuuga

SEQ ID NO: 32593 - RNA, 1701 nt, Artificial Sequence; identical to SEQ ID NO: 32330
  derived and/or modified CDS sequence (wt) from hemagglutinin__InfluenzaA__ABC43149

SEQ ID NO: 32594 - RNA, 1701 nt, Artificial Sequence; identical to SEQ ID NO: 32330
  derived and/or modified CDS sequence (wt) from hemagglutinin__InfluenzaA__ABC43160

SEQ ID NO: 32595 - RNA, 1701 nt, Artificial Sequence; identical to SEQ ID NO: 32330
  derived and/or modified CDS sequence (wt) from hemagglutinin__InfluenzaA__ABC43171

SEQ ID NO: 32596 - RNA, 1701 nt, Artificial Sequence; identical to SEQ ID NO: 32330
  derived and/or modified CDS sequence (wt) from hemagglutinin__InfluenzaA__ABC43182

SEQ ID NO: 32597 - RNA, 1701 nt, Artificial Sequence
  derived and/or modified CDS sequence (wt) from hemagglutinin__InfluenzaA__ABC43475
augaagacuaucauugcuuugagcuacauucuaugucugguuuucgcucaaaaacuucccggaaaugacaacagcacggcaacgcugugccuugggcaccaugcaguaccaaacggaacgacagugaaaacaaucacgaaugaccaaauugaaguuacuaaugcuacugagcugguucagaguuccucaacagguggaauaugcgacaguccucaucagauccuugauggagaaaacugcacacuaauagaugcucuauugggagacccucagugugauggcuuccaaaauaagaaaugggaccuuuuuguugaacgcagcaaagccuacagcaacuguuacccuuaugaugugccggauuaugccucccuuaggucacuaguugccucauccggcacacuggaguuuaacaaugaaagcuucaauuggacuggagucacucaaaauggaacaagcucugcuugcaaaaggagaucuaauaacaguuucuuuaguagauugaauugguugacccauuuaaaauucaaauacccagcauugaacgugacuaugccaaacaaugaaaaauuugacaaauuguacauuugggggguucaccacccggguacggacaaugaccaaaucagccuauaugcucaagcaucaggaagaaucacagucucuaccaaaagaagccaacaaacuguaaucccgaauaucggaucuagacccaggguaagggauauccccagcagaauaagcaucuauuggacaauaguaaaaccgggagacauacuuuugauuaacagcacagggaaucuaauugcuccucgggguuacuucaaaauacgaagugggaaaagcucaauaaugagaucagaugcacccauuggcaaaugcaauucugaaugcaucacuccaaauggaagcauucccaaugacaaaccauuucaaaauguaaacaggaucacauauggggccugucccagauauguuaagcaaaacacucugaaauuggcaacagggaugcgaaauguaccagagaaacaaacuagaggcauauuuggcgcaaucgcggguuucauagaaaaugguugggagggaaugguggaugguugguacgguuucaggcaucaaaauucugagggaauaggacaagcagcagaucucaaaagcacucaagcagcaaucaaccaaaucaaugggaagcugaauagguugaucgggaaaaccaacgagaaauuccaucagauugaaaaagaauucucagaaguagaagggagaauucaggaccucgagaaauauguugaggacacuaaaauagaucucuggucauacaacgcggagcuucuuguugcccuggagaaccaacauacaauugaucuaacugacucagaaaugaacaaacuguuugaaagaacaaagaagcaacugagggaaaaugcugaggauaugggcaaugguuguuucaaaauauaccacaaaugugacaaugccugcauagggucaaucagaaauggaacuuaugaccaugauguauacagagaugaagcauuaaacaaccgguuccagaucaaagguguugagcugaagucaggauacaaagauuggauccuauggauuuccuuugccauaucauguuuuuugcuuuguguugcuuuguugggguucaucaugugggccugccaaaaaggcaacauuaggugcaacauuugcauuuga

SEQ ID NO: 32598 - RNA, 1701 nt, Artificial Sequence; identical to SEQ ID NO: 32330
  derived and/or modified CDS sequence (wt) from hemagglutinin__InfluenzaA__ABC43486

SEQ ID NO: 32599 - RNA, 1701 nt, Artificial Sequence; identical to SEQ ID NO: 32330
  derived and/or modified CDS sequence (wt) from hemagglutinin__InfluenzaA__ABC43497

SEQ ID NO: 32600 - RNA, 1701 nt, Artificial Sequence
  derived and/or modified CDS sequence (wt) from hemagglutinin__InfluenzaA__ABC43508
augaagacuaucauugcuuugagcuacauucuaugucugguuuucgcucaaaaacuucccggaaaugacaacagcacggcaacgcugugccuugggcaccaugcaguaccaaacggaacgauagugaaaacaaucacgaaugaccaaauugaaguuacuaaugcuacugagcugguucagaguuccucaacagguggaauaugcgacaguccucaucagauccuugauggagaaaacugcacacuaauagaugcucuauugggagacccucagugugauggcuuccaaaauaagaaaugggaccuuuuuguugaacgcagcaaagccuacagcaacuguuacccuuaugaugugccggauuaugccucccuuaggucacuaguugccucauccggcacacuggaguuuaacaaugaaagcuucaauuggacuggagucacucaaaauggaacaagcucugcuugcaaaaggagaucuaauaacaguuucuuuaguagauugaauugguugacccauuuaaaauucaaauacccagcauugaacgugacuaugccaaacaaugaaaaauuugacaaauuguacauuugggggguucaccacccggguacgaacaaugaccaaaucagccuauaugcucaagcaucaggaagaaucacagucucuaccaaaagaagccaacaaacuguaaucccgaauaucggaucuagacccaggguaagggauauccccagcagaauaagcaucuauuggacaauaguaaaaccgggagacauacuuuugauuaacagcacagggaaucuaauugcuccucgggguuacuucaaaauacgaagugggaaaagcucaauaaugagaucagaugcacccauuggcaaaugcaauucugaaugcaucacuccaaauggaagcauucccaaugacaaaccauuucaaaauguaaacaggaucacauauggggccugucccagauauguuaagcaaaacacucugaaauuggcaacagggaugcgaaauguaccagagaaacaaacuagaggcauauuuggcgcaaucgcggguuucauagaaaaugguugggagggaaugguggaugguugguacgguuucaggcaucaaaauucugagggaauaggacaagcagcagaucucaaaagcacucaagcagcaaucaaccaaaucaaugggaagcugaauagguugaucgggaaaaccaacgagaaauuccaucagauugaaaaagaauucucagaaguagaagggagaauucaggaccucgagaaauauguugaggacacuaaaauagaucucuggucauacaaugcggagcuucuuguugcccuggagaaccaacauacaauugaucuaacugacucagaaaugaacaaacuguuugaaagaacaaagaagcaacugagggaaaaugcugaggauaugggcaaugguuguuucaaaauauaccacaaaugugacaaugccugcauagggucaaucagaaauggaacuuaugaccaugauguauacagagaugaagcauuaaacaaccgguuccagaucaaagguguugagcugaagucaggauacaaagauuggauccuauggauuuccuuugccauaucauguuuuuugcuuuguguugcuuuguugggguucaucaugugggccugccaaaaaggcaacauuaggugcaacauuugcauuuga

SEQ ID NO: 32601 - RNA, 1701 nt, Artificial Sequence; identical to SEQ ID NO: 32334
  derived and/or modified CDS sequence (wt) from hemagglutinin__InfluenzaA__ABC43519

SEQ ID NO: 32602 - RNA, 1701 nt, Artificial Sequence; identical to SEQ ID NO: 32332
  derived and/or modified CDS sequence (wt) from hemagglutinin__InfluenzaA__ABC43530

SEQ ID NO: 32603 - RNA, 1701 nt, Artificial Sequence
  derived and/or modified CDS sequence (wt) from hemagglutinin__InfluenzaA__ABC43552
augaagacuaucauugcuuugagcuacauucuaugucugguuuucgcucaaaaacuucccggaaaugacaacagcacggcaacgcugugccuugggcaccaugcaguaccaaacggaacgauagugaaaacaaucacgaaugaccaaauugaaguuacuaaugcuacugagcugguucagaguucaucaacagguggaauaugcgacaguccucaucagauccuugauggagaaaacugcacacuaauagaugcucuauugggagacccucagugugauggcuuccaaaauaagaaaugggaccuuuuuguugaacgcagcaaagccuacagcaacuguuacccuuaugaugugccggauuaugccucccuuaggucacuaguugccucauccggcacacuggaguuuaacaaugaaagcuucaauuggacuggagucacucaaaauggaacaagcucugcuugcaaaaggagaucuaauaacaguuucuuuaguagauugaauugguugacccacuuaaaauucaaauacccagcauugaacgugacuaugccaaacaaugaaaaauuugacaaauuguacauuugggggguucaccacccggguacggacaaugaccaaaucagccuauaugcucaagcaccaggaagaaucacagucuccaccaaaagaagccaacaaacuguaaucccgaauaucggaucuagacccaggguaagggauauccccagcagaauaagcaucuauuggacaauaguaaaaccgggagacauacuuuugauuaacagcacagggaaucuaauugcuccucgggguuacuucaaaauacgaagugggaaaagcucaauaaugagaucagaugcacccauuggcaaaugcaauucugaaugcaucacuccaaauggaagcauucccaaugacaaaccauuucaaaauguaaacaggaucacauauggggccugucccagauauguuaagcaaaacacucugaaauuggcaacagggaugcgaaauguaccagagaaacaaacuagaggcauauuuggcgcaaucgcggguuucauagaaaaugguugggagggaaugguggaugguugguacgguuucaggcaucaaaauucugagggaauaggacaagcagcagaucucaaaagcacucaagcagcaaucaaccaaaucaaugggaagcugaauagguugaucgggaaaaccaacgagaaauuccaucagauugaaaaagaauucucagaaguagaagggagaauucaggaccuugagaaauauguugaggacacuaaaauagaucucuggucauacaacgcggagcuucuuguugcccuggagaaccaacauacaauugaucuaacugacucagaaaugaacaaacuguuugaaagaacaaagaagcaacugagggaaaaugcugaggauaugggcaaugguuguuucaaaauauaccacaaaugugacaaugccugcauagggucaaucagaaauggaacuuaugaccaugauguauacagagaugaagcauuaaacaaccgguuccagaucaaagguguugagcugaagucaggauacaaagauuggauccuauggauuuccuuugccauaucauguuuuuugcuuuguguugcuuuguugggguucaucaugugggccugccaaaaaggcaacauuaggugcaacauuugcauuuga

SEQ ID NO: 32604 - RNA, 1701 nt, Artificial Sequence
  derived and/or modified CDS sequence (wt) from hemagglutinin__InfluenzaA__ABC46554
augaagacuaucauugcuuugagcuacauuuucugucagguuuucgcccaaaaccuuccaggaaaugacaacagcacagcaacgcugugccugggacaucaugcagugccaaacggaacgcuagugaaaacaaucacgaaugaucagauugaagugacuaaugcuacugagcugguucagaguuccucaacagguagaauaugcgacaguccucaucgaauccuugauggaaaaaacugcacacugauagaugcucuauugggggacccucauugugauggcuuucaaaaugagaaaugggaccuuuuuguugaacgcagcaaagcuuucagcaacuguuacccuuaugaugugccagauuaugccucccuuaggucacuaguugccucgucaggcacccuggaguuuaucaaugaaggcuucaauuggacuggggucacucaggaugggggaagcuaugcuugcaaaaggggaccugauaacaguuucuucaguagacugaacugguuguacaaaucagaaagcacauauccagugcugaacgugacuaugccaaacaaugacaauuuugacaaacuguacauuugggggguucaccacccgagcacggacaaagaacaaaccaaccuauauguucaagcaucagggagagucacagucuccaccaagagaagccagcaaacuauaaucccgaaugucgggucuagacccuggguaaggggucugucuaguagaauaagcaucuauuggacaauaguaaaaccgggagacauacuguuaauuaauaguaaugggaaccuaauugcuccucgggguuacuucaaaauacgcacugggaaaagcucaauaaugagaucagaugcacccauuggcaccugcaguucugaaugcaucacuccaaauggaagcauucccaaugacaagcccuuucaaaacguaaacaagaucacauauggggcaugucccaaguauguuaagcaaaacacucugaaguuggcaacagggaugcggaauguaccagagaaacaaacuagaggcauauucggcgcaauagcagguuucauagaaaaugguugggagggaaugauagacgguugguacgguuucaggcaucaaaauucugagggcacaggacaagcagcagaucuuaaaagcacucaagcagccaucgaccaaaucaaugggaaacugaauagggugaucgagaaaacaaacgagaaauuccaucaaaucgaaaaggaauucucagaaguagaagggagaauucaggaccucgagaaauacguugaagacacuaaaauagaucucuggucuuacaaugcggagcuucuugucgcucuggagaaccaacauacaauugaucugacugacucggaaaugaacaaacuguuugaaaaaacaaggaggcaacuaagggaaaaugcugaggacaugggcaauggcugcuucaaaauauaccacaaaugugacaaugcuugcauagggucaaucagaaauggaacuuaugaccaugauguauacagggacgaagcauuaaacaaccgguuucagaucaaagguguugagcugaagucaggauacaaagacuggauccuguggauuuccuuugccauaucaugcuuuuugcuuuguguuguuuugcugggguucaucaugugggccugccaaaaaggcaacauuaggugcaacauuugcauuuga

SEQ ID NO: 32605 - RNA, 1701 nt, Artificial Sequence
  derived and/or modified CDS sequence (wt) from hemagglutinin__InfluenzaA__ABC46576
augaagacuaucauugcuuugagcuacauuuucugucugguuuucgcccaaaaccuucccggaaaugacaaaagcacagcaacgcugugccugggacaccaugcagugccaaacggaacgcuagugaaaacaaucacgaaugaucagauugaagugacuaaugcuacugagcugguucagaguuccucaacagguagaauaugcgacaguccucaccgaauccuugaugggaaaaacugcacacugguagaugcucuauugggagacccucauugugauggcuuucagaaugagaaaugggaccuuuuuguugaacgcagcaaagcuuucagcaacuguuacccuuaugaugugccagauuaugccucccuuaggucacuaguugccucgucaggcacccuggaguuuaucaaugaaagcuucaauuggacuggagucacucagagugggggaagcuaugcuugcaaaaggggaucugacaacaguuucuucaguagacugaauugguuguacgaaucagaaagcaaauauccagugcugaacgugacuaugccaaacaauggcaauuuugacaaacuguacauuugggggguucaccacccgagcacggacaaagaacaaaccaaccuauauguucgagcaucagggagagucacagucucuaccaagagaagccagcaaacuauaaucccgaauaucgggucuagacccuggguaaggggucugucuagcagaauaagcaucuauuggacaauaguaaaaccgggagacauacuguuaauuaauaguaaugggaaccuaauugcuccucgggguuacuucaaaauacgcacugggaaaagcucaauaaugaggucagaugcaccuauuggcaccugcaguucugaaugcaucacuccaaauggaagcauucccaaugacaagcccuuucaaaauguaaacaagaucacauauggggcaugucccaaguauguuaagcaaaacacucugaaguuggcaacagggaugcggaauguaccagagaaacaaacuagaggcauauucggcgcaauagcagguuucauagaaaaugguugggagggaaugguagacgguugguacgguuucaggcaucaaaauucugagggcacaggacaagcagcagaucuuaaaagcacucaagcagcaaucgaccaaaucaaugggaaacugaauaggguaaucgagaaaacgaacgagaaauuccaucaaaucgaaaaggaauucucagaaguagaagggagaauucaggaccucgagaaauacguugaagacacuaaaauagaucucuggucuuacaacgcggagcuucuugucgcucuggagaaccaacauacaauugaucugacugacucggaaaugaacaaacuguuugaaaaaacaaggaggcaacugagggaaaaugcugaggacaugggcaaugguugcuucaaaauauaccacaaaugugacaaugcuugcauagggucaaucagaaauggaacuuaugaccaugauguauacagagacgaagcauuaaacaaccgguuucagaucaaagguguugagcugaagucaggauacaaagacuggauccuguggauuuccuuugccauaucaugcuuuuugcuuuguguuguuuugcugggguucaucaugugggccugccaaaaaggcaacauuaggugcaacauuugcauuuga

SEQ ID NO: 32606 - RNA, 1701 nt, Artificial Sequence; identical to SEQ ID NO: 32475
  derived and/or modified CDS sequence (wt) from hemagglutinin__InfluenzaA__ABC50167

SEQ ID NO: 32607 - RNA, 1701 nt, Artificial Sequence; identical to SEQ ID NO: 32475
  derived and/or modified CDS sequence (wt) from hemagglutinin__InfluenzaA__ABC50178

SEQ ID NO: 32608 - RNA, 1701 nt, Artificial Sequence; identical to SEQ ID NO: 32475
  derived and/or modified CDS sequence (wt) from hemagglutinin__InfluenzaA__ABC50189

SEQ ID NO: 32609 - RNA, 1701 nt, Artificial Sequence; identical to SEQ ID NO: 32574
  derived and/or modified CDS sequence (wt) from hemagglutinin__InfluenzaA__ABC50200

SEQ ID NO: 32610 - RNA, 1701 nt, Artificial Sequence; identical to SEQ ID NO: 32574
  derived and/or modified CDS sequence (wt) from hemagglutinin__InfluenzaA__ABC50211

SEQ ID NO: 32611 - RNA, 1701 nt, Artificial Sequence; identical to SEQ ID NO: 32574
  derived and/or modified CDS sequence (wt) from hemagglutinin__InfluenzaA__ABC50222

SEQ ID NO: 32612 - RNA, 1701 nt, Artificial Sequence; identical to SEQ ID NO: 32574
  derived and/or modified CDS sequence (wt) from hemagglutinin__InfluenzaA__ABC50233

SEQ ID NO: 32613 - RNA, 1701 nt, Artificial Sequence; identical to SEQ ID NO: 32574
  derived and/or modified CDS sequence (wt) from hemagglutinin__InfluenzaA__ABC50244

SEQ ID NO: 32614 - RNA, 1701 nt, Artificial Sequence; identical to SEQ ID NO: 32574
  derived and/or modified CDS sequence (wt) from hemagglutinin__InfluenzaA__ABC50266

SEQ ID NO: 32615 - RNA, 1701 nt, Artificial Sequence; identical to SEQ ID NO: 32574
  derived and/or modified CDS sequence (wt) from hemagglutinin__InfluenzaA__ABC50277

SEQ ID NO: 32616 - RNA, 1701 nt, Artificial Sequence
  derived and/or modified CDS sequence (wt) from hemagglutinin__InfluenzaA__ABC50299
augaagacuaucauugcuuugagcuacauuuuaugccugguuuucgcucaaaaacuucccggaaaugacaacagcacggcaacgcugugucuggggcaucaugcagugccaaacggaacgcuagugaaaacaaucacgaaugaccaaauugaaguaacuaaugcuacugagcugguucagaguuccucaacagguagaauaugcgacaguccucaccaaauccuugauggagaaaacugcacacuaauagaugcucuauugggagacccucauugugauggcuuccaaaauaaggaaugggaccuuuuuguugaacgcagcaaagccuacagcaacuguuacccuuaugaugugccggauuaugucucccuuaggucacuaguugccucaucaggcacgcuggaguuuaacaaugaaagcuucaauuggacuggagucgcucagaauggaacaagcucugcuugcaaaaggagaucugauaaaaguuucuuuaguagauugaauugguugcaccaauuaaaauacaaauauccagcacugaacgugacuaugccaaacaaugaaaaauuugacaaauuguacauuugggggguucaccacccggguacagacagugaccaaaucagccuauaugcucaagcaucggggagagucacagucucuaccaaaagaagccaacaaacuguaaucccgaauaucggaucuagacccuggguaaggggugucuccagcagaauaagcaucuauuggacaauaguaaaaccgggagacauacuuuugauuaacagcacagggaaucuaauugcuccucgggguuacuucaaaauacgaagugggaaaagcucaauaaugaggucagaugcacccauuggcaaaugcaauucugaaugcaucacuccaaauggaagcauucccaaugacaaaccauuucaaaauguaaacaggaucacauauggggccugucccagauauguuaagcaaaacacucugaaauuggcaacagggaugcggaaugugccagagaaacaaacuagaggcauauucggugcaaucgcgggcuucauagaaaaugguugggagggaaugauggacgguugguacgguuucaggcaucaaaauucugagggcacagggcaagcagcagaucuuaaaagcacucaagcagcaaucaaccaaaucaacgggaaacugaauagguuaaucgagaaaacgaacgagaaauuccaucaaauugaaaaagaauucucagaaguagaagggagaauucaggaccucgagaaauauguugaggacacuaaaauagaucucuggucguacaaugcggagcuucuuguugcccuggagaaccaacauacaauugaucuaacugacucagaaaugaacaaacuguuugaaagaacaaagaagcaacugagggaaaaugcugaggauaugggcaaugguuguuucaaaauauaccacaaaugugacaaugccugcauagggucaaucagaaauggaacuuaugaccaugauguauacagagacgaagcauugaacaaccgguuccagaucaaagguguugagcugaagucaggauacaaagauuggguccuauggauuuccuuugccacaucauguuuuuugcuuuguauuguuuugcugggguucaucaugugggccugccaaaaaggcaacauuaggugcaacauuugcauuuga

SEQ ID NO: 32617 - RNA, 1701 nt, Artificial Sequence
  derived and/or modified CDS sequence (wt) from hemagglutinin__InfluenzaA__ABC50310
augaagacuaucauugcuuugagcuacauuuuaugccugguuuucgcucaaaaacuucccggaaaugacaacagcacggcaacgcugugucuggggcaucaugcagugccaaacggaacgcuagugaaaacaaucacgaaugaccaaauugaaguaacuaaugcuacugagcugguucagaguuccucaacagguagaauaugcgacaguccucaccaaauccuugauggagaaaacugcacacuaauagaugcucuauugggagacccccauugugauggcuuccaaaauaaggaaugggaccuuuuuguugaacgcagcaaagccuacagcaacuguuacccuuaugaugugccggauuaugucucccuuaggucacuaguugccucaucaggcacgcuggaguuuaacaaugaaagcuucaauuggacuggagucgcucagaauggaacaagcucugcuugcaaaaggagaucugauaaaaguuucuuuaguagauugaauugguugcaccaauuaaaauacaaauauccagcacugaacgugacuaugccaaacaaugaaaaauuugacaaauuguacauuugggggguucaccacccggguacagacagugaccaaaucagccuauaugcucaagcaucggggagagucacagucucuaccaaaagaagccaacaaacuguaaucccgaauaucggaucuagacccuggguaaggggugucuccagcagaauaagcaucuauuggacaauaguaaaaccgggagacauacuuuugauuaacagcacagggaaucuaauugcuccucgggguuacuucaaaauacgaagugggaaaagcucaauaaugaggucagaugcacccauuggcaaaugcaauucugaaugcaucacuccaaauggaagcauucccaaugacaaaccauuucaaaauguaaacaggaucacauauggggccugucccagauauguuaagcaaaacacucugaaauuggcaacagggaugcggaaugugccagagaaacaaacuagaggcauauucggugcaaucgcgggcuucauagaaaaugguugggagggaaugauggacgguugguacgguuuuaggcaucaaaauucugagggcacagggcaagcagcagaucuuaaaagcacucaagcagcaaucaaccaaaucaacgggaaacugaauagguuaaucgagaaaacgaacgagaaauuccaucaaauugaaaaagaauucucagaaguagaagggagaauucaggaccucgagaaauauguugaggacacuaaaauagaucucuggucguacaaugcggagcuucuuguugcccuggagaaccaacauacaauugaucuaacugacucagaaaugaacaaacuguuugaaagaacaaagaagcaacugagggaaaaugcugaggauaugggcaaugguuguuucaaaauauaccacaaaugugacaaugccugcauagggucaaucagaaauggaacuuaugaccaugauguauacagagacgaagcauugaacaaccgguuccagaucaaagguguugagcugaagucaggauacaaagauuggguccuauggauuuccuuugccauaucauguuuuuugcuuuguauuguuuugcugggguucaucaugugggccugccaaaaaggcaacauuaggugcaacauuugcauuuga

SEQ ID NO: 32618 - RNA, 1701 nt, Artificial Sequence
  derived and/or modified CDS sequence (wt) from hemagglutinin__InfluenzaA__ABC50321
augaagacuaucauugcuuugagcuacauuuuaugccugguuuucgcucaaaaacuucccggaaaugacaacagcacggcaacgcugugucuggggcaucaugcagugccaaacggaacgcuagugaaaacaaucacgaaugaccaaauugaaguaacuaaugcuacugagcugguucagaguuccucaacagguagaauaugcgacaguccucaccaaauccuugauggagaaaacugcacacuaauagaugcucuauugggagacccucauugugauggcuuccaaaauaaggaaugggaccuuuuuguugaacgcagcaaagccuacagcaacuguuacccuuaugaugugccggauuaugucucccuuaggucacuaguugccucaucaggcacgcuggaguuuaacaaugaaagcuucaauuggacuggagucgcucagaauggaacaagcucugcuugcaaaaggagaucugauaaaaguuucuuuaguagauugaauugguugcaccaauuaaaauacaaauauccagcauugaacgugacuaugccaaacaaugaaaaauuugacaaauuguacauuugggggguucaccacccggguacagacagugaccaaaucagccuauaugcucaagcaucggggagagucacagucucuaccaaaagaagccaacaaacuguaaucccgaauaucggaucuagacccuggguaaggggugucuccagcagaauaagcaucuauuggacaauaguaaaaccgggagacauacuuuugauuaacagcacagggaaucuaauugcuccucgggguuacuucaaaauacgaagugggaaaagcucaauaaugaggucagaugcacccauuggcaaaugcaacucugaaugcaucacuccaaauggaagcauucccaaugacaaaccauuucaaaauguaaacaggaucacauauggggccugucccagauauguuaagcaaaacacucugaaauuggcaacagggaugcggaaugugccagggaaacaaacuagaggcauauucggugcaaucgcgggcuucauagaaaaugguugggagggaaugauggacgguugguacgguuucaggcaucaaaauucugagggcacagggcaagcagcagaucuuaaaagcacucaagcagcaaucaaccaaaucaacgggaaacugaauagguuaaucgagaaaacgaacgagaaauuccaucaaauugaaaaagaauucucagaaguagaagggagaauucaggaccucgagaaauauguugaggacacuaaaauagaucucuggucguacaaugcggagcuucuuguugcccuggagaaccaacauacaauugaucuaacugacucagaaaugaacaaacuguuugaaagaacaaagaagcaacugagggaaaaugcugaggauaugggcaaugguuguuucaaaauauaccacaaaugugacaaugccugcauagggucaaucagaaauggaacuuaugaccaugauguauacagagacgaagcauugaacaaccgguuccagaucaaagguguugagcugaagucaggauacaaagauuggguccuauggauuuccuuugccauaucauguuuuuugcuuuguauuguuuugcugggguucaucaugugggccugccaaaaaggcaacauuaggugcaacauuugcauuuga

SEQ ID NO: 32619 - RNA, 1701 nt, Artificial Sequence
  derived and/or modified CDS sequence (wt) from hemagglutinin__InfluenzaA__ABC50332
augaagacuaucauugcuuugagcuacauuuuaugccugguuuucgcucaaaaacuucccggaaaugacaacagcacggcaacgcugugccuggggcaccaugcagugccaaacggaacgcuagugaaaacaaucacgaaugaccaaauugaagugacuaaugcuacugagcugguucagaguuccucaacagguagaauaugcgacaguccucaccaaauccuugauggagaaaacugcacacuaauagaugcucuauugggagacccucauugugauggcuuccaaaauaaggaaugggaccuuuuuguugaacgcagcaaagccuacagcaacuguuacccuuaugaugugccggauuaugucucccuuaggucacuaguugccucaucaggcacgcuggaguuuaacaaugaaagcuucaauuggacuggagucgcucagaauggaacaagcucugcuugcaaaaggagaucugauaaaaguuucuuuaguagauugaauugguugcaccaauuaaaauacaaauauccagcacugaacgugacuaugccaaacaaugaaaaauuugacaaauuguacauuugggggguucaccacccugguacagacagugaccaaaucagccuauaugcucaagcaucagggagagucacagucucuaccaaaagaagccaacaaacuguaaucccgaauaucggaucuagacccuggguaaggggugucuccagcagaauaagcaucuauuggacaauagugaaaccgggagacauacuuuugauuaacagcacagggaaucuaauugcuccucgggguuacuucaaaauacgaagugggaaaagcucaauaaugaggucagaugcacccauuggcaaaugcaauucugaaugcaucacuccaaauggaagcauucccaauggcaaaccauuucaaaauguaaacaggaucacauauggggccugucccagauauguuaagcaaaacacucugaaauuggcaacagggaugcggaaugugccagagaaacaaacuagaggcauauucggugcaaucgcgggcuucauagaaaaugguugggagggaaugauggacgguugguacgguuucaggcaucagaauucugagggcacagggcaagcagcagaucuuaaaagcacucaagcagcaaucaaccaaaucaacgggaaacugaauagguuaaucgagaaaacgaacgagaaauuccaucaaauugaaaaagaauucucagaaguagaagggagaauucaggaccucgagaaauaugucgaggacacuaaaauagaucucuggucguacaaugcggagcuucuuguugcccuggagaaccaacauacaauugaucuaacugacucagaaaugaacaaacuguuugaaagaacaaagaagcaacugagggaaaaugcugaggauaugggcaaugguuguuucaaaauauaccacaaaugugacaaugccugcauagggucaaucagaaauggaacuuaugaccaugauguauacagagacgaagcauugaacaaccgguuccagaucaaagguguugagcugaagucaggauacaaagauuggauccuauggauuuccuuugccauaucauguuuuuugcuuuguauuguuuuacugggguucaucaugugggccugccaaaaaggcaacauuaggugcaacauuugcauuuga

SEQ ID NO: 32620 - RNA, 1701 nt, Artificial Sequence
  derived and/or modified CDS sequence (wt) from hemagglutinin__InfluenzaA__ABC50343
augaagacuaucauugcuuugagcuacauuuuaugccugguuuucgcucaaaaacuucccggaaaugacaacagcacggcaacgcugugucuggggcaucaugcagugccaaacggaacgcuagugaaaacaaucacgaaugaccaaauugaaguaacuaaugcuacugagcugguucagaguuccucaacagguagaauaugcgacaguccucaccaaauccuugauggagaaaacugcacacuaauagaugcucuauugggagacccucauugugauggcuuccaaaauaaggaaugggaccuuuuuguugaacgcagcaaagccuacagcaacuguuacccuuaugaugugccggauuaugucucccuuaggucacuaguugccucaucaggcacgcuggaguuuaacaaugaaagcuucaauuggacuggagucgcucagaauggaacaagcucugcuugcaaaaggagauccgauaaaaguuucuuuaguagauugaauugguugcaccaauuaaaauacaaauauccagcgcugaacgugacuaugccaaacaaugaaaaauuugacaaauuguacauuugggggguucaccacccggguacagacagugaccaaaucagccuauaugcucaagcaucggggagagucacagucucuaccaaaagaagccaacaaacuguaaucccgaauaucggaucuagacccuggguaaggggugucuccagcagaauaagcaucuauuggacaauaguaaaaccgggagacauacuuuugauuaacagcacagggaaucuaauugcuccucgggguuacuucaaaauacgaagugggaaaagcucaauaaugaggucagaugcacccauuggcaaaugcaauucugaaugcaucacuccaaauggaagcauucccaaugacaaaccauuucaaaauguaaacaggaucacauauggggccugucccagauauguuaagcaaaacacucugaaauuggcaacagggaugcggaaugugccagagaaacaaacuagaggcauauucggugcaaucgcgggcuucauagaaaaugguugggagggaaugauggacgguugguacgguuucaggcaucaaaauucugagggcacagggcaagcagcagaucuuaaaagcacucaagcagcaaucaaccaaaucaacgggaaacugaauagguuaaucgagaaaacgaacgagaaauuccaucaaauugaaaaagaauucucagaaguagaagggagaauucaggaccucgagaaauauguugaggacacuaaaauagaucucuggucguacaaugcggagcuucuuguugcccuggagaaccaacauacaauugaucuaacugacucagaaaugaacaaacuguuugaaagaacaaagaagcaacugagggaaaaugcugaggauaugggcaaugguuguuucaaaauauaccacaaaugugacaaugccugcauagggucaaucagaaauggaacuuaugaccaugauguauacagagacgaagcauugaacaaccgguuccagaucaaagguguugagcugaagucaggauacaaagauuggguccuauggauuuccuuugccauaucauguuuuuugcuuuguauuguuuugcugggguucaucaugugggccugccaaaaaggcaacauuaggugcaacauuugcauuuga

SEQ ID NO: 32621 - RNA, 1701 nt, Artificial Sequence
  derived and/or modified CDS sequence (wt) from hemagglutinin__InfluenzaA__ABC50354
augaagacuaucauugcuuugagcuacauuuuaugccugguuuucgcucaaaaacuccccggaaaugacaacagcacggcaacgcugugucuggggcaucaugcagugccaaacggaacgcuagugaaaacaaucacgaaugaccaaauugaaguaacuaaugcuacugagcugguucagaguuccucaacagguagaauaugcgacaguccucaccaaauccuugauggagaaaacugcacacuaauagaugcucuauugggagacccccauugugauggcuuccaaaauaaggaaugggaccuuuuuguugaacgcagcaaagccuacagcaacuguuacccuuaugaugugccggauuaugucucccuuaggucacuaguugccucaucaggcacgcuggaguuuaacaaugaaagcuucaauuggacuggagucgcucagaauggaacaagcucuucuugcaaaaggagaucugauaaaaguuucuuuaguagauugaauugguugcaccaauuaaaauacaaauauccagcacugaacgugacuaugccaaacaaugaaaaauuugacaaauuguacauuugggggguucaccacccggguacagacagugaccaaaucagccuauaugcucaagcaucggggagagucacagucucuaccaaaagaagccaacaaacuguaaucccgaauaucggaucuagacccuggguaaggggugucuccagcagaauaagcaucuauuggacaauaguaaaaccgggagacauacuuuugauuaacagcacagggaaucuaauugcuccucgggguuacuucaaaauacgaagugggaaaagcucaauaaugaggucagaugcacccauuggcaaaugcaauucugaaugcaucacuccaaauggaagcauucccaaugacaaaccauuucaaaauguaaacaggaucacauauggggccugucccagauauguuaagcaaaacacucugaaauuggcaacagggaugcggaaugugccagagaaacaaacuagaggcauauucggugcaaucgcgggcuucauagaaaaugguugggagggaaugauggacgguugguacgguuuuaggcaucaaaauucugagggcacagggcaagcagcagaucuuaaaagcacucaagcagcaaucaaccaaaucaacgggaaacugaauagguuaaucgagaaaacgaacgagaaauuccaucaaauugaaaaagaauucucagaaguagaagggagaauucaggaccucgagaaauauguugaggacacuaaaauagaucucuggucguacaaugcggagcuucuuguugcccuggagaaccaacauacaauugaucuaacugacucagaaaugaacaaacuguuugaaagaacaaagaagcaacugagggaaaaugcugaggauaugggcaaugguuguuucaaaauauaccacaaaugugacaaugccugcauagggucaaucagaaauggaacuuaugaccaugauguauacagagacgaagcauugaacaaccgguuccagaucaaagguguugagcugaagucaggauacaaagauuggguccuauggauuuccuuugccauaucauguuuuuugcuuuguauuguuuugcugggguucaucaugugggccugccaaaaaggcaacauuaggugcaacauuugcauuuga

SEQ ID NO: 32622 - RNA, 1701 nt, Artificial Sequence
  derived and/or modified CDS sequence (wt) from hemagglutinin__InfluenzaA__ABC50376
augaagacuaucauugcuuugagcuacauuuuaugccugguuuucgcucaaaaacuucccggaaaugacaacagcacggcaacgcugugucuggggcaucaugcagugccaaacggaacgcuagugaaaacaaucacgaaugaccaaauugaaguaacuaaugcuacugagcugguucagaguuccucaacagguagaauaugcgacaguccucaccaaauccuugauggagaaaacugcacacuaauagaugcucuauugggagacccucauugugauggcuuccaaaauaaggaaugggaccuuuuuguugaacgcagcaaagccuacagcaacuguuacccuuaugaugugccggauuaugucucccuuaggucacuaguugccucaucaggcacgcuggaguuuaacaaugaaagcuucaauuggacuggagucgcucagaauggaacaagcucugcuugcaaaaggagaucugauaaaaguuucuuuaguagauugaauugguugcaccaauuaaaauacaaauauccagcacugaacgugacuaugccaaacaaugaaaaauuugacaaauuguacauuugggggguucaccacccggguacagacagugaccaaaucagccuauaugcucaagcaucggggagagucacagucucuaccaaaagaagccaacaaacuguaaucccgaauaccggaucuagacccuggguaaggggugucuccagcagaauaagcaucuauuggacaauaguaaaaccgggagacauacuuuugauuaacagcacagggaaucuaauugcuccucgggguuacuucaaaauacgaagugggaaaagcucaauaaugaggucagaugcacccauuggcaaaugcaauucugaaugcaucacuccaaauggaagcauucccaaugacaaaccauuucaaaauguaaacaggaucacauauggggccugucccagauauguuaagcaaaacacucugaaauuggcaacagggaugcggaaugugccagagaaacaaacuagaggcauauucggugcaaucgcgggcuucauagaaaaugguugggagggaaugauggacgguugguacgguuucaggcaucaaaauucugagggcacagggcaagcagcagaucuuaaaagcacucaagcagcaaucaaccaaaucaacgggaaacugaauagguuaaucgagaaaacgaacgagaaauuccaucaaauugaaaaagaauucucagaaguagaagggagaauucaggaccucgagaaauauguugaggacacuaaaauagaucucuggucguacaaugcggagcuucuuguugcccuggagaaccaacauacaauugaucuaacugacucagaaaugaacaaacuguuugaaagaacaaagaagcaacugagggaaaaugcugaggauaugggcaaugguuguuucaaaauauaccacaaaugugacaaugccugcauagggucaaucagaaauggaacuuaugaccaugauguauacagagacgaagcauugaacaaccgguuccagaucaaagguguugagcugaagucaggauacaaagauuggguccuauggauuuccuuugccauaucauguuuuuugcuuuguauuguuuugcugggguucaucaugugggccugccaaaaaggcaacauuaggugcaacauuugcauuuga

SEQ ID NO: 32623 - RNA, 1701 nt, Artificial Sequence
  derived and/or modified CDS sequence (wt) from hemagglutinin__InfluenzaA__ABC50387
augaagacuaucauugcuuugagcuacauuuuaugccugguuuucgcucaaaaacuucccggaaaugacaacagcacggcaacgcugugucuggggcaucaugcagugccaaacggaacgcuagugaaaacaaucacgaaugaccaaauugaaguaacuaaugcuacugagcugguucagaguuccucaacagguagaauaugcgacaguccucaccaaauccuugauggagaaaacugcacacuaauagaugcucuauugggagacccucauugugauggcuuccaaaauaaggaaugggaccuuuuuguugaacgcagcaaagccuacagcaacuguuacccuuaugaugugccggauuaugucucccuuaggucacuaguugccucaucaggcacgcuggaguuuaacaaugaaagcuucaauuggacuggagucgcucagaauggaacaagcucugcuugcaaaaggagaucugauaaaaguuucuuuaguagauugaauugguugcaccaauuaaaauacaaauauccagcacugaacgugacuaugccaaacaaugaaaaauuugacaaauuguacguuugggggguucaccacccggguacagacagugaccaaaucagccuauaugcucaagcaucggggagagucacagucucuaccaaaagaagccaacaaacuguaaucccgaauaucggaucuagacccuggguaaggggugucuccagcagaauaagcaucuauuggacaauaguaaaaccgggagacauacuuuugauuaacagcacagggaaucuaauugcuccucgggguuacuucaaaauacgaagugggaaaagcucaauaaugaggucagaugcacccauuggcaaaugcaauucugaaugcaucacuccaaauggaagcauucccaaugacaaaccauuucaaaauguaaacaggaucacauauggggccugucccagauauguuaagcaaaacacucugaaauuggcaacagggaugcggaaugugccagagaaacaaacuagaggcauauucggugcaaucgcgggcuucauagaaaaugguugggagggaaugauggacgguugguacgguuucaggcaucaaaauucugagggcacagggcaagcagcagaucuuaaaagcacucaagcagcaaucaaccaaaucaacgggaaacugaauagguuaaucgagaaaacgaacgagaaauuccaucaaauugaaaaagaauucucagaaguagaagggagaauucaggaccucgagaaauauguugaggacacuaaaauagaucucuggucguacaaugcggagcuucuuguugcccuggagaaccaacauacaauugaucuaacugacucagaaaugaacaaacuguuugaaagaacaaagaagcaacugagggaaaaugcugaggauaugggcaaugguuguuucaaaauauaccacaaaugugacaaugccugcauagggucaaucagaaauggaacuuaugaccaugauguauacagagacgaagcauugaacaaccgguuccagaucaaagguguugagcugaagucaggauacaaagauuggguccuauggauuuccuuugccauaucauguuuuuugcuuuguauuguuuugcugggguucaucaugugggccugccaaaaaggcaacauuaggugcaacauuugcauuuga

SEQ ID NO: 32624 - RNA, 1701 nt, Artificial Sequence
  derived and/or modified CDS sequence (wt) from hemagglutinin__InfluenzaA__ABC50409
augaagacuaucauugcuuugagcuacauucuaugucugguuuucgcucaaaaacuucccggaaaugacaacagcacggcaacgcugugccuugggcaccaugcaguaccaaacggaacgauagugaaaacaaucacgaaugaccaaauugaaguuacuaaugcuacugagcugguucagaguuccucaacagguggaauaugcgacaguccucaucagauccuugauggagaaaacugcacacuaauagaugcucuauugggagacccucagugugauggcuuccaaaauaagaaaugggaccuuuuuguugaacgcagcaaagccuacagcaacuguuacccuuaugaugugccggauuaugucucccuuaggucacuaguugccucauccggcacacuggaguuuaacaaugaaagcuucaauuggacuggagucacucaaaauggaacaagcucugcuugcaaaaggagaucuaauaacaguuucuuuaguagauugaauugguugacccauuuaaaauucaaauacccagcauugaacgugacuaugccaaacaaugaaaaauuugacaaauuguacauuugggggguucaccacccggguacggacaaugaccaaaucagccuauaugcucaagcaucaggaagaaucacagucucuaccaaaagaagccaacaaacuguaaucccgaauaucggaucuagacccaggguaagggauauccccagcagaauaagcaucuauuggacaauaguaaaaccgggagacauacuuuugauuaacagcacagggaaucuaauugcuccucgggguuacuucaaaauacgaagugggaaaagcucaauaaugagaucagaugcacccauuggcaaaugcaauucugaaugcaucacuccaaauggaagcauucccaaugacaaaccauuucaaaauguaaacaggaucacauauggggccugucccagauauguuaagcaaaacacucugaaauuggcaacagggaugcgaaauguaccagagaaacaaacuagaggcauauuuggcgcaaucgcggguuucauagaaaaugguugggagggaaugguggaugguugguacgguuucaggcaucaaaauucugagggaauaggacaagcagcagaucucaaaagcacucaagcagcaaucaaccaaaucaaugggaagcugaauagguugaucgggaaaaccaacgagaaauuccaucagauugaaaaagaauucucagaaguagaagggagaauucaggaccucgagaaauauguugaggacacuaaaauagaucucuggucauacaacgcggagcuucuuguugcccuggagaaccaacauacaauugaucuaacugacucagaaaugaacaaacuguuugaaagaacaaagaagcaacugagggaaaaugcugaggauaugggcaaugguuguuucaaaauauaccacaaaugugacaaugccugcauagggucaaucagaaauggaacuuaugaucaugauguauacagagaugaagcauuaaacaaccgguuccagaucaaagguguugagcugaagucaggauacaaagauuggauccuauggauuuccuuugccauaucauguuuuuugcuuuguguugcuuuguugggguucaucaugugggccugccaaaaaggcaacauuaggugcaacauuugcauuuga

SEQ ID NO: 32625 - RNA, 1701 nt, Artificial Sequence; identical to SEQ ID NO: 32624
  derived and/or modified CDS sequence (wt) from hemagglutinin__InfluenzaA__ABC50420

SEQ ID NO: 32626 - RNA, 1701 nt, Artificial Sequence
  derived and/or modified CDS sequence (wt) from hemagglutinin__InfluenzaA__ABC54668
augaagacuaucauugcuuugagcuacauuuuaugucugguuuucgcucaaaaacuucccggaaaugacaacagcacggcaacgcugugccuggggcaccaugcagugccaaacggaacgcuagugaaaacaaucacgaaugaccaaauugaagugacuaaugcuacugagcugguucagaguuccucaacagguagaauaugcgacaguccucaccaaauccuugauggagaaaacugcacacuaauagaugcucuauugggagacccucauugugauggcuuccaaaauaaggaaugggaccuuuuuguugaacgcagcaaagccuacagcaacuguuacccuuaugaugugccggauuaugccucccuuaggucacuaguugccucauccggaacacuggaguuuaacaaugaaagcuucaauuggacuggagucgcucagaauggaacaagcucugcuugcaaaaggagaucuaauaaaaguuucuuuaguagauugaauugguugcaccaauuaaaauacaaauauccagcacugaacgugacuaugccaaacaaugaaaaauuugacaaauuguacauuugggggguucaccacccgaguacggacagugaccaaaucagccuauaugcucaagcaucagggagagucacagucucuaccaaaagaagccaacaaacuguaaucccgaauaucggaucuggacccuggguaaggggugucuccagcagaauaagcaucuauuggacaauaguaaaaccgggagacauacuuuugauuaacagcacagggaaucuaauugcuccucgggguuacuucaaaauacgaagugggaaaagcucaauaaugaggucagaugcacccauuggcaaaugcaauucugaaugcaucacuccaaauggaagccuucccaaugacaaaccauuucaaaauguaaacaggaucacauauggggccugucccagauauguuaagcaaaacacucugaaauuggcaacagggaugcggaauguaccagagaaacaaacuagaggcauauucggcgcaaucgcggguuucauagaaaaugguugggagggaaugguggacgguugguacgguuucaggcaucaaaauucugagggcacaggacaagcagcagaucuuaaaagcacucaagcagcaaucaaccaaaucaacgggaaacugaauagguuaaucgagaaaacgaacgagaaauuccaucaaauugaaaaagaauucucagaaguagaagggagaauucaggaccucgagaaauauguugaggacacuaaaauagaucucuggucguacaacgcggagcuucuuguugcccuggagaaccaacauacaauugaucuaacugacucagaaaugaacaaacuguuugaaagaacaaagaagcaacugagggaaaaugcugaggauaugggcaaugguuguuucaaaauauaccacaaaugugacaaugccugcauagggucaaucagaaauggaacuuaugaccaugauguauacagagacgaagcauuaaacaaccgguuccagaucaaagguguugagcugaagucaggauacaaagauuggauccuauggauuuccuuugccauaucauguuuuuugcuuuguguuguuuugcugggguucaucaugugggccugccaaaaaggcaacauuaggugcaacauuugcauuuga

SEQ ID NO: 32627 - RNA, 1701 nt, Artificial Sequence
  derived and/or modified CDS sequence (wt) from hemagglutinin__InfluenzaA__ABC54679
augaagacuaucauugcuuugagcuacauucuaugucugguuuucgcucaaaaacuucccggaaaugacaacagcacggcaacgcugugccuugggcaccaugcaguaccaaacggaacgauagugaaaacaaucacgaaugaccaaauugaaguuacuaaugcuacugagcugguucagaguuccccaacagguggaauaugcgacaguccucaucagauccuugauggagaaaacugcacacuaauagaugcucuauugggagacccucagugugauggcuuccaaaauaagaaaugggaccuuuuuauugaacgcagcaaagccuacagcaacuguuaccccuaugaugugccggauuaugccucccuuaggucacuaguugccucauccggcacacuggaauuuaacaaugaaagcuucaauuggacuggagucacucaaaauggaacaagcucugcuugcaaaaggagaucuaauaacaguuucuuuaguagauugaauugguugacccacuuaaaauucaaauacccagcauugaacgugacuaugccaaacaaugaaaaauuugacaaauuguacauuugggggguucaccacccggguacggacaaugaccaaaucagccuauaugcucaagcuucaggaagaaucacagucucuaccaaaagaagccaacaaacuguaaucccgaaugucggaucuagacccaggguaagggauauccccagcagaauaagcaucuauuggacaauaguaaaaccgggagacauacuuuugauuaacagcacagggaaucuaauugcuccucgggguuacuucaaaauacgaagugggaaaagcucaauaaugagaucagaugcacccauuggcaaaugcaauucugaaugcaucacuccaaauggaagcauucccaaugacaaaccauuucaaaauguaaacaggaucacauauggggccugucccagauauguuaagcaaaacacucugaaauuggcaacagggaugcgaaauguaccagagaaacaaacuagaggcauauuuggcgcaaucgcggguuucauagaaaaugguugggagggaaugguggaugguugguacgguuucaggcaucaaaauucugagggaauaggacaagcagcagaucucaaaagcacucaagcagcaaucaaccaaaucaaugggaagcugaauagguugaucgggaaaaccaacgagaaauuccaucagauugaaaaagaauucucagaaguagaagggagaauucaggaccucgagaaauauguugaggacacuaaaauagaucucuggucauacaacgcggagcuucuuguugcccuggagaaccaacauacaauugaucuaacugacucagaaaugaacaaacuguuugaaagaacaaagaagcaacugagggaaaaugcugaggauaugggcaaugguuguuucaaaauauaccacaaaugugacaaugccugcauagggucgaucagaaauggaacuuaugaccaugauguauacagagaugaggcauugaacaaccgguuccagaucaaagguguugagcugaagucaggauacaaagauuggauccuauggauuuccuuugccauaucauguuuuuugcuuuguguugcuuuguugggguucaucaugugggccugccaaaaaggcaacauuaggugcaacauuugcauuuga

SEQ ID NO: 32628 - RNA, 1701 nt, Artificial Sequence; identical to SEQ ID NO: 32528
  derived and/or modified CDS sequence (wt) from hemagglutinin__InfluenzaA__ABC67319

SEQ ID NO: 32629 - RNA, 1701 nt, Artificial Sequence
  derived and/or modified CDS sequence (wt) from hemagglutinin__InfluenzaA__ABC67454
augaagacuaucauugcuuugagcuacauuuuaugccugguuuucgcucaagaacuucccggaaaugacaacagcacggcaacgcugugucuggggcaucaugcagugccaaacggaacgcuagugaaaacaaucacuaaugaccaaauugaaguaacuaaugcuacugagcugguucagaguuccucaacagguagaauaugcgacaguccucaccaaauccuugauggagaaaacugcacacuaauagaugcucuauugggagacccucauugugauggcuuccaaaauaaggaaugggaccuuuuuguugaacgcagcaaagccuacagcaacuguuacccuuaugaugugccggauuaugucucccuuaggucacuaguugccucaucaggcacgcuggaguuuaacaaugaaagcuucaauuggacuggagucgcucagaauggaacaagcucugcuugcaaaaggagaucugauaaaaguuucuuuaguagauugaauugguugcaccaauuaaaauacaaauauccagcacugaacgugacuaugccaaacaaugaaaaauuugacaaauuguacauuugggggguucaccacccggguacagacagugaccaaaucagccuauaugcucaagcaucggggagagucacagucucuaccaaaagaagccaacaaacuguaaucccgaauaucggaucuagacccuggguaaggggugucuccagcagaauaagcaucuauuggacaauaguaaaaccgggagacauacuuuugauuaacagcacagggaaucuaauugcuccucgggguuacuucaaaauacgaagugggaaaagcucaauaaugaggucagaugcacccauuggcaaaugcaauucugaaugcaucacuccaaauggaagcauucccaaugacaaaccauuucaaaauguaaacaggaucacauauggggccugucccagauauguuaagcaaaacacucugaaauuggcaacagggaugcggaaugugccagagaaacaaacuagaggcauauucggugcaaucgcgggcuucauagaaaaugguugggagggaaugauggacgguugguacgguuucaggcaucaaaauucugagggcacagggcaagcagcagaucuuaaaagcacucaagcagcaaucaaccaaaucaacgggaaacugaauagguuaaucgagaaaacgaacgagaaauuccaucaaauugaaaaagaauucucagaaguagaagggagaauucaggaccucgagaaauauguugaggacacuaaaauagaucucuggucguacaaugcggagcuucuuguugcccuggagaaccaacauacaauugaucuaacugacucagaaaugaacaaacuguuugaaagaacaaagaagcaacugagggaaaaugcugaggauaugggcaaugguuguuucaaaauauaccacaaaugugacaaugccugcauagggucaaucagaaauggaacuuaugaccaugauguauacagagacgaagcauugaacaaccgguuccagaucaaagguguugagcugaagucaggauacaaagauuggguccuauggauuuccuuugccauaucauguuuuuugcuuuguauuguuuugcugggguucaucaugugggccugccaaaaaggcaacauuaggugcaacauuugcauuuga

SEQ ID NO: 32630 - RNA, 1701 nt, Artificial Sequence
  derived and/or modified CDS sequence (wt) from hemagglutinin__InfluenzaA__ABC67471
augaagacuaucauugcuuugagcuacauucuaugccugguuuucgcucaaaaacuucccggaaaugacaacagcacggcaacgcugugucuggggcaucaugcagugccaaacggaacgcuagugaaaacaaucacgaaugaccaaauugaaguaacuaaugcuacugagcugguucagaguuccucaacagguagaauaugcgacaguccucaccaaauccuugauggagaaaacugcacacuaauagaugcucuauugggagacccucauugugauggcuuccaaaauaaggaaugggaccuuuuuguugaacgcagcaaagccuacagcaacuguuacccuuaugaugugccggauuaugucucccuuaggucacuaguugccucaucaggcacgcuggaguuuaacaaugaaagcuucaauuggacuggagucgcucagaauggaacaagcucugcuugcaaaaggagaucugauaaaaguuucuuuaguagauugaauugguugcaccaauuaaaauacaaauauccagcacugaacgugacuaugccaaacaaugaaaaauuugacaaauuguacauuugggggguucaccacccggguacagacagugaccaaaucagccuauaugcucaagcaucggggagagucacagucucuaccaaaagaagccaacaaacuguaaucccgaauaucggaucuagacccuggguaaggggugucuccagcagaauaagcaucuauuggacaauaguaaaaccgggagacauacuuuugauuaacagcacagggaaucuaauugcuccucgggguuacuucaaaauacgaagugggaaaagcucaauaaugaggucagaugcacccauuggcaaaugcaauucugaaugcaucacuccaaauggaagcauucccaaugacaaaccauuucaaaauguaaacaggaucacauauggggccugucccagauauguuaagcaaaacacucugaaauuggcaacagggaugcggaaugugccagagaaacaaacuagaggcauauucggugcaaucgcgggcuucauagaaaaugguugggagggaaugauggacgguugguacgguuucaggcaucaaaauucugagggcacagggcaagcagcagaucuuaaaagcacucaagcagcaaucaaccaaaucaacgggaaacugaauagguuaaucgagaaaacgaacgagaaauuccaucaaauugaaaaagaauucucagaaguagaagggagaauucaggaccucgagaaauauguugaggacacuaaaauagaucucuggucguacaaugcggagcuucuuguugcccuggagaaccaacauacaauugaucuaacugacucagaaaugaacaaacuguuugaaagaacaaagaagcaacugagggaaaaugcugaggauaugggcaaugguuguuucaaaauauaccacaaaugugacaaugccugcauagggucaaucagaaauggaacuuaugaccaugauguauacagagacgaagcauugaacaaccgguuccagaucaaagguguugagcugaagucaggauacaaagauuggguccuauggauuuccuuugccauaucauguuuuuugcuuuguauuguuuugcugggguucaucaugugggccugccaaaaaggcaacauuaggugcaacauuugcauuuga

SEQ ID NO: 32631 - RNA, 1701 nt, Artificial Sequence
  derived and/or modified CDS sequence (wt) from hemagglutinin__InfluenzaA__ABC67554
augaagacuaucauugcuuugagcuacauucuaugucugguuuucgcucaaaaacuucccggaaaugacaacagcacggcaacgcugugccuugggcaccaugcaguaccaaacggaacgauagugaaaacaaucacgaaugaccaaauugaaguuacuaaugcuacugagcugguucagaguuccucaacagguggaauaugcgacaguccucaucagauccuugauggagaaaacugcacacuaauagaugcucuauugggagacccucagugugauggcuuccaaaauaagaaaugggaccuuuuuguugaacgcagcaaagccuacagcaacuguuacccuuaugaugugccggauuaugccucccuuaggucacuaauugccucauccggcacacuggaguuuaacaaugaaagcuucaauuggacuggagucacucaaaauggaacaagcucugcuugcaaaaggagaucuaauagcaguuucuuuaguagauugaauugguugacccacuuaaaauucaaauacccagcauugaacgugacuaugccaaacaaugaagaauuugacaaauuguacauuugggggguucaccacccggguacagacaaugaccaaaucagccuauaugcucaagcaucaggaagaaucacagucucuaccaaaagaagccaacaaacuguaaucccgaauaucggaucuagacccaggguaagggauauucccagcagaauaagcaucuauuggacaauaguaaaaccgggagacauacuuuugauuaacagcacagggaaucuaauugcuccucgggguuacuuuaaaauacgaagugggaaaagcucaauaaugagaucagaugcacccauugucaaaugcaauucugaaugcauuacuccaaauggaagcauucccaaugacaaaccauuucaaaauguaaacaggaucacauauggggccugucccagauauguuaagcaaaacacucugaaauuggcaacagggaugcgaaauguaccagagaaacaaacuagaggcauauuuggcgcaaucgcggguuucauagaaaaugguugggagggaaugguggaugguugguacgguuucaggcaucaaaauucugagggaauaggacaagcagcagaucucaaaagcacucaagcagcaaucgaccaaaucaaugggaagcugaauagguugaucgggaaaaccaacgagaaauuccaucagauugaaaaagaauucucagaaguagaagggagaauucaggaccucgagaaauauguugaggacacuaaaauagaucucuggucauacaacgcggagcuucuuguugcccuggagaaccaacauacaauugaucuaacugacucagaaaugaacaaacuguuugaaagaacaaagaagcaacugagggaaaaugcugaggauaugggcaaugguuguuucaaaauauaccacaaaugugacaaugccugcauagggucaaucagaaauggaacuuaugaccaugauguauacagagaugaagcauuaaacaaccgguuccagaucaaagguguugagcugaagucaggauacaaagauuggauccuauggauuuccuuugccauaucauguuuuuugcuuuguguugcuuuguugggguucaucaugugggccugccaaaaaggcaacauuaggugcaacauuugcauuuga

SEQ ID NO: 32632 - RNA, 1701 nt, Artificial Sequence
  derived and/or modified CDS sequence (wt) from hemagglutinin__InfluenzaA__ABC67565
augaagacuaucauugcuuugagcuacauuuucugucugguucucggccaagacuuuccaggaaaugacaacagcacagcaacgcugugccuggggcaucaugcggugccaaacggaacacuagugaaaacaaucacaaaugaucagauugaagugacuaaugcuacugagcugguucagaguuccucaacggggaaaauaugcaacaauccucaucgaauccuugauggaauagacugcacacugauagaugcucuauugggggacccucauugugauggcuuucaaaaugagacaugggaccuuuucguugaacgcagcaaagcuuucagcaacuguuacccuuaugaugugccagauuaugccucccuuaggucacuaguugccucgucaggcacucuggaguuuaucaaugaaggcuucacuuggacuggggucacucagaaugggggaagcaaugcuugcaaaaggggaccugauaucgguuuuuucaguagacugaacugguuguacaaaucaggaagcacauauccagugcugaacgugacuaugccaaacaaugacaauuuugacaaacuauacauuugggggguucaccacccgagcacggaccaagaacaaaccagccuauauguucaagcaucagggagagucacagucucuaccaagagaagccagcaaacuauaaucccgaauaucgggucuagacccuggguaaggggucugucuaguagaauaagcaucuauuggacaauaguuaaaccgggagacauacugguaauuaauaguaaugggaaccuaauugcuccucgggguuauuucaaaaugcgcacugggaaaagcucaauaaugaggucagaugcaccuauuggcaccugcauuucugaaugcaucacuccaaauggaagcauucccaaugacaagcccuuucaaaacguaaacaagaucacauauggggcaugucccaaguauguuaagcaaaacacccugaaguuggcaacagggaugcggaauguaccagagaaacaaacuagaggccuauucggcgcaauagcagguuucauagaaaaugguugggagggaaugauagacgguugguacgguuucaggcaucaaaauucugagggcacaggacaagcagcagaucuuaaaagcacucaagcagccaucgaccaaaucaaugggaaacugaauaggguaaucgagaagacgaacgagaaauuccaucaaaucgaaaaggaauucucagaaguagaagggagaauucaggaccucgagaaauacguugaagacacuaaaauagaucucuggucuuacaaugcggagcuucuugucgcucuggagaaccaacauacaauugaucugacugacucggaaaugaacaaacuguuugaaaaaacaaggaggcaacugagggaaaaugcugaggacaugggcaaugguugcuucaaaauauaccacaaaugugacaaugcuugcauagggucaaucagaaaugggacuuaugaccaugauguauacagagacgaagcauuaaacaaccgguuucagaucaaagguguugaacugaagucaggauacaaagacuggauccuguggauuuccuuugccauaucaugcuuuuugcuuuguguuguuuugcugggguucaucaugugggccugccagaaaggcaacauuaggugcaacauuugcauuuga

SEQ ID NO: 32633 - RNA, 1701 nt, Artificial Sequence
  derived and/or modified CDS sequence (wt) from hemagglutinin__InfluenzaA__ABC67576
augaagacuaucauugcuuugagcuacauuuuaugucugguuuucgcucaaaaacuucccggaaaugacaacagcauggcaacgcugugccugggacaccaugcagugccaaacggaacgcuagugaaaacaaucacgaaugaccaaauugaagugacuaaugcuacugagcugguucagaguuccucaacagguagaauaugcgacaguccucaccgaauccuugauggagaaaacugcacacugauagaugcucuauugggagacccucauugugauggcuuccaaaauaaggaaugggaccuuuuuguugaacgcagcaaagccuacagcaacuguuacccuuaugaugugccggauuaugccucccuuaggucacuaguugccucauccggcacccuggaguuuaacaaugaaagcuucaauuggacuggagucgcucagaauggaacaagcuaugcuugcaaaaggagaucuauuaaaaguuucuuuaguagauugaauugguugcaccaauuaaaauacaaauauccagcacugaacgugacuaugccaaacaaugacgaauuugacaaauuguacauuugggggguucaccacccgaguacggacagugaccaaaccagccuauaugcucaagcaucagggagagucacagucucuaccaaaagaagccaacaaacuguaaucccgaauaucggaucuagacccuggguaaggggugucuccagcagaauaagcaucuauuggacaauaguaaaaccgggagacauacuuuugauuaacagcacagggaaucuaauugcuccucgggguuacuucaaaauacgaagugggaaaagcucaauaaugaggucagaugcacccauuggcaaaugcaauucugaaugcaucacuccaaauggaagcauucccaaugacaaaccauuucaaaauguaaacaggaucacauauggggccugucccagauauguuaagcaaaacacucugaaauuggcaacagggaugcggaauguaccagagaagcaaacuagaggcauauucggcgcaaucgcagguuucauagaaaaugguugggagggaaugguagacgguugguacgguuucaggcaucaaaauucugagggcacaggacaagcagcagaucuuaaaagcacucaagcagcaaucaaccaaaucaacgggaaacugaauagguuaaucgagaaaacgaacgagaaauuccaucaaauugaaaaagaauucucagaaguagaagggagaauucaggaccucgagaaauauguugaggacacuaaaauagaucucuggucguacaacgcggagcuucuuguugcccuggagaaccaacauacaauugaucuaacugacucagaaaugaacaaacuguuugaaagaacaaggaagcaacugagggaaaaugcugaggauaugggcaaugguuguuucaaaauauaccacaaaugugacaaugccugcauagggucaaucagaaauggaacuuaugaccaugauguauacagagacgaagcauuaaacaaccgguuccagaucaaagguguugagcugaagucaggauacaaagauuggauccuauggauuuccuuugccauaucauguuuuuugcuuuguguuguuuugcugggguucaucaugugggccugccaaaaaggcaacauuaggugcaacauuugcauuuga

SEQ ID NO: 32634 - RNA, 1701 nt, Artificial Sequence
  derived and/or modified CDS sequence (wt) from hemagglutinin__InfluenzaA__ABC67587
augaagacuaucauugcuuugagcuacauucuaugucugguuuucgcucaaaaacuucccggaaaugacaacagcacggcaacgcugugccuugggcaccaugcaguaccaaacggaacgauagugaaaacaaucacgaaugaccaaauugaaguuacuaaugcuacugagcugguucagaguuccucaacagguggaauaugcgacaguccucaucagauccuugauggagaaaacugcacacuaauagaugcucuauugggagacccucagugugauggcuuccaaaauaagaaaugggaccuuuuuguugaacgcagcaaagccuacagcaacuguuacccuuaugaugugccggauuaugccucccuuaggucacuaguugccucauccggcacacuggaguuuaacaaugaaagcuucaauuggacuggagucacucaaaauggaacaagcucugcuugcaaaaggagaucuaauaacaguuucuuuaguagauugaauugguugacccauuuaaaauucaaauacccagcauugaacgugacuaugccaaacaaugaaaaauuugacaaauuguacauuugggggguucaccacccggguacggacaaugaccaaaucagccuauaugcucaagcaucaggaagaaucacagucucuaccaaaagaagccaacaaacuguaaucccgaauaucggaucuagacccaggguaagggauauccccagcagaauaagcaucuauuggacaauaguaaaaccgggagacauacuuuugauuaacagcacagggaaucuaauugcuccucgggguuacuucaaaauacgaagugggaaaagcucaauaaugagaucagaugcacccauuggcaaaugcaauucugaaugcaucacuccaaauggaagcauucccaaugacaaaccauuucaaaauguaaacaggaucacauaugggcccugucccagauauguuaagcaaaacacucugaaauuggcaacagggaugcgaaauguaccagagaaacaaacuagaggcauauuuggcgcaaucgcggguuucauagaaaaugguugggagggaaugguggaugguugguacgguuucaggcaucaaaauucugagggaauaggacaagcagcagaucucaaaagcacucaagcagcaaucaaccaaaucaaugggaagcugaauagguugaucgggaaaaccaacgagaaauuccaucagauugaaaaagaauucucagaaguagaagggagaauucaggaccucgagaaauauguugaggacacuaaaauagaucucuggucauacaacgcggagcuucuuguugcccuggagaaccaacauacaauugaucuaacugacucagaaaugaacaaacuguuugaaagaacaaagaagcaacugagggaaaaugcugaggauaugggcaaugguuguuucaaaauauaccacaaaugugacaaugccugcauagggucaaucagaaauggaacuuaugaccaugauguauacagagaugaagcauuaaacaaccgguuccagaucaaagguguugagcugaagucaggauacaaagauuggauccuauggauuuccuuugccauaucauguuuuuugcuuuguguugcuuuguugggguucaucaugugggccugccaaaaaggcaacauuaggugcaacauuugcauuuga

SEQ ID NO: 32635 - RNA, 1701 nt, Artificial Sequence; identical to SEQ ID NO: 32330
  derived and/or modified CDS sequence (wt) from hemagglutinin__InfluenzaA__ABC67598

SEQ ID NO: 32636 - RNA, 1701 nt, Artificial Sequence
  derived and/or modified CDS sequence (wt) from hemagglutinin__InfluenzaA__ABC67609
augaagacuaucauugcuuugagcuacauuuuaugccugguuuucgcucaaaaacuucccggaaaugacaacagcacggcaacgcugugucuggggcaucaugcagugccaaacggaacgcuagugaaaacaaucacgaaugaccaaauugaaguaacuaaugcuacugagcugguucagaguuccucaacagguagaauaugcgacaguccucaccaaauccuugauggagaaaacugcacacuaauagaugcucuauugggagacccucauugugauggcuuccaaaauaaggaaugggaccuuuuuguugaacgcagcaaagccuacagcaacuguuacccuuaugaugugccggauuaugucucccuuaggucacuaguugccucaucaggcacgcuggaguuuaacaaugaaagcuucaauuggacuggagucgcucagaauggaacaagcucugcuugcaaaaggagaucugauaaaaguuucuuuaguagauugaauugguugcaccaauuaaaauacaaauauccagcacugaacgugacuaugccaaacaaugaaaaauuugacaaauuguacauuugggggguucaccacccggguacagacagugaccaaaucagccuauaugcucaagcaucggggagagucacagucucuaccaaaagaagccaacaaacuguaaucccgaauaucggaucuagacccuggguaaggggugucuccagcagaauaagcaucuauuggacaauaguaaaaccgggagacauacuuuugauuaacagcacagggaaucuaauugcuccucgggguuacuucaaaauacgaagugggaaaagcucaauaaugaggucagaugcacccauuggcaaaugcaauucugaaugcaucaccccaaauggaagcauucccaaugacaaaccauuucaaaauguaaacaggaucacauauggggccugucccagauauguuaagcaaaacacucugaaauuggcaacagggaugcggaaugugccagagaaacaaacuagaggcauauucggugcaaucgcgggcuucauagaaaaugguugggagggaaugauggacgguugguacgguuucaggcaucaaaauucugagggcacagggcaagcagcagaucuuaaaagcacucaagcagcaaucaaccaaaucaacgggaaacugaauagguuaaucgagaaaacgaacgagaaauuccaucaaauugaaaaagaauucucagaaguagaagggagaauucaggaccucgagaaauauguugaggacacuaaaauagaucucuggucguacaaugcggagcuucuuguugcccuggagaaccaacauacaauugaucuaacugacucagaaaugaacaaacuguuugaaagaacaaagaagcaacugagggaaaaugcugaggauaugggcaaugguuguuucaaaauauaccacaaaugugacaaugccugcauagggucaaucagaaauggaacuuaugaccaugauguauacagagacgaagcauugaacaaccgguuccagaucaaagguguugagcugaagucaggauacaaagauuggguccuauggauuuccuuugccauaucauguuuuuugcuuuguauuguuuugcugggguucaucaugugggccugccaaaaaggcaacauuaggugcaacauuugcauuuga

SEQ ID NO: 32637 - RNA, 1701 nt, Artificial Sequence; identical to SEQ ID NO: 32574
  derived and/or modified CDS sequence (wt) from hemagglutinin__InfluenzaA__ABC67620

SEQ ID NO: 32638 - RNA, 1701 nt, Artificial Sequence; identical to SEQ ID NO: 32574
  derived and/or modified CDS sequence (wt) from hemagglutinin__InfluenzaA__ABC67631

SEQ ID NO: 32639 - RNA, 1701 nt, Artificial Sequence; identical to SEQ ID NO: 32574
  derived and/or modified CDS sequence (wt) from hemagglutinin__InfluenzaA__ABC67642

SEQ ID NO: 32640 - RNA, 1701 nt, Artificial Sequence
  derived and/or modified CDS sequence (wt) from hemagglutinin__InfluenzaA__ABC67653
augaagacuaucauugcuuugagcuacauuuuaugccugguuuucgcucaaaaacuucccggaaaugacaacagcacggcaacgcugugucuggggcaucaugcagugccaaacggaacgcuagugaaaacaaucacgaaugaccaaauugaaguaacuaaugcuacugagcugguucagaguuccucaacagguagaauaugcgacaguccucaccaaauccuugauggagaaaacugcacgcuaauagaugcucuauugggagacccucauugugauggcuuccaaaauaaggaaugggaccuuuuuguugaacgcagcaaagccuacagcaacuguuacccuuaugaugugccggauuaugucucccuuaggucacuaguugccucaucaggcacgcuggaguuuaacaaugaaagcuucaauuggacuggagucgcucagaauggaacaagcucugcuugcaaaaggagaucugauaaaaguuucuuuaguagauugaauugguugcaccaauuaaaauacaaauauccagcacugaacgugacuaugccaaacaaugaaaaauuugacaaauuguacauuugggggguucaccacccggguacagacagugaccaaaucagccuauaugcucaagcaucggggagagucacagucucuaccaaaagaagccaacaaacuguaaucccgaauaucggaucuagacccuggguaaggggugucuccagcagaauaagcaucuauuggacaauaguaaaaccgggagacauacuuuugauuaacagcacagggaaucuaauugcuccucgggguuacuucaaaauacgaagugggaaaagcucaauaaugaggucagaugcacccauuggcaaaugcaauucugaaugcaucacuccaaauggaagcauucccaaugacaaaccauuucaaaauguaaacaggaucacauauggggccugucccagauauguuaagcaaaacacucugaaauuggcaacagggaugcggaaugugccagagaaacaaacuagaggcauauucggugcaaucgcgggcuucauagaaaaugguugggagggaaugauggacgguugguacgguuucaggcaucaaaauucugagggcacagggcaagcagcagaucuuaaaagcacucaagcagcaaucaaccaaaucaacgggaaacugaauagguuaaucgagaaaacgaacgagaaauuccaucaaauugaaaaagaauucucagaaguagaagggagaauucaggaccucgagaaauauguugaggacacuaaaauagaucucuggucguacaaugcggagcuucuuguugcccuggagaaccaacauacaauugaucuaacugacucagaaaugaacaaacuguuugaaagaacaaagaagcaacugagggaaaaugcugaggauaugggcaaugguuguuucaaaauauaccacaaaugugacaaugccugcauagggucaaucagaaauggaacuuaugaccaugauguauacagagacgaagcauugaacaaccgguuccagaucaaagguguugagcugaagucaggauacaaagauuggguccuauggauuuccuuugccauaucauguuuuuugcuuuguguuguuuugcugggguucaucaugugggccugccaaaaaggcaacauuaggugcaacauuugcauuuga

SEQ ID NO: 32641 - RNA, 1701 nt, Artificial Sequence
  derived and/or modified CDS sequence (wt) from hemagglutinin__InfluenzaA__ABC67697
augaagacuaucauugcuuugagcuacauucuaugucugguuuucgcucaaaaacuucccggaaaugacaacagcacggcaacgcugugccuugggcaccaugcaguaccaaacggaacgauagugaaaacaaucacgaaugaccaaauugaaguuacuaaugcuacugagcugguucagaguuccucaacaggugaaauaugcgacagcccucaucagauccuugauggagaaaacugcacacuaauagaugcucuauugggagacccucagugugauggcuuccaaaauaaggaaugggaccuuuuuguugaacgcagcaaagccuacagcaacuguuacccuuaugaugugccggauuaugccucccuuaggucacuaguugccucauccggcacacuggaguuuaacaaugaaagcuucaauuggacuggagucacucaaaauggaacaagcucugcuugcaaaaggagaucuaauaacaguuucuuuaguagauugaauugguugacccacuuaaaauucaaauacccagcauugaacgugacuaugccaaacaaugaaaaauuugacaaauuguacauuugggggguucaccacccggguacggacaaugaccaaaucuuccuguaugcucaagcaucaggaagaaucacagucucuaccaaaagaagccaacaaacuguaaucccgaauaucggaucuagacccagaguaaggaauauccccagcagaauaagcaucuauuggacaauaguaaaaccgggagacauacuuuugauuaacagcacagggaaucuaauugcuccuagggguuacuucaaaauacgaagugggaaaagcucaauaaugagaucagaugcacccauuggcaaaugcaauucugaaugcaucacuccaaauggaagcauucccaaugacaaaccauuucaaaauguaaacaggaucacauauggggccugucccagauauguuaagcaaaacacucugaaauuggcaacagggaugcgaaauguaccagagaaacaaacuagaggcauauuuggcgcaaucgcggguuucauagaaaaugguugggagggaaugguggaugguugguacgguuucaggcaucaaaauucugagggaauaggacaagcagcagaucucaaaagcacucaagcagcaaucaaucaaaucaaugggaagcugaauagguugaucgggaaaaccaacgagaaauuccaucagauugaaaaagaauucucagaaguagaagggagaauucaggaccucgagaaauauguugaggacacuaaaauagaucucuggucauacaacgcggagcuucuuguugcccuggagaaccaacauacaauugaucuaacugacucagaaaugaacaaacuguuugaaagaacaaagaagcaacugagggaaaaugcugaggauaugggcaaugguuguuucaaaauauaccacaaaugugacaaugccugcauaggaucaaucagaaauggaacuuaugaccaugauguauacagagaugaagcauuaaacaaccgguuccagaucaaaggcguugagcugaaaucaggauacaaagauuggauccuauggauuuccuuugccauaucauguuuuuugcuuuguguugcuuuguugggguucaucaugugggccugccaaaaaggcaacauuaggugcaacauuugcauuuga

SEQ ID NO: 32642 - RNA, 1701 nt, Artificial Sequence
  derived and/or modified CDS sequence (wt) from hemagglutinin__InfluenzaA__ABC67708
augaagacuaucauugcuuugagcuacauucuaugucugguuuucgcucaaaaacuucccggaaaugacaacagcacggcaacgcugugccuugggcaccaugcaguaccaaacggaacgauagugaaaacaaucacgaaugaccaaauugaaguuacuaaugcuaccgagcugguucagaguuccucaacagguggaauaugcgacaguccucaucagauccuugauggagaaaacugcacacuaauagaugcucuauugggagacccucagugugauggcuuccaaaauaagaaaugggaccuuuuuguugaacgcagcaaagccuacagcaacuguuacccuuaugaugugccggauuaugccucccuuaggucacuaguugccucauccggcacacuggaguuuaacaaugaaagcuucaauuggacuggagucacucaaaauggaacaagcucugcuugcaaaaggagaucuaauaacaguuucuuuaguagauugaauugguugacccacuuaaaauucaaauacccagcauugaacgugacuaugccaaacaaugaaaaauuugacaaauuguacauuugggggguucaccacccggguacggacaaugaccaaaucuuccuguaugcucaagcaucaggaagaaucacagucucuaccaaaagaagccaacaaacuguaaucccgaauaucggaucuagacccagaguaaggaauauccccagcagaauaagcaucuauuggacaauaguaaaaccgggagacauacuuuugauuaacagcacagggaaucuaauugcuccuagggguuacuucaaaauacgaagugggaaaagcucaauaaugagaucagaugcacccauuggcaaaugcaauucugaaugcaucacuccaaauggaagcauucccaaugacaaaccauuucaaaauguaaacaggaucacauauggggccugucccagauauguuaagcaaaacacucugaaauuggcaacagggaugcgaaauguaccagagaaacaaacuagaggcauauuuggcgcaaucgcggguuucauagaaaaugguugggagggaaugguggaugguugguacgguuucaggcaucaaaauucugagggaauaggacaagcagcagaucucaaaagcacucaagcagcaaucaaucaaaucaaugggaagcugaauagguugaucgggaaaaccaacgagaaauuccaucagauugaaaaagaauucucagaaguagaagggagaauucaggaccucgagaaauauguugaggacacuaaaauagaucucuggucauacaacgcggagcuucuuguugcccuggagaaccaacauacaauugaucuaacugacucagaaaugaacaaacuguuugaaagaacaaagaagcaacugagggaaaaugcugaggauaugggcaaugguuguuucaaaauauaccacaaaugugacaaugccugcauaggaucaaucagaaauggaacuuaugaccaugauguauacagagaugaagcauuaaacaaccgguuccagaucaaaggcguugagcugaagucaggauacaaagauuggauccuauggauuuccuuugccauaucauguuuuuugcuuuguguugcuuuguugggguucaucaugugggccugccaaaaaggcaacauuaggugcaacauuugcauuuga

SEQ ID NO: 32643 - RNA, 1701 nt, Artificial Sequence
  derived and/or modified CDS sequence (wt) from hemagglutinin__InfluenzaA__ABC67719
augaagacuaucauugcuuugagcuacauucuaugucugguuuucgcucaaaaacuucccggaaaugacaacagcacggcaacgcugugccuugggcaccaugcaguaccaaacggaacgauagugaaaacaaucacgaaugaccaaauugaaguuacuaaugcuacugagcugguucagaguuccucaacagguggaauaugcgacaguccucaucagauccuugauggagaaaacugcacacuaauagaugcucuauugggagacccucagugugauggcuuccaaaauaagaaaugggaccuuuuuguugaacgcagcaaagccuacagcaacuguuacccuuaugaugugccggauuaugccucccuuaggucacuaguugccucauccggcacacuggaguuuaacaaugaaagcuucaauuggacuggagucacucaaaauggaacaagcucugcuugcaaaaggagaucuaauaacaguuucuuuaguagauugaauugguugacccacuuaaaauucaaauacccagcauugaacgugacuaugccaaacaaugaaaaauuugacaaauuguacauuugggggguucaccacccggguacggacaaugaccaaaucuuccuguaugcucaagcaucaggaagaaucacagucucuaccaaaagaagccaacaaacuguaaucccgaauaucggaucuagacccagaguaaggaauauccccagcagaauaagcaucuauuggacaauaguaaaaccgggagacauacuuuugauuaacagcacagggaaucuaauugcuccuagggguuacuucaaaauacgaagugggaaaagcucaauaaugagaucagaugcacccauuggcaaaugcaauucugaaugcaucacuccaaauggaaguauucccaaugacaaaccauuucaaaauguaaacaggaucacauauggggccugucccagauauguuaagcaaaacacucugaaauuggcaacagggaugcgaaauguaccagagaaacaaacuagaggcauauuuggcgcaaucgcggguuucauagaaaaugguugggagggaaugguggaugguugguacgguuucaggcaucaaaauucugagggaauaggacaagcagcagaucucaaaagcacucaagcagcaaucaaucaaaucaaugggaagcugaauagguugaucgggaaaaccaacgagaaauuccaucagauugaaaaagaauucucagaaguagaagggagaauucaggaccucgagaaauauguugaggacacuaaaauagaucucuggucauacaacgcagagcuucuuguugcccuggagaaucaacauacaauugaucuaacugacucagaaaugaacaaacuauuugaaagaacaaagaagcaacugagggaaaaugcugaggauaugggcaaugguuguuucaaaauauaccacaaaugugacaaugccugcauaggaucaaucagaaauggaacuuaugaccaugauguauacagagaugaagcauuaaacaaccgguuccagaucaaaggcguugagcugaagucaggauacaaagauuggauccuauggauuuccuuugccauaucauguuuuuugcuuuguguugcuuuguugggguucaucaugugggccugccaaaaaggcaacauuaggugcaacauuugcauuuga

SEQ ID NO: 32644 - RNA, 1701 nt, Artificial Sequence; identical to SEQ ID NO: 32643
  derived and/or modified CDS sequence (wt) from hemagglutinin__InfluenzaA__ABC67733

SEQ ID NO: 32645 - RNA, 1701 nt, Artificial Sequence
  derived and/or modified CDS sequence (wt) from hemagglutinin__InfluenzaA__ABC67806
augaagacuaucauugcuuugagcuacauucuaugucugguuuucgcucaaaaacuucccggaaaugacaacagcacggcaacgcugugccuugggcaccaugcaguaccaaacggaacgauagugaaaacaaucacgaaugaccaaauugaaguuacuaaugcuacugagcugguucagaguuccucaacagguggaauaugcgacaguccucaucagauccuugauggagaaaacugcacacuaauagaugcucuauugggagacccucagugugauggcuuccaaaauaagaaaugggaccuuuuuguugaacgcagcaaagccuacagcaacuguuacccuuaugaugugccggauuaugccucccuuaggucacuaauugccucauccggcacacuggaguuuaacaaugaaagcuucaauuggacuggagucacucaaaauggaacaagcucugcuugcaaaaggagaucuaauagcaguuucuuuaguagauugaauugguugacccacuuaaaauucaaauacccagcauugaacgugacuaugccaaacaaugaagaauuugacaaauuguacauuugggggguucaccacccggguacauacaaugaccaaaucagccuauaugcucaagcaucaggaagaaucacagucucuaccaaaagaagccaacaaacuguaaucccgaauaucgggucuagacccaggguaagggauauccccagcagaauaagcaucuauuggacaauaguaaaaccgggagacauacuuuugauuaacagcacagggaaucuaauugcuccucgggguuacuucaaaauacgaagugggaaaagcucaauaaugagaucagaugcacccauuggcaaaugcaauucugaaugcaucacuccaaauggaagcauucccaaugacaaaccauuucaaaauguaaacaggaucacauauggggccugucccagauaugucaagcaaaacacucugaaauuggcaacagggaugcgaaauguaccagagaaacaaacuagaggcauauuuggcgcaaucgcggguuucauagaaaaugguugggagggaaugguggaugguugguacgguuucaggcaucaaaauucugagggaauaggacaagcagcagaucucaaaagcacucaagcagcaaucgaccaaaucaaugggaagcugaauagguugaucgggaaaaccaacgagaaauuccaucagauugaaaaagaauucucagaaguagaagggagaauucaggaccucgagaaauauguugaggacacuaaaauagaucucuggucauacaacgcggagcuucuuguugcccuggagaaccaacauacaauugaucuaacugacucagaaaugaacaaacuguuugaaagaacaaagaagcaacugagggaaaaugcugaggauaugggcaaugguuguuucaaaauauaccacaaaugugacaaugccugcauagggucaaucagaaauggaacuuaugaccaugauguauacagagaugaagcauuaaacaaccgguuccagaucaaagguguugagcugaagucaggauacaaagauuggauccuauggauuuccuuugccauaucauguuuuuugcuuuguguugcuuuguugggguucaucaugugggccugccaaaaaggcaacauuaggugcaacauuugcauuuga

SEQ ID NO: 32646 - RNA, 1701 nt, Artificial Sequence; identical to SEQ ID NO: 32532
  derived and/or modified CDS sequence (wt) from hemagglutinin__InfluenzaA__ABC67817

SEQ ID NO: 32647 - RNA, 1701 nt, Artificial Sequence
  derived and/or modified CDS sequence (wt) from hemagglutinin__InfluenzaA__ABC67828
augaagacuaucauugcuuugagcuacauucuaugucugguuuucgcucaaaaacuucccggaaaugacaacagcacggcaacgcugugccuugggcaccaugcaguaccaaacggaacgauagugaaaacaaucacgaaugaccaaauugaaguuacuaaugcuacugagcugguucagaguuccucaacagguggaauaugcgacaguccucaucagauccuugauggagaaaacugcacacuaauagaugcucuauugggagacccucagugugauggcuuccaaaauaagaaaugggaccuuuuuguugaacgcagcaaagccuacagcaacuguuacccuuaugaugugccggauuaugccucccuuaggucacuaguugccucauccggcacacuggaguuuaacaaugaaagcuucaauuggacuggagucacucaaaauggaacaagcucugcuugcaaaaggagaucuaauaacaguuucuuuaguagauugaauugguugacccacuuaaaauucaaauacccagcauugaacgugacuaugccaaacaaugaaaaauuugacaaauuguacauuugggggguucaccacccggguacggacaaugaccaaaucuuccuguaugcucaagcaucaggaagaaucacagucucuaccaaaagaagccaacaaacuguaaucccgaauaucggaucuagacccagaguaaggaauauccccagcagaauaagcaucuauuggacaauaguaaaaccgggagacauacuuuugauuaacagcacagggaaucuaauugcuccuagggguuacuucaaaauacgaagugggaaaagcucaauaaugagaucagaugcacccauuggcaaaugcaauucugaaugcaucacuccaaauggaagcauucccaaugacaaaccauuucaaaauguaaacaggaucacauauggggccugucccagauauguuaagcaaaacacucugaaauuggcaacagggaugcgaaauguaccagagaaacaaacuagaggcauauuuggcgcaaucgcggguuucauagaaaaugguugggagggaaugguggaugguugguacgguuucaggcaucaaaauucugagggaauaggacaagcagcagaucucaaaagcacucaagcagcaaucaaucaaaucaaugggaagcugaauagguugaucgggaaaaccaacgagaaauuccaucagauugaaaaagaauucucagaaguagaagggagaauucaggaccucgagaaauauguugaggacacuaaaauagaucucuggucauacaacgcggagcuucuuguugcccuggagaaccaacauacaauugaucuaacugacucagaaaugaacaaacuguuugaaagaacaaagaagcaacugagggaaaaugcugaggauaugggcaaugguuguuucaaaauauaccacaaaugugacaaugccugcauaggaucaaucagaaauggaacuuaugaccaugauguauacagagaugaagcauuaaacaaccgguuccagaucaaaggcguugagcugaagucaggauacaaagauuggauccuauggauuuccuuugccauaucauguuuuuugcuuuguguugcuuuguugggguucaucaugugggccugccaaaaaggcaacauuaggugcaacauuugcauuuga

SEQ ID NO: 32648 - RNA, 1701 nt, Artificial Sequence; identical to SEQ ID NO: 32506
  derived and/or modified CDS sequence (wt) from hemagglutinin__InfluenzaA__ABC67839

SEQ ID NO: 32649 - RNA, 1701 nt, Artificial Sequence
  derived and/or modified CDS sequence (wt) from hemagglutinin__InfluenzaA__ABC67850
augaagacuaucauugcuuugagcuacauuuuaugccugguuuucgcucaaaaacuucccggaaaugacaacagcacggcaacgcugugucuggggcaucaugcagugccaaacggaacgcuagugaaaacaaucacgaaugaccaaauugaaguaacuaaugcuacugagcugguucagaguuccucaacagguagaauaugcgacaguccucaccaaauccuugauggagaaaacugcacacuaauagaugcucuauugggagacccucauugugauggcuuccaaaauaaggaaugggaccuuuuuguugaacgcagcaaagccuacagcaacuguuacccuuaugaugugccggauuaugucucccuuaggucacuaguugccucaucaggcacgcuggaguuuaacaaugaaagcuucaauuggacuggagucgcucagaauggaacaagcucugcuugcaaaaggagaucugauaaaaguuucuuuaguagauugaauugguugcaccaauuaaaauacaaauauccagcacugaacgugacuaugccaaacaaugaaaaauuugacaaauuguacauuugggggguucaccacccggguacagacagugaccaaaucagccuauaugcucaagcaucggggagagucacagucucuaccaaaagaagccaacaaacuguaaucccgaauaucggaucuagacccugggcaaggggugucuccagcagaauaagcauccauuggacaauaguaaaaccgggagacauacuuuugauuaacagcacagggaaucuaauugcuccucgggguuacuucaaaauacgaagugggaaaagcucaauaaugaggucagaugcacccauuggcaaaugcaauucugaaugcaucacuccaaauggaagcauucccaaugacaaaccauuucaaaauguaaacaggaucacauauggggccugucccagauauguuaagcaaaacacucugaaauuggcaacagggaugcggaaugugccagagaaacaaacuagaggcauauucggugcaaucgcgggcuucauagaaaaugguugggagggaaugauggacgguugguacgguuucaggcaucaaaauucugagggcacagggcaagcagcagaucuuaaaagcacucaagcagcaaucaaccaaaucaacgggaaacugaauagguuaaucgagaaaacgaacgagaaauuccaucaaauugaaaaagaauucucagaaguagaagggagaauucaggaccucgagaaauauguugaggacacuaaaauagaucucuggucguacaaugcggagcuucuuguugcccuggagaaccaacauacaauugaucuaacugacucagaaaugaacaaacuguuugaaagaacaaagaagcaacugagggaaaaugcugaggauaugggcaaugguuguuucaaaauauaccacaaaugugacaaugccugcauagggucaaucagaaauggaacuuaugaccaugauguauacagagacgaagcauugaacaaccgguuccagaucaaagguguugagcugaagucaggauacaaagauuggguccuauggauuuccuuugccauaucauguuuuuugcuuuguauuguuuugcugggguucaucaugugggccugccaaaaaggcaacauuaggugcaacauuugcauuuga

SEQ ID NO: 32650 - RNA, 1701 nt, Artificial Sequence; identical to SEQ ID NO: 32506
  derived and/or modified CDS sequence (wt) from hemagglutinin__InfluenzaA__ABC67861

SEQ ID NO: 32651 - RNA, 1701 nt, Artificial Sequence; identical to SEQ ID NO: 32574
  derived and/or modified CDS sequence (wt) from hemagglutinin__InfluenzaA__ABC67883

SEQ ID NO: 32652 - RNA, 1701 nt, Artificial Sequence
  derived and/or modified CDS sequence (wt) from hemagglutinin__InfluenzaA__ABC67894
augaagacuaucauugcuuugagcuacauuuuaugccugguuuucgcucaaaaacuucccggaaaugacaacagcacggcaacgcugugucuggggcaucaugcagugccaaacggaacgcuagugaaaacaaucacgaaugaccaaauugaaguaacuaaugcuacugagcugguucagaguuccucaacagguagaauaugcgacaguccucaccaaauccuugauggagaaaacugcacacuaauagaugcucuauugggagacccucauugugauggcuuccaaaauaaggaaugggaccuuuuuguugaacgcaguaaagccuacagcaacuguuacccuuaugaugugccggauuaugucucccuuaggucacuaguugccucaucaggcacgcuggaguuuaacaaugaaagcuucaauuggacuggagucgcucagaauggaacaagcucugcuugcaaaaggagaucugauaaaaguuucuuuaguaaauugaauugguugcaccaauuaaaauacaaauauccagcacugaacgugacuaugccaaacaaugaaaaauuugacaaauuguacauuugggggguucaccacccggguacagacagugaccaaaucagccuauaugcucaagcaucagggagagucacagucucuaccaaaagaagccaacaaacuguaaucccgaauaucggaucuagacccuggguaaggggugucuccagcagaauaagcaucuauuggacaauaguaaaaccgggagacauacuuuugauuaacagcacagggaaucuaauugcuccucgggguuacuucaaaauacgaagugggaaaagcucaauaaugaggucagaugcacccauuggcaaaugcaauucugaaugcaucacuccaaauggaagcauucccaaugacaaaccauuucaaaauguaaacaggaucacauauggggccugucccagauauguuaagcaaaacacucugaaauuggcaacagggaugcggaaugugccagagaaacaaacuagaggcauauucggugcaaucgcgggcuucauagaaaaugguugggagggaaugauggacgguugguacgguuucaggcaucaaaauucugagggcacagggcaagcagcagaucuuaaaagcacucaagcagcaaucaaccaaaucaacgggaaacugaauagguuaaucgagaaaacgaacgagaaauuccaucaaauugaaaaagaauucucagaaguagaagggagaauucaggaccucgagaaauauguugaggacacuaaaauagaucucuggucguacaaugcggagcuucuuguugcccuggagaaccaacauacaauugaucuaacugacucagaaaugaacaaacuguuugaaagaacaaagaagcaacugagggaaaaugcugaggauaugggcaaugguuguuucaaaauauaccacaaaugugacaaugccugcauagggucaaucagaaauggaacuuaugaccaugauguauacagagacgaagcauugaacaaccgguuccagaucaaagguguugagcugaagucaggauacaaagauuggguccuauggauuuccuuugccauaucauguuuuuugcuuuguauuguuuugcugggguucaucaugugggccugccaaaaaggcaacauuaggugcaacauuugcauuuga

SEQ ID NO: 32653 - RNA, 1701 nt, Artificial Sequence; identical to SEQ ID NO: 32574
  derived and/or modified CDS sequence (wt) from hemagglutinin__InfluenzaA__ABC67967

SEQ ID NO: 32654 - RNA, 1701 nt, Artificial Sequence; identical to SEQ ID NO: 32574
  derived and/or modified CDS sequence (wt) from hemagglutinin__InfluenzaA__ABC67978

SEQ ID NO: 32655 - RNA, 1701 nt, Artificial Sequence
  derived and/or modified CDS sequence (wt) from hemagglutinin__InfluenzaA__ABC67989
augaagacuaucauugcuuugagcuacauuuuaugccugguuuucgcucaaaaacuucccggaaaugacaacagcacggcaacgcugugucuggggcaucaugcagugccaaacggaacgcuagugaaaacaaucacgaaugaccaaauugaaguaacuaaugcuacugagcugguucagaguuccucaacagguagaauaugcgacaguccucaccaaauccuugauggagaaaacugcacacuaauagaugcucuauugggagacccucauugugauggcuuccaaaauaaggaaugggaccuuuuuguugaacgcagcaaagccuacagcaacuguuacccuuaugaugugccggauuaugucucccuuaggucacuaguugccucaucaggcacgcuggaguuuaacaaugaaagcuucaauuggacuggagucgcucagaauggaacaagcucugcuugcaaaaggagaucugauaaaaguuucuuuaguagauugaauugguugcaccaauuaaaauacaaauauccagcacugaaagugacuaugccaaacaaugaaaaauuugacaaauuguacauuugggggguucaccacccggguacagacagugaccaaaucagccuauaugcucaagcaucggggagagucacagucucuaccaaaagaagccaacaaacuguaaucccgaauaucggaucuagacccuggguaaggggugucuccagcagaauaagcaucuauuggacaauaguaaaaccgggagacauacuuuugauuaacagcacagggaaucuaauugcuccucgggguuacuucaaaauacgaagugggaaaagcucaauaaugaggucagaugcacccauuggcaaaugcaauucugaaugcaucacuccaaauggaagcauucccaaugacaaaccauuucaaaauguaaacaggaucacauauggggccugucccagauauguuaagcaaaacacucugaaauuggcaacagggaugcggaaugugccagagaaacaaacuagaggcauauucggugcaaucgcgggcuucauagaaaaugguugggagggaaugauggacgguugguacgguuucaggcaucaaaauucugagggcacagggcaagcagcagaucuuaaaagcacucaagcagcaaucaaccaaaucaacgggaaacugaauagguuaaucgagaaaacgaacgagaaauuccaucaaauugaaaaagaauucucagaaguagaagggagaauucaggaccucgagaaauauguugaggacacuaaaauagaucucuggucguacaaugcggagcuucuuguugcccuggagaaccaacauacaauugaucuaacugacucagaaaugaacaaacuguuugaaagaacaaagaagcaacugagggaaaaugcugaggauaugggcaaugguuguuucaaaauauaccacaaaugugacaaugucugcauagggucaaucagaaauggaacuuaugaccaugauguauacagagacgaagcauugaacaaccgguuccagaucaaagguguugagcugaagucaggauacaaagauuggguccuauggauuuccuuugccauaucauguuuuuugcuuuguauuguuuugcugggguucaucaugugggccugccaaaaaggcaacauuaggugcaacauuugcauuuga

SEQ ID NO: 32656 - RNA, 1701 nt, Artificial Sequence
  derived and/or modified CDS sequence (wt) from hemagglutinin__InfluenzaA__ABC68000
augaagacuaucauugcuuugagcuacauuuuaugccugguuuucgcucaagaacuucccggaaaugacaacagcacggcaacgcugugucuggggcaucaugcagugccaaacggaacgcuagugaaaacaaucacgaaugaccaaauugaaguaacuaaugcuacugagcugguucagaguuccucaacagguagaauaugcgacaguccucaccaaauccuugauggagaaaacugcacacuaauagaugcucuauugggagacccucauugugauggcuuccaaaauaaggaaugggaccuuuuuguugaacgcagcaaagccuacagcaacuguuacccuuaugaugugccggauuaugucucccuuaggucacuaguugccucaucaggcacgcuggaguuuaacaaugaaagcuucaauuggacuggagucgcucagaauggaacaagcucugcuugcaaaaggagaucugauaaaaguuucuuuaguagauugaauugguugcaccaauuaaaauacaaauauccagcacugaacgugacuaugccaaacaaugaaaaauuugacaaauuguacauuugggggguucaccacccggguacagacagugaccaaaucagccuauaugcucaagcaucggggagagucacagucucuaccaaaagaagccaacaaacuguaaucccgaauaucggaucuagacccuggguaaggggugucuccagcagaauaagcaucuauuggacaauaguaaaaccgggagacauacuuuugauuaacagcacagggaaucuaauugcuccucgggguuacuucaaaauacgaagugggaaaagcucaauaaugaggucagaugcacccauuggcaaaugcaauucugaaugcaucacuccaaauggaagcauucccaaugacaaaccauuucaaaauguaaacaggaucacauauggggccugucccagauauguuaagcaaaacacucugaaauuggcaacagggaugcggaaugugccagagaaacaaacuagaggcauauucggugcaaucgcgggcuucauagaaaaugguugggagggaaugauggacgguugguacgguuucaggcaucaaaauucugagggcacagggcaagcagcagaucuuaaaagcacucaagcagcaaucaaccaaaucaacgggaaacugaauagguuaaucgagaaaacgaacgagaaauuccaucaaauugaaaaagaauucucagaaguagaagggagaauucaggaccucgagaaauauguugaggacacuaaaauagaucucuggucguacaaugcggagcuucuuguugcccuggagaaccaacauacaauugaucuaacugacucagaaaugaacaaacuguuugaaagaacaaagaagcaacugagggaaaaugcugaggauaugggcaaugguuguuucaaaauauaccacaaaugugacaaugccugcauagggucaaucagaaauggaacuuaugaccaugauguauacagagacgaagcauugaacaaccgguuccagaucaaagguguugagcugaagucaggauacaaagauuggguccuauggauuuccuuugccauaucauguuuuuugcuuuguauuguuuugcugggguucaucaugugggccugccaaaaaggcaacauuaggugcaacauuugcauuuga

SEQ ID NO: 32657 - RNA, 1701 nt, Artificial Sequence
  derived and/or modified CDS sequence (wt) from hemagglutinin__InfluenzaA__ABC68049
augaagacuaucauugcuuugagcuacauuuuaugccugguuuucgcucaaaaacuucccggaaaugacaacagcacggcaacgcugugucuggggcaucaugcagugccaaacggaacgcuagugaaaacaaucacggaugaccaaauugaaguaacuaaugcuacugagcugguucagaguuccucaacagguagaauaugcgacaguccucaccaaauccuugauggagaaaacugcacacuaauagaugcucuauugggagacccucauugugauggcuuccaaaauaaggaaugggaccuuuuuguugaacgcagcaaagccuacagcaacuguuacccuuaugaugugccggauuaugucucccuuaggucacuaguugccucaucaggcacgcuggaguuuaacaaugaaagcuucaauuggacuggagucgcucagaauggaacaagcucugcuugcaaaaggagaucugauaaaaguuucuuuaguagauugaauugguugcaccaauuaaaauacaaauauccagcacugaacgugacuaugccaaacaaugaaaaauuugacaaauuguacguuugggggguucaccacccggguacagacagugaccaaaucagccuauaugcucaagcaucggggagagucacagucucuaccaaaagaagccaacaaacuguaaucccgaauaucggaucuagacccuggguaaggggugucuccagcaaaauaagcaucuauuggacaauaguaaaaccgggagacauacuuuugauuaacagcacagggaaucuaauugcuccucgggguuacuucaaaauacgaagugggaaaagcucaauaaugaggucagaugcacccauuggcaaaugcaauucugaaugcaucacuccaaauggaagcauucccaaugacaaaccauuucaaaauguaaacaggaucacauauggggccugucccagauauguuaagcaaaacacucugaaauuggcaacagggaugcggaaugugccagagaaacaaacuagaggcauauucggugcaaucgcgggcuucauagaaaaugguugggagggaaugauggacgguugguacgguuucaggcaucaaaauucugagggcacagggcaagcagcagaucuuaaaagcacucaagcagcaaucaaccaaaucaacgggaaacugaauagguuaaucgagaaaacgaacgagaaauuccaucaaauugaaaaagaauucucagaaguagaagggagaauucaggaccucgagaaauauguugaggacacuaaaauagaucucuggucguacaaugcggagcuucuuguugcccuggagaaccaacauacaauugaucuaacugacucagaaaugaacaaacuguuugaaagaacaaagaagcaacugagggaaaaugcugaggauaugggcaaugguuguuucaaaauauaccacaaaugugacaaugccugcauagggucaaucagaaauggaacuuaugaccaugauguauacagagacgaagcauugaacaaccgguuccagaucaaagguguugagcugaagucaggauacaaagauuggguccuauggauuuccuuugccauaucauguuuuuugcuuuguauuguuuugcugggguucaucaugugggccugccaaaaaggcaacauuaggugcaacauuugcauuuga

SEQ ID NO: 32658 - RNA, 1701 nt, Artificial Sequence; identical to SEQ ID NO: 32574
  derived and/or modified CDS sequence (wt) from hemagglutinin__InfluenzaA__ABC68060

SEQ ID NO: 32659 - RNA, 1701 nt, Artificial Sequence
  derived and/or modified CDS sequence (wt) from hemagglutinin__InfluenzaA__ABC68071
augaagacuaucauugcuuugagcuacauuuuaugccugguuuucgcucaaaaacuucccggaaaugacaacagcacggcaacgcugugucuggggcaucaugcagugccaaacggaacgcuagugaaaacaaucacgaaugaccaaauugagguaacuaaugcuacugagcugguucagaguuccucaacagguagaauaugcgacaguccucaccaaauccuugauggagaaaacugcacacuaauagaugcucuauugggagacccucauugugauggcuuccaaaauaaggaaugggaccuuuuuguugaacgcagcaaagccuacagcaacuguuacccuuaugaugugccggauuaugucucccuuaggucacuaguugccucaucaggcacgcuggaguuuaacaaugaaagcuucaauuggacuggagucgcucagaauggaacaagcucugcuugcaaaaggagaucugauaaaaguuucuuuaguagauugaauugguugcaccaauuaaaauacaaauauccagcacugaacgugacuaugccaaacaaugaaaaauuugacaaauuguacauuugggggguucaccacccggguacagacagugaccaaaucagccuauaugcucaagcaucggggagagucacagucucuaccaaaagaagccaacaaacuguaaucccgaauaucggaucuagacccuggguaaggggugucuccagcagaauaagcaucuauuggacaauaguaaaaccgggagacauacuuuugauuaacagcacagggaaucuaauugcuccucgggguuacuucaaaauacgaagugggaaaagcucaauaaugaggucagaugcacccauuggcaaaugcaauucugaaugcaucacuccaaauggaagcauucccaaugacaaaccauuucaaaauguaaacaggaucacauauggggccugucccagauauguuaagcaaaacacucugaaauuggcaacagggaugcggaaugugccagagaaacaaacuagaggcauauucggugcaaucgcgggcuucauagaaaaugguugggagggaaugauggacgguugguacgguuucaggcaucaaaauucugagggcacagggcaagcagcagaucuuaaaagcacucaagcagcaaucaaccaaaucaacgggaaacugaauagguuaaucgagaaaacgaacgagaaauuccaucaaauugaaaaagaauucucagaaguagaagggagaauucaggaccucgagaaauauguugaggacacuaaaauagaucucuggucguacaaugcggagcuucuuguugcccuggagaaccaacauacaauugaucuaacugacucagaaaugaacaaacuguuugaaagaacaaagaagcaacugagggaaaaugcugaggauaugggcaaugguuguuucaaaauauaccacaaaugugacaaugccugcauagggucaaucagaaauggaacuuaugaccauaauguauacagagacgaagcauugaacaaccgguuccagaucaaagguguugagcugaagucaggauacaaagauuggguccuauggauuuccuuugccauaucauguuuuuugcuuuguauuguuuugcugggguucaucaugugggccugccaaaaaggcaacauuaggugcaacauuugcauuuga

SEQ ID NO: 32660 - RNA, 1701 nt, Artificial Sequence
  derived and/or modified CDS sequence (wt) from hemagglutinin__InfluenzaA__ABC68082
augaagacuaucauugcuuugagcuacauucuaugucugguuuucgcucaaaaacuucccggaaaugacaacagcacggcaacgcugugccuugggcaccaugcaguaccaaacggaacgauagugaaaacaaucacgaaugaccaaauugaaguuacuaaugcuacugagcugguucagaguuccucaacagguggaauaugcgacaguccucaucagauccuugauggagaaaacugcacacuaauagaugcucuauugggagacccucagugugauggcuuccaaaauaagaaaugggaccuuuuuguugaacgcagcaaagccuacagcaacuguuacccuuaugaugugccggauuaugccucccuuaggucacuaguugccucauccggcacacuggaguuuaacaaugaaagcuucaauuggacuggagucacucaaaauggaacaagcucugcuugcaaaaggagaucuaauaacaguuucuuuaguagauugaauugguugacccacuuaaaauucaaauacccagcauugaacgugacuaugccaaacaaugaaaaauuugacaaauuguacauuugggggguucaccacccggguacggacaaugaccaaaucuuccuguaugcucaagcaucaggaagaaucacagucucuaccaaaagaagccaacaaacuguaaucccgaauaucggaucuagacccagaguaaggaauauccccagcagaauaagcaucuauuggacaauaguaaaaccgggagacauacuuuugauuaacagcacagggaaucuaauugcuccuagggguuacuucaaaauacgaagugggaaaagcucaauaaugagaucagaugcacccauuggcaaaugcaauucugaaugcaucacuccaaauggaagcauucccaaugacaaaccauuucaaaauguaaacaggaucacauauggggccugucccagauauguuaagcaaaacacucugaaauuggcaacagggaugcgaaauguaccagagaaacaaacuagaggcauauuuggcgcaaucgcggguuucauagaaaaugguugggagggaaugguggaugguugguacgguuucaggcaucaaaauucugagggaauaggacaagcagcagaucucaaaagcacucaagcagcaaucaaucaaaucaaugggaagcugaauagguugaucgggaaaaccaacgagaaauuccaucagauugaaaaagaauucucagaaguagaagggagaauucaggaccucgagaaauauguugaggacacuaaaauagaucucuggucauauaacgcggagcuucuuguugcccuggagaaccaacauacaauugaucuaacugacucagaaaugaacaaacuguuugaaagaacaaagaagcaacugagggaaaaugcugaggauaugggcaaugguuguuucaaaauauaccacaaaugugacaaugccugcauaggaucaaucagaaauggaacuuaugaccaugauguauacagagaugaagcauuaaacaaccgguuccagaucaaaggcguugagcugaagucaggauacaaagauuggauccuauggauuuccuuugccauaucauguuuuuugcuuuguguugcuuuguugggguucaucaugugggccugccaaaaaggcaacauuaggugcaacauuugcauuuga

SEQ ID NO: 32661 - RNA, 1701 nt, Artificial Sequence
  derived and/or modified CDS sequence (wt) from hemagglutinin__InfluenzaA__ABC68093
augaagacuaucauugcuuugagcuacauuuuaugccugguuuucgcucaaaaacuucccggaaaugacaacagcacggcaacgcugugccuggggcaccaugcagugccaaacggaacgcuagugaaaacaaucacgaaugaccaaauugaagugacuaaugcuacugagcugguucagaguuccucaacaaguagaauaugcgacaguccucaccaaauccuugauggagaaaacugcacacuaauagaugcucuauugggagacccucauugugauggcuuccaaaauaaggaaugggaccuuuuuguugaacgcagcaaagccuacagcaacuguuacccuuaugaugugccggauuaugucucccuuaggucacuaguugccucaucaggcacgcuggaguuuaacaaugaaagcuucaauuggacuggagucgcucagaauggaacaagcucugcuugcaaaaggagaucugauaaaaguuucuuuaguagauugaauugguugcaccaauuaaaauacaaauauccagcacugaacgugacuaugccaaacaaugaaaaauuugacaaauuguacauuugggggguucaccacccggguacagacagugaccaaaucagccuauaugcucaagcaucagggagagucacagucucuaccaaaagaagccaacaaacuguaaucccgaauaucggaucuagacccuggguaaggggugucuccagcauaauaagcaucuauuggacaauaguaaaaccgggagacauacuuuugauuaacagcacagggaaucuaauugcuccucgggguuacuucaaaauacgaagugggaaaagcucaauaaugaggucagaugcacccauuggcaaaugcaauucugaaugcaucacuccaaauggaagcauucccaauggcaaaccauuucaaaauguaaacaggaucacauauggggcaugucccagauauguuaagcaaaacacucugaaauuggcaacagggaugcggaaugugccagagaaacaaacuagaggcauauucggugcaaucgcgggcuucauagaaaaugguugggagggaaugauggacgguugguacgguuucaggcaucagaauucugagggcacagggcaagcagcagaucuuaaaagcacucaagcagcaaucaaccaaaucaacgggaaacugaauagguuaaucgagaaaacgaacgagaaauuccaucaaauugaaaaagaauucucagaaguagaagggagaauucaggaccucgagaaauaugucgaggacacuaaaauagaucucuggucguacaaugcggagcuucuuguugcccuggagaaccaacauacaauugaucuaacugacucagaaaugaacaaacuguuugaaagaacaaagaagcaacugagggaaaaugcugaggauaugggcaaugguuguuucaaaauauaccacaaaugugacaaugccugcauagggucaaucagaaauggaacuuaugaccaugauguauacagagacgaagcauugaacaaccgguuccagaucaaagguguugagcugaagucaggauacaaagauuggauccuauggauuuccuuugccacaucauguuuuuugcuuuguauuguuuuacugggguucaucaugugggccugccaaaaaggcaacauuaggugcaacauuugcauuuga

SEQ ID NO: 32662 - RNA, 1701 nt, Artificial Sequence
  derived and/or modified CDS sequence (wt) from hemagglutinin__InfluenzaA__ABC68222
augaagacuaucauugcuuugagcuacauuuuaugucugguuuucgcucaaaaacuucccggaaaugacaacagcacggcaacgcugugccuggggcaccaugcagugccaaacggaacgcuagugaaaacaaucacgaaugaccaaauugaagugacuaaugcuacugagcugguucagaguuccucaacagguggaauaugcgacaguccucaccaaauccuugauggagaaaacugcacacuaauagaugcucuauugggagacccucauugugauggcuuccaaaauaaggaaugggaccuuuuuguugaacgcagcaaagccuacagcaacuguuacccuuaugaugugccggauuaugccucccuuaggucacuaguugccucauccggcacacuggaguuuaacaaugaaagcuucaauuggacuggagucgcucagaauggaacaagcucugcuugcaaaaggagaucuaauaaaaguuucuuuaguagauugaauugguugcaccaauuaaaauacaaauacccagcacugaacgugacuaugccaaacaaugaaaaauuugacaaauuguacauuugggggguucaccacccgaguacggacagugaccaaaucagccuauaugcucaagcaccagggagagucacagucucuaccaaaagaagccaacaaacuguaaucccgaauaucggaucuagacccuggguaaggggugucuccagcagaauaagcaucuauuggacaauaguaaaaccgggagacauacuuuugauuaacugcacagggaaucuaauugcuccucgggguuacuucaaaauacgaagugggaaaagcucaauaaugaggucagaugcauccauuggcaaaugcaauucugaaugcaucacuccaaauggaagcauucccaaugacaaaccauuucaaaauguaaacaggaucacauauggggccugucccagauauguuaagcaaaacacucugaaauuggcaacagggaugcggaauguaccagagaaacaaacuagaggcauauucggcgcaaucgcggguuucauagaaaaugguugggagggaaugguggacgguugguacgguuucaggcaucaaaauucugagggcacaggacaagcagcagaucucaaaagcacucaagcagcaaucaaccaaaucaacgggaaacugaauagguuaaucgagaaaacgaacgagaaauuccaucaaauugaaaaagaauucucagaaguggaagggagaauucaggaccucgagaaauauguugaggacacuaaaauagaucucuggucguacaacgcggagcuucuuguugcccuggagaaccagcauacaauugaucuaacugacucagaaaugaacaaacuguuugaaagaacaaagaagcaacugagggaaaaugcugaggauaugggcaaugguuguuucaaaauauaccacaaaugugacaaugccugcauagggucaaucagaaaugggacuuaugaccaugauguauacagagacgaagcauuaaacaaccgguuccagaucaaagguguugagcugaagucaggauacaaagauuggauccuauggauuuccuuugccauaucauguuuuuugcuuuguguugucuugcugggguucaucaugugggccugccaaaaaggcaacauuaggugcaacauuugcauuuga

SEQ ID NO: 32663 - RNA, 1701 nt, Artificial Sequence; identical to SEQ ID NO: 32454
  derived and/or modified CDS sequence (wt) from hemagglutinin__InfluenzaA__ABC68233

SEQ ID NO: 32664 - RNA, 1707 nt, Artificial Sequence
  derived and/or modified CDS sequence (wt) from hemagglutinin__InfluenzaA__ABC72655
auggagaaaauagugcuucuuuuugcaauagucagucuuguuaaaagugaucagauuugcauugguuaccaugcaaacaacucaacagagcagguugacacaauaauggaaaagaacguuacuguuacacaugcccaagacauacuggaaaagacacacaacgggaagcucugugaucuagauggagugaagccucuaauuuugagagauuguaguguagcuggauggcuccuuggaaacccaaugugugaugaauucaucaaugugccggaauggucuuacauaguggagaagcccaauccagccaaugaccucuguuacccaggggauuucaaugacuaugaagaauugaaacaccuauugagcagaauaaaccauuuugagaaaauucagaucauccccaaaaguucuugguccagucaugaagccucaguaggagugagcucaguauguccauaucagggaaaguccuccuuuuucagaaaugugguauggcuuaucaaaaagaacaguacauacccaacaauaaagaggagcuacaauaauaccaaccaagaagaucuuuugguacugugggggauucaccauccuaaugaugcggcagagcagacaaagcucuaucaaaacccaaccaccuacauuuccguugggacaucaacacuaaaccagagauugguaccaagaauagcuacuagauccaaaguaaacgggcaaaguggacggauggaguucuucuggacaauuuuaaaaccgaaugaugcaaucaacuucgagaguaauggaaauuucauugcuccagaauaugcauacaaaauugucaagaaaggggacucaacaauuaugaaaagugaauuggaauacgguaacugcaacaccaagugucaaacuccaaugggggcgauaaacucuaguaugccauuccacaauauacacccucucaccaucggggaaugccccaaauaugugaaaucaaacagauuaguccuugcgacuggacucagaaauagcccucaaagagagaaaagaagaaaaaagagaggauuauuuggagcuauagcagguuuuauagagggaggauggcagggaaugguagaugguugguauggguaccaccauagcaaugagcaggggaguggguacgcugcagacaaagaauccacucaaaaggcaauagauggagucaccaauaaggucaacucgaucauugacaaaaugaacacucaguuugaggccguuggaagggaauuuaacaacuuagaaaggagaauagagaaucuaaacaagaagauggaagacggguuccuagaugucuggacuuauaaugcugaacuucugguucucauggaaaaugagagaacucuagacuuucaugacucaaaugucaagaaccuuuacgacaagguccgauuacagcuuagggauaaugcaaaggagcuggguaacgguuguuucgaguucuaucauaaaugugauaaugaauguauggaaaguguaagaaacggaacguaugacuacccgcaguauucagaagaagcaagacuaaaaagagaggaaauaaguggaguaaaauuggaaucaauaggaauuuaccaaauacugucaauuuauucuacaguggcgaguucccuagcacuggcaaucaugguagcuggucuauccuuauggaugugcuccaaugggucguuacaaugcagaauuugcauuuaa

SEQ ID NO: 32665 - RNA, 1701 nt, Artificial Sequence
  derived and/or modified CDS sequence (wt) from hemagglutinin__InfluenzaA__ABC84400
augaagacuaucauugcuuugagcuacauucuaugucugguuuucgcucaaaaacuucccggaaaugacaacagcacggcaacgcugugccuugggcaccaugcaguaccaaacggaacgauagugaaaacaaucacgaaugaccaaauugaaguuacuaaugcuacugagcugguucagaguuccucaacagguggaauaugcgacaguccucaucagauccuugauggagaaaacugcacacuaauagaugcucuauugggagacccucagugugauggcuuccaaaauaagaaaugggaccuuuuuguugaacgcagcaaagccuacagcaacuguuacccuuaugaugugccggauuaugccucccuuaggucacuaguugccucauccggcacacuggaguuuaacaaugaaagcuucaauuggacuggagucacucaaaauggaacaagcucugcuugcaaaaggagaucuaauaacaguuucuuuaguagauugaauugguugacccacuuaaaauucaaauacccagcauugaacgugacuaugccaaacaaugaaaaauuugacaaauuguacauuugggggguucaccacccggguacggacaaugaccaaaucagccuauaugcucaagcaucaggaagaaucacagucucuaccaaaagaagccaacaaacuguaaucccgaauaucggaucuagacccaggguaagggauauccccagcagaauaagcaucuauuggacaauaguaaaaccgggagacauacuuuugauuaacagcacagggaaucuaauugccccucgggguuacuucaaaauacgaagugggaaaagcucaauaaugagaucagaugcacccauuggcaaaugcaauucugaaugcaucacuccaaauggaagcauucccaaugacaaaccauuucaaaauguaaacaggaucacauauggggccugucccagauauguuaagcaaaacacucugaaauuggcaacagggaugcgaaauguaccagagaaacaaacuagaggcauauuuggcgcaauugcggguuucauagaaaaugguugggagggaaugguugaugguugguacgguuucaggcaucaaaauucugagggaauaggacaagcagcagaucucaaaagcacucaagcagcaaucaaccaaaucaaugggaagcugaauagguugaucggaaaaaccaacgagaaauuccaucagauugaaaaagaauucucagaaguagaagggagaauucaggaccucgagaaauauguugaggacacuaaaauagaucucuggucauacaacgcggagcuucuuguugcccuggagaaccaacauacaauugaucuaacugacucagaaaugaacaaacuguuugaaagaacaaagaagcaacugagggaaaaugcugaggauaugggcaaugguuguuucaaaauauaccacaaaugugacaaugccugcauagggucaaucagaaauggaacuuaugaccaugauguauacagagaugaagcauuaaacaaccgguuccagaucaaagguguugagcugaagucaggauacaaagauuggauccuauggauuuccuuugccauaucauguuuuuugcuuuguguugcuuuguugggguucaucaugugggccugccaaaaaggcaacauuaggugcaacauuugcauuuga

SEQ ID NO: 32666 - RNA, 1701 nt, Artificial Sequence
  derived and/or modified CDS sequence (wt) from hemagglutinin__InfluenzaA__ABC84411
augaagacuaucauugcuuugagcuacauuucaugucugguuuucgcucaaaaacuucccggaaaugacaacagcacggcaacgcugugccugggacaccaugcagugccaaacggaacgcuagugaaaacaaucacgaaugaccaaauugaagugacuaaugcuacugagcugguucagaguuccucaacagguagaauaugcgacaguccucaccgaauccuugauggagaaaacugcacacugauagaugcucuauugggagacccucauugugauggcuuccaaaauaaggaaugggaccuuuuuguugaacgcagcaaagccuacagcaacuguuacccuuaugaugugccggauuaugccucccuuaggucacuaguugccucauccggcacucuggaguuuaacaaugaaagcuucaauuggacuggagucgcucagaauggaacaagcuaugcuugcaaaaggagaucuauuaaaaguuucuuuaguagauugaauugguugcaccaauuaaaauacaaauauccagcacugaacgugacuaugccaaacaaugacaaauuugacaaauuguacauuugggggguucaccacccgaguacggacagugaccaaaccagccuauaugcucaagcaucagggagagucacagucucuaccaaaagaagccaacaaacuguaaucccgaauaucggaucuagacccuggguaaggggugucuccagcagaauaagcaucuauuggacaauaguaaaaccgggagacauacuuuugauuaacagcacagggaaucuaauugcuccucgggguuacuucaaaauacgaagugggaaaagcucaauaaugaggucagaugcacccauuggcaaaugcaauucugaaugcaucacuccaaauggaagcauucccaaugacaaaccauuucaaaauguaaacaggaucacauauggggccugucccagauauguuaagcaaaacacucugaaauuggcaacagggaugcggaauguaccagagaaacaaacuagaggcauauucggcgcaaucgcagguuucauagaaaaugguugggagggaaugguagacgguugguacgguuucaggcaccaaaauucugagggcacaggacaagcagcagaucuuaaaagcacucaagcagcaaucaaccaaaucaacgggaaacugaauagguuaaucgagaaaacgaacgagaaauuccaucaaauugaaaaagaauucucagaaguagaagggagaauucaggaccucgagaaauauguugaggacacuaaaauagaucucuggucguacaacgcggagcuucuuguugcccuggagaaccaacauacaauugaucuaacugacucagaaaugaacaaacuguuugaaagaacaaggaagcaacugagggaaaaugcugaggauaugggcaaugguuguuucaaaauauaccacaaaugugacaaugccugcauagggucaaucagaaauggaacuuaugaccaugauguauacagagacgaagcauuaaacaaccgguuccagaucaaagguguugagcugaagucaggauacaaagauuggauccuauggauuuccuuugccauaucauguuuuuugcuuuguguuguuuugcugggguucaucaugugggccugccaaaaaggcaacauuaggugcaacauuugcauuuga

SEQ ID NO: 32667 - RNA, 1701 nt, Artificial Sequence
  derived and/or modified CDS sequence (wt) from hemagglutinin__InfluenzaA__ABC84433
augaagacuaucauugcuuugagcuacauucuaugucugguuuucgcucaaaaacuucccggaaaugacaacagaacggcaacgcugugccuugggcaccaugcaguaccaaacggaacgauagugaaaacaaucacgaaugaccaaauugaaguuacuaaugcuacugagcugguucagaguuccucaacagguggaauaugcgacaguccucaucagauccuugauggagaaaacugcacacuaauagaugcucuauugggagacccucagugugauggcuuccaaaauaagaaaugggaccuuuuuguugaacgcagcaaagccuacagcaacuguuacccuuaugaugugccggauuaugccucccuuaggucacuaguugccucauccggcacacuggaguuuaacaaugaaagcuucaauuggacuggagucacucaaaauggaacaagcucugcuugcaaaaggagaucuaauaacaguuucuuuaguagauugaauugguugacccauuuaaaauucaaauacccagcauugaacgugacuaugccaaacaaugaaaaauuugacaaauuguacauuugggggguucaccacccggguacgaacaaugaccaaaucagccuauaugcucaagcaucaggaagaaucacagucucuaccaaaagaagccaacaaacuguaaucccgaauaucggaucuagacccaggguaagggauauccccagcagaauaagcaucuauuggacaauaguaaaaccgggagacauacuuuugauuaacagcacagggaaucuaauugcuccucgggguuacuucaaaauacgaagugggaaaagcucaauaaugagaucagaugcacccauuggcaaaugcaauucugaaugcaucacuccaaauggaagcauucccaaugacaaaccauuucaaaauguaaacaggaucacauauggggccugucccagauauguuaagcaaaacacucugaaauuggcaacagggaugcgaaauguaccagagaaacaaacuagaggcauauuuggcgcaaucgcggguuucauagaaaaugguugggagggaaugguggaugguugguacgguuucaggcaucaaaauucugagggaauaggacaagcagcagaucucaaaagcacucaagcagcaaucaaccaaaucaaugggaagcugaauagguugaucgggaaaaccaacgagaaauuccaucagauugaaaaagaauucucagaaguagaagggagaauucaggaccucgagaaauauguugaggacacuaaaauagaucucuggucauacaacgcggagcuucuuguugcccuggagaaccaacauacaauugaucuaacugacucagaaaugaacaaacuguuugaaagaacaaagaagcaacugagggaaaaugcugaggauaugggcaaugguuguuucaaaauauaccacaaaugugacaaugccugcauagggucaaucagaaauggaacuuaugaccaugauguauacagagaugaagcauuaaacaaccgguuccagaucaaagguguugagcugaagucaggauacaaagauuggauccuauggauuuccuuugccauaucauguuuuuugcuuuguguugcuuuguugggguucaucaugugggccugccaaaaaggcaacauuaggugcaacauuugcauuuga

SEQ ID NO: 32668 - RNA, 1701 nt, Artificial Sequence; identical to SEQ ID NO: 32574
  derived and/or modified CDS sequence (wt) from hemagglutinin__InfluenzaA__ABC84444

SEQ ID NO: 32669 - RNA, 1701 nt, Artificial Sequence
  derived and/or modified CDS sequence (wt) from hemagglutinin__InfluenzaA__ABC84498
augaagacuaucauugcuuugagcuacauucuaugucugguuuucgcucaaaaacuucccggaaaugacaacagcacggcaacgcugugccuugggcaccaugcaguaccaaacggaacgauagugaaaacaaucacgaaugaccaaauugaaguuacuaaugcuacugagcugguucagaguuccucaacagguggaauaugcgacaguccucaucagauccuugauggagaaaacugcacacuaauagaugcucuauugggagacccucagugugauggcuuccaaaauaagaaaugggaccuuuuuguugaacgcagcaaagccuacagcaacuguuacccuuaugaugugccggauuaugccucccuuaggucacuaauugccucauccggcacacuggaguuuaacaaugaaagcuucaauuggacuggagucacucaaaauggaacaagcucugcuugcaaaaggagaucuaauagcaguuucuuuaguagauugaauugguugacccacuuaaaauucaaauacccagcauugaacgugacuaugccaaacaaugaagaauuugacaaauuguacauuugggggguucaccacccggguacauacaaugaccaaaucagccuauaugcucaagcaucaggaagaaucacagucucuaccaaaagaagccaacaaacuguaaucccgaauaucgggucuagacccaggguaagggauauccccagcagaauaagcaucuauuggacaauaguaaaaccgggagacauacuuuugauuaacagcacagggaaucuaauugcuccucgggguuacuucaaaauacgaagugggaaaagcucaauaaugagaucagaugcacccauuggcaaaugcaauucugaaugcaucacuccaaauggaagcauucccaaugacaaaccauuucaaaauguaaacaggaucacauauggggccugucccagauauguuaagcaaaacacucugaaauuggcaacagggaugcgaaauguaccagagaaacaaacuagaggcauauuuggcgcaaucgcggguuucauagaaaaugguugggagggaaugguggaugguugguacgguuucaggcaucaaaauucugagggaauaggacaagcagcagaucucaaaagcacucaagcagcaaucgaccaaaucaaugggaagcugaauagguugaucgggaaaaccaacgagaaauuccaucagauugaaaaagaauucucagaaguagaagggagaauucaggaccucgagaaauauguugaggacacuaaaauagaucucuggucauacaacgcggagcuucuuguugcccuggagaaccaacauacaauugaucuaacugacucagaaaugaacaaacuguuugaaagaacaaagaagcaacugagggaaaaugcugaggauaugggcaaugguuguuucaaaauauaccacaaaugugacaaugccugcauagggucaaucagaaauggaacuuaugaccaugauguauacagagaugaagcauuaaacaaccgguuccagaucaaagguguugagcugaagucaggauacaaagauuggauccuauggauuuccuuugccauaucauguuuuuugcuuuguguugcuuuguugggguucaucaugugggccugccaaaaaggcaacauuaggugcaacauuugcauuuga

SEQ ID NO: 32670 - RNA, 1701 nt, Artificial Sequence; identical to SEQ ID NO: 32669
  derived and/or modified CDS sequence (wt) from hemagglutinin__InfluenzaA__ABC84509

SEQ ID NO: 32671 - RNA, 1701 nt, Artificial Sequence
  derived and/or modified CDS sequence (wt) from hemagglutinin__InfluenzaA__ABC84520
augaagacuaucauugcuuugagcuacauucuaugucugguuuucgcucaaaaacuucccggaaaugacaacagcacggcaacgcugugccuugggcaccaugcaguaccaaacggaacgauagugaaaacaaucacgaaugaccaaauugaaguuacuaaugcuacugagcugguucagaguuccucaacagguggaauaugcgacaguccucaucagauccuugauggagaaaacugcacacuaauagaugcucuauugggagacccucagugugauggcuuccaaaauaagaaaugggaccuuuuuguugaacgcagcaaagccuacagcaacuguuacccuuaugaugugccggauuaugccucccuuaggucacuaguugccucauccggcacacuggaguuuaacaaugaaagcuucaauuggacuggagucacucaaaauggaacaagcucugcuugcaaaaggagaucuaauaacaguuucuuuaguagauugaauugguugacccacuuaaaauucaaauacccagcauugaacgugacuaugccaaacaaugaaaaauuugacaaauuguacauuugggggguucaccacccggguacggacaaugaccaaaucuuccuguaugcucaagcaucaggaagaaucacagucucuaccaaaagaagccaacaaacuguaaucccgaauaucggaucuagacccagaguaagggauauccccagcagaauaagcaucuauuggacaauaguaaaaccgggagacauacuuuugauuaacagcacagggaaucuaauugcuccuagggguuacuucaaaauacgaagugggaaaagcucaauaaugagaucagaugcacccauuggcaaaugcaauucugaaugcaucacuccaaauggaagcauucccaaugacaaaccauuucaaaauguaaacaggaucacauauggggccugucccagauauguuaagcaaaacacucugaaauuggcaacagggaugcgaaauguaccagagaaacaaacuagaggcauauuuggcgcaaucgcggguuucauagaaaaugguugggagggaaugguggaugguugguacgguuucaggcaucaaaauucugagggaauaggacaagcagcagaucucaaaagcacucaagcagcaaucaaucaaaucaaugggaagcugaauagguugaucgggaaaaccaacgagaaauuccaucagauugaaaaagaauucucagaaguagaagggagaauucaggaccucgagaaauauguugaggacacuaaaauagaucucuggucauacaacgcggagcuucuuguugcccuggagaaccaacauacaauugaucuaacugacucagaaaugaacaaacuguuugaaagaacaaagaagcaacugagggaaaaugcugaggauaugggcaaugguuguuucaaaauauaccacaaaugugacaaugccugcauaggaucaaucagaaauggaacuuaugaccaugauguauacagagaugaagcauuaaacaaccgguuccagaucaaaggcguugagcugaagucaggauacaaagauuggauccuauggauuuccuuugccauaucauguuuuuugcuuuguguugcuuuguugggguucaucaugugggccugccaaaaaggcaacauuaggugcaacauuugcauuuga

SEQ ID NO: 32672 - RNA, 1701 nt, Artificial Sequence
  derived and/or modified CDS sequence (wt) from hemagglutinin__InfluenzaA__ABC84531
augaagacuaucauugcuuugagcuacauuuucugucugguuuucgcccaaaaacuucccggaaaugacaacagcacagcaacgcugugccugggacaccaugcagugccaaacggaacgcuagugaaaacaaucacgaaugaucagauugaagugacuaaugcuacugagcugguucagaguuccucaacagguagaauaugcgacaguccucaccgaauccuugauggaaaaaacugcacacugauagaugcucuauugggagacccucauugugauggcuuccaaaaugagaaaugggaccuuuuuguugaacgcagcaaagcuuucagcaacuguuacccuuaugaugugccggauuaugccucccuuaggucacuaguugccucaucaggcacccuggaguuuaucaaugaaggcuucaauuggacuggagucacucagagugggggaagcuaugcuugcaaaaggggaucuguuaacaguuucuucaguagauugaauugguuguacgaaucagaaagcaaauauccagcgcugaacgugacuaugccaaacaauggcagauuugacaaauuguacauuugggggguucaccacccgagcacggacaaagaacaaaccaaccuauauguucgagcagcagggagagucacagucucuaccaagagaagccagcaaacuguaaucccgaauaucgggucuagacccuggguaaggggucugucuaguagaauaagcaucuauuggacaauaguaaaaccgggagacauacuguugauuaauagcacugggaaccuaauugcuccucgggguuacuucaaaauacgcacugggaaaagcucaauaaugaggucagaugcaccuauuggcaccugcaguucugaaugcaucacuccaaauggaagcauucccaaugacaaacccuuucaaaauguaaacaagaucacauauggggcaugucccagguauguuaaacaaaacacucugaaauuggcaacagggaugcggaauguaccagagaaacaaacuagaggcauauucggcgcaauagcagguuucauagaaaaugguugggagggaaugguagacgguugguacgguuucaggcaucaaaauucugagggcacaggacaagcagcagaucuuaaaagcacucaagcagcaaucgaccaaaucaacgggaaacugaauagguuaaucgagaaaacgaacgagaaauuccaucaaaucgaaaaggaauucucagaaguagaagggagaauucaggaccucgagaaauauguugaagacacuaaaauagaucucuggucuuacaacgcggagcuucuugucgcccuggagaaccaacauacaauugaucugacugacucagaaaugaacaaacuguuugaaaaaacaaggaagcaacugagggaaaaugcugaggacaugggcaaugguugcuucaaaauauaccacaaaugugacaaugcuugcauaggaucaaucagaaauggaacuuaugaccaugauguauacagagacgaagcauugaacaaccgguuucagaucaaagguguugagcugaagucaggauacaaagacuggauccuauggauuuccuuugccauaucaugcuuuuuacuuuguguuguuuugcugggguucaucaugugggccugccaaaaaggcaacauuaggugcaacauuugcauuuga

SEQ ID NO: 32673 - RNA, 1701 nt, Artificial Sequence; identical to SEQ ID NO: 32662
  derived and/or modified CDS sequence (wt) from hemagglutinin__InfluenzaA__ABC84560

SEQ ID NO: 32674 - RNA, 1701 nt, Artificial Sequence
  derived and/or modified CDS sequence (wt) from hemagglutinin__InfluenzaA__ABC84571
augaagacuaucauugcuuugagcuacauuuuaugucugguuuucgcucaaaaacuucccggaaaugacaacagcacggcaacgcugugccuggggcaccaugcagugccaaacggaacgcuagugaaaacaaucacgaaugaccaaauugaagugaccaaugcuacugagcugguucagaguuccucaacagguggaauaugcgacaguccucaccaaaucauugauggagaaaacugcacacuaauagaugcucuauugggagacccucauugugauggcuuccaaaauaaggaaugggaccuuuuuguugaacgcagcaaagccuacagcaacuguuacccuuaugaugugccggauuaugccucccuuagaucacuaguugccucauccggcacacuggaguuuaacaaugaaagcuucaauuggacuggagucgcucagaauggaacaagcucugcuugcaaaaggagaucuaauaaaaguuucuuuaguagauugaauugguugcaccaauuaaaauacaaauacccagcacugaacgugacuaugccaaacaaugaaaaauuugacaaauuguacauuugggggguucaccacccgaguacggacagugaccaaaucagccuauaugcucaagcaccagggagagucacagucucuaccaaaagaagccaacaaacuguaaucccgaauaucggaucuagacccuggguaaggggugucuccagcagaauaagcaucuauuggacaauaguaaaaccgggagacauacuuuugauuaacugcacagggaaucuaauugcuccucgggguuacuucaaaauacgaagugggaaaagcucaauaaugaggucagaugcauccauuggcaaaugcaauucugaaugcaucacuccaaauggaagcauucccaaugacaaaccauuucaaaauguaaacaggaucacauauggggccugucccagauauguuaagcaaaacacucugaaauuggcaacagggaugcggaauguaccagagaaacaaacuagaggcauauucggcgcaaucgcggguuucauagaaaaugguugggagggaaugguggacgguugguacgguuucaggcaucaaaauucugagggcacaggacaagcagcagaucucaaaagcacucaagcagcaaucaaccaaaucaacgggaaacugaauagguuaaucgagaaaacgaacgagaaauuccaucaaauugaaaaagaauucucagaaguggaagggagaauucaggaccucgagaaauauguugaggacacuaaaauagaucucuggucguacaacgcggagcuucuuguugcccuggagaaccagcauacaauugaucuaacugacucagaaaugaacaaacuauuugaaagaacaaagaagcaacugagggaaaaugcugaggauaugggcaaugguuguuucaaaauauaccacaaaugugacaaugccugcauagggucaaucagaaaugggacuuaugaccaugauguauacagagacgaagcauuaaacaaccgguuccagaucaaagguguugagcugaagucaggauacaaagauuggauccuauggauuuccuuugccauaucauguuuuuugcuuuguguugucuugcugggguucaucaugugggccugccaaaaaggcaacauuaggugcaacauuugcauuuga

SEQ ID NO: 32675 - RNA, 1701 nt, Artificial Sequence; identical to SEQ ID NO: 32662
  derived and/or modified CDS sequence (wt) from hemagglutinin__InfluenzaA__ABC85754

SEQ ID NO: 32676 - RNA, 1701 nt, Artificial Sequence; identical to SEQ ID NO: 32647
  derived and/or modified CDS sequence (wt) from hemagglutinin__InfluenzaA__ABC85765

SEQ ID NO: 32677 - RNA, 1701 nt, Artificial Sequence
  derived and/or modified CDS sequence (wt) from hemagglutinin__InfluenzaA__ABC85776
augaagacuaucauugcuuugagcuacauuuuaugucugguuuucgcucaaaaacuucccggaaaugacaacagcacggcaacgcugugccuggggcaccaugcagugccaaacggaacgcuagugaaaacaaucacgaaugaccaaauugaagugacuaaugcuacugagcugguucagaguuccucaacagguggaauaugcgacaguccucaccaaauccuugauggagaaaacugcacacuaauagaugcucuauugggagacccucauugugauggcuuccaaaauaaggaaugggaccuuuuuguugaacgcagcaaagccuacagcaacuguuacccuuaugaugugccggauuaugccucccuuaggucacuaguugccucauccggcacacuggaguuuaacaaugaaagcuucaauuggacuggagucgcucagaauggaacaagcucugcuugcaaaaggagaucuaauaaaaguuucuuuaguagauugaauugguugcaccaauuaaaauacaaauacccagcacugaacgugacuaugccaaacaaugaaaaauuugacaaauuguacauuugggggguucaccacccgaguacggacagugaccaaaucagccuauaugcucaagcaccagggagagucacagucucuaccaaaagaagccaacaaacuguaaucccgaauaucggaucuagacccuggguaaggggugucuccagcagaauaagcaucuauuggacaauaguaaaaccgggagacauacuuuugauuaacuucacagggaaucuaauugcuccucgggguuacuucaaaauacgaagugggaaaagcucaauaaugaggucagaugcauccauuggcaaaugcaauucugaaugcaucacuccaaauggaagcauucccaaugacaaaccauuucaaaauguaaacaggaucacauauggggccugucccagauauguuaagcaaaacacucugaaauuggcaacagggaugcggaauguaccagagaaacaaacuagaggcauauucggcgcaaucgcggguuucauagaaaaugguugggagggaaugguggacgguugguacgguuucaggcaucaaaauucugagggcacaggacaagcagcagaucucaaaagcacucaagcagcaaucaaccaaaucaacgggaaacugaauagguuaaucgagaaaacgaacgagaaauuccaucaaauugaaaaagaauucucagaaguggaagggagaauucaggaccucgagaaauauguugaggacacuaaaauagaucucuggucguacaacgcggagcuucuuguugcccuggagaaccagcauacaauugaucuaacugacucagaaaugaacaaacuguuugaaagaacaaagaagcaacugagggaaaaugcugaggauaugggcaaugguuguuucaaaauauaccacaaaugugacaaugccugcauagggucaaucagaaaugggacuuaugaccaugauguauacagagacgaagcauuaaacaaccgguuccagaucaaagguguugagcugaagucaggauacaaagauuggauccuauggauuuccuuugccauaucauguuuuuugcuuuguguugucuugcugggguucaucaugugggccugccaaaaaggcaacauuaggugcaacauuugcauuuga

SEQ ID NO: 32678 - RNA, 1701 nt, Artificial Sequence; identical to SEQ ID NO: 32662
  derived and/or modified CDS sequence (wt) from hemagglutinin__InfluenzaA__ABC85787

SEQ ID NO: 32679 - RNA, 1701 nt, Artificial Sequence; identical to SEQ ID NO: 32645
  derived and/or modified CDS sequence (wt) from hemagglutinin__InfluenzaA__ABC85798

SEQ ID NO: 32680 - RNA, 1701 nt, Artificial Sequence; identical to SEQ ID NO: 32647
  derived and/or modified CDS sequence (wt) from hemagglutinin__InfluenzaA__ABC85820

SEQ ID NO: 32681 - RNA, 1701 nt, Artificial Sequence; identical to SEQ ID NO: 32643
  derived and/or modified CDS sequence (wt) from hemagglutinin__InfluenzaA__ABC85831

SEQ ID NO: 32682 - RNA, 1701 nt, Artificial Sequence
  derived and/or modified CDS sequence (wt) from hemagglutinin__InfluenzaA__ABC85842
augaagacuaucauugcuuugagcuacauucuaugucugguuuucgcucaaaaacuucccggaaaugacaacagcacggcaacgcugugccuugggcaccaugcaguaccaaacggaacgauagugaaaacaaucacgaaugaccaaauugaaguuacuaaugcuacugagcugguucagaguuccucaacagguggaauaugcgacaguccucaucagauccuugauggagaaaacugcacacuaauagaugcucuauugggagacccucagugugauggcuuccaaaauaagaaaugggaccuuuuuguugaacgcagcaaagccuacagcaacuguuacccuuaugaugugccggauuaugccucccuuaggucacuaauugccucauccggcacacuggaguuuaacaaugaaagcuucaauuggacuggagucacucaaaauggaacaagcucugcuugcaaaaggagaucuaauagcaguuucuuuaguagauugaauugguugacccacuuaaaauucaaauacccagcauugaacgugacuaugccaaacaaugaagaauuugacaaauuguacauuugggggguucaccacccggguacauacaaugaccaaaucagccuauaugcucaagcaucaggaagaaucacagucucuaccaaaagaagccaacaaacuguaaucccgaauaucgggucuagacccaggguaagggauauccccagcagaauaagcaucuauuggacaauaguaaaaccgggagacauacuuuugauuaacagcacagggaaucuaauugcuccucgggguuacuucaaaauacgaagugggaaaagcucaauaaugagaucagaugcacccauuggcaaaugcaauucugaaugcaucacuccaaauggaagcauucccaaugacaaaccauuucaaaauguaaacaggaucacauauggggccugucccagauaugucaagcaaaacacucugaaauuggcaacagggaugcgaaauguaccagagaaacaaacuagaggcauauuuggcgcaaucgcggguuucauagaaaaugguugggagggaaugguggaugguugguacgguuucaggcaucaaaauucugagggaauaggacaagcagcagaucucaaaagcacucaagcagcaaucgaccaaaucaaugggaagcugaauagguugaucgggaaaaccaacgagaaauuccaucagauugaaaaagaauucucagaaguagaagggagaauucaggaccucgagaaauauguugaggacacuaaaauagaucucuggucauacaacgcggagcuucuuguugcccuggagaaccaacauacaauugaucuaacugacucagaaaugaacaaacuguuugaaagaacaaagaagcaacugagggaaaaugcugaggauaugggcaaugguuguuucaaaauauaucacaaaugugacaaugccugcauagggucaaucagaaauggaacuuaugaccaugauguauacagagaugaagcauuaaacaaccgguuccagaucaaagguguugagcugaagucaggauacaaagauuggauccuauggauuuccuuugccauaucauguuuuuugcuuuguguugcuuuguugggguucaucaugugggccugccaaaaaggcaacauuaggugcaacauuugcauuuga

SEQ ID NO: 32683 - RNA, 1701 nt, Artificial Sequence; identical to SEQ ID NO: 32647
  derived and/or modified CDS sequence (wt) from hemagglutinin__InfluenzaA__ABC85853

SEQ ID NO: 32684 - RNA, 1701 nt, Artificial Sequence; identical to SEQ ID NO: 32643
  derived and/or modified CDS sequence (wt) from hemagglutinin__InfluenzaA__ABC85864

SEQ ID NO: 32685 - RNA, 1701 nt, Artificial Sequence
  derived and/or modified CDS sequence (wt) from hemagglutinin__InfluenzaA__ABC85886
augaagacuaucauugcuuugagcuacauucuaugucugguuuucgcucaaaaacuucccggaaaugacaacagcacggcaacgcugugccuugggcaccaugcaguaccaaacggaacgauagugaaaacaaucacgaaugaccaaauugaaguuacuaaugcuacugagcugguucagaguuccucaacagguggaauaugcgacaguccucaucagauccuugauggagaaaacugcacacuaauagaugcucuauugggagacccucagugugauggcuuccaaaauaagaaaugggaccuuuuuguugaacgcagcaaagccuacagcaacuguuacccuuaugaugugccggauuaugccucccuuaggucacuaauugccucauccggcacacuggaguuuaacaaugaaagcuucaauuggacuggagucacucaaaauggaacaagcucugcuugcaaaaggagaucuaauagcaguuucuuuaguagauugaauugguugacccacuuaaaauucaaauacccagcauugaacgugacuaugccaaacaaugaagaauuugacaaauuguacauuugggggguucaccacccggguacauacaaugaccaaaucagccuauaugcucaagcaucaggaagaaucacagucucuaccaaaagaagccaacaaacuguaaucccgaauaucgggucuagacccaggguaagggauauccccagcagaauaagcaucuauuggacaauaguaaaaccgggagacauacuuuugauuaacagcacagggaaucuaauugcuccucgggguuacuucaaaauacgaagugggaaaagcucaauaaugagaucagaugcacccauuggcaaaugcaauucugaaugcaucacuccaaauggaagcauucccaaugacaaaccauuucaaaauguaaacaggaucacauauggggccugucccagauaugucaagcaaaacacucugaaauuggcaacagggaugcgaaauguaccagagaaacaaacuagaggcauauuuggcgcaaucgcggguuucauagaaaaugguugggagggaaugguggaugguugguacgguuucaggcaucaaaauucugagggaauaggacaagcagcagaucucaaaagcacucaagcagcaaucgaccaaaucaaugggaagcugaauagguugaucgggaaaaccaacgagaaauuccaucagauugaaaaagaauucucagaaguagaagggagaauucaggaccucgagaaauauguugaggacacuaaaauagaucucuggucauacaacgcggagcuucuuguugcccuggagaaccaacauacaauugaucuaacugacucagaaaugaacaaacuguuugaaagaacaaagaagcaacugagggaaaaugcugaggauaugggcaaugguuguuucaaaauauaccacaaaugugacaaugccugcauagggucaaucagaaauggaacuuaugaccaugauguauacagagaugaagcauuaaacaaccgguuccagaucaaagguguugagcugaagucaggauacaaagauuggauccuauggauuuccuuugccauaucaugcuuuuugcuuuguguugcuuuguugggguucaucaugugggccugccaaaaaggcaacauuaggugcaacauuugcauuuga

SEQ ID NO: 32686 - RNA, 1701 nt, Artificial Sequence; identical to SEQ ID NO: 32574
  derived and/or modified CDS sequence (wt) from hemagglutinin__InfluenzaA__ABC85908

SEQ ID NO: 32687 - RNA, 1701 nt, Artificial Sequence
  derived and/or modified CDS sequence (wt) from hemagglutinin__InfluenzaA__ABC85919
augaagacuaucauugcuuugagcuacauuuuaugccugguuuucgcucaaaaacuucccggaaaugacaacagcacggcaacgcugugucuggggcaucaugcagugccaaacggaacgcuagugaaaacaaucacgaaugaccaaauugaaguaacuaaugcuacugagcugguucagaguuccucaacagguagaauaugcgacaguccucaccaaauccuugauggagaaaacugcacacuaauagaugcucuauugggagacccucauugugauggcuuccaaaauaaggaaugggaccuuuuuguugaacgcagcaaagccuacagcaacuguuacccuuaugaugugccggauuaugucucccuuaggucacuaguugccucaucaggcacgcuggaguuuaacaaugaaagcuucaauuggacuggagucgcucagaauggaacaagcucugcuugcaaaaggagaucugauaaaaguuucuuuaguagauugaauugguugcaccaauuaaaauacaaauauccagcacugaacgugacuaugccaaacaaugaaaaauuugacaaauuguacauuugggggguucaccacccggguacagacagugaccaaaucagccuauaugcucaagcaucagggagagucacagucucuaccaaaagaagccaacaaacuguaaucccgaauaucggaucuagacccuggguaaggggugucuccagcagaauaagcaucuauuggacaauaguaaaaccgggagacauacuuuugauuaacagcacagggaaucuaauugcuccucgggguuacuucaaaauacgaagugggaaaagcucaauaaugaggucagaugcacccauuggcaaaugcaauucugaaugcaucacuccaaauggaagcauucccaaugacaaaccauuucaaaauguaaacaggaucacauauggggccugucccagauauguuaagcaaaacacucugaaauuggcaacagggaugcggaaugugccagagaaacaaacuagaggcauauucggugcaaucgcgggcuucauagaaaaugguugggagggaaugauggacgguugguacgguuucaggcaucaaaauucugagggcacagggcaagcagcagaucuuaaaagcacucaagcagcaaucaaccaaaucaacgggaaacugaauagguuaaucgagaaaacgaacgagaaauuccaucaaauugaaaaagaauucucagaaguagaagggagaauucaggaccucgagaaauauguugaggacacuaaaauagaucucuggucguacaaugcggagcuucuuguugcccuggagaaccaacauacaauugaucuaacugacucagaaaugaacaaacuguuugaaagaacaaagaagcaacugagggaaaaugcugaggauaugggcaaugguuguuucaaaauauaccacaaaugugacaaugccugcauagggucaaucagaaauggaacuuaugaccaugauguauacagagacgaagcauugaacaaccgguuccagaucaaaggugucgagcugaagucaggauacaaagauuggguccuauggauuuccuuugccauaucauguuuuuugcuuuguauuguuuugaugggguucaucaugugggccugccaaaaaggcaacauuaggugcaacauuugcauuuga

SEQ ID NO: 32688 - RNA, 1701 nt, Artificial Sequence; identical to SEQ ID NO: 32617
  derived and/or modified CDS sequence (wt) from hemagglutinin__InfluenzaA__ABC85930

SEQ ID NO: 32689 - RNA, 1701 nt, Artificial Sequence; identical to SEQ ID NO: 32623
  derived and/or modified CDS sequence (wt) from hemagglutinin__InfluenzaA__ABC85941

SEQ ID NO: 32690 - RNA, 1701 nt, Artificial Sequence
  derived and/or modified CDS sequence (wt) from hemagglutinin__InfluenzaA__ABC85952
augaagacuaucauugcuuugagcuacauuuuaugccugguuuucgcucaaaaacuucccggaaaugacaacagcacggcaacgcugugucuggggcaucaugcagugccaaacggaacgcuagugaaaacaaucacgaaugaccaaauugaaguaacuaaugcuacugagcugguucagaguuccucaacagguagaauaugcgacaguccucaccaaauccuugauggagaaaacugcacacuaauagaugcucuauugggagacccucauugugauggcuuccaaaauaagaaaugggaccuuuuuguugaacgcagcaaagccuacagcaacuguuacccuuaugaugugccggauuaugucucccuuaggucacuaguugccucaucaggcacgcuggaguuuaacaaugaaagcuucaauuggacuggagucgcucagaauggaacaagcucugcuugcaaaaggagaucugauaaaaguuucuuuaguagauugaauugguugcaccaauuaaaauacaaauauccagcacugaacgugacuaugccaaacaaugaaaaauuugacaaauuguacauuugggggguucaccacccggguacagacagugaccaaaucagccuauaugcucaagcaucggggagagucacagucucuaccaaaagaagccaacaaacuguaaucccgaauaucggaucuagacccuggguaaggggugucuccagcagaauaagcaucuauuggacaauaguaaaaccgggagacauacuuuugauuaacagcacagggaaucuaauugcuccucgggguuacuucaaaauacgaagugggaaaagcucaauaaugaggucagaugcacccauuggcaaaugcaauucugaaugcaucacuccaaauggaagcauucccaaugacaaaccauuucaaaauguaaacaggaucacauauggggccugucccagauauguuaagcaaaacacucugaaauuggcaacagggaugcggaaugugccagagaaacaaacuagaggcauauucggugcaaucgcgggcuucauagaaaaugguugggagggaaugauggacgguugguacgguuucaggcaucauaauucugagggcacagggcaagcagcagaucuuaaaagcacucaagcagcaaucaaccaaaucaacgggaaacugaauagguuaaucgagaaaacgaacgagaaauuccaucaaauugaaaaagaauucucagaaguagaagggagaauucaggaccucgagaaauauguugaggacacuaaaauagaucucuggucguacaaugcggagcuucuuguugcccuggagaaccaacauacaauugaucuaacugacucagaaaugaacaaacuguuugaaagaacaaagaagcaacugagggaaaaugcugaggauaugggcaaugguuguuucaaaauauaccacaaaugugacaaugccugcauagggucaaucagaaauggaacuuaugaccaugauguauacagagacgaagcauugaacaaccgguuccagaucaaagguguugagcugaagucaggauacaaagauuggguccuauggauuuccuuugccauaucauguuuuuugcuuuguauuguuuugcugggguucaucaugugggccugccaaaaaggcaacauuaggugcaacauuugcauuuga

SEQ ID NO: 32691 - RNA, 1701 nt, Artificial Sequence; identical to SEQ ID NO: 32574
  derived and/or modified CDS sequence (wt) from hemagglutinin__InfluenzaA__ABC85974

SEQ ID NO: 32692 - RNA, 1701 nt, Artificial Sequence; identical to SEQ ID NO: 32574
  derived and/or modified CDS sequence (wt) from hemagglutinin__InfluenzaA__ABC85985

SEQ ID NO: 32693 - RNA, 1701 nt, Artificial Sequence
  derived and/or modified CDS sequence (wt) from hemagglutinin__InfluenzaA__ABC85996
augaagacuaucauugcuuugagcuacauucuaugucugguuuucgcucaaaaacuucccggaaaugacaacagcacggcaacgcugugccuugggcaccaugcaguaccaaacggaacgauagugaaaacaaucacgaaugaccaaauugaaguuacuaaugcuacugagcugguucagaguuccucaacagguggaauaugcgacaguccucaucagauccuugauggagaaaacugcacacuaauagaugcucuauugggagacccucagugugauggcuuccaaaauaagaaaugggaccuuuuuguugaacgcagcaaagccuacagcaacuguuacccuuaugaugugccggauuaugccucccuuaggucacuaguugccucauccggcacacuggaguuuaacaaugaaagcuucaauuggacuggagucacucaaaauggaacaagcucugcuugcaaaaggagaucuaauaacaguuucuuuaguagauugaauugguugacccauuuaaaauucaaauacccagcauugaacgugacuaugccaaacaaugaaaaauuugacaaauuguacauuugggggguucaccacccggguacggacaaugaccaaaucagccuauaugcucaagcaucaggaagaaucacagucucuaccaaaagaagccaacaaacuguaaucccgaauaucggaucuagacccaggguaagggauauccccagcagaauaagcaucuauuggacaauaguaaaaccgggagacauacuuuugauuaacagcacagggaaucuaauugcuccucgggguuacuucaaaauacgaagugggaaaagcucaauaaugagaucagaugcacccauuggcaaaugcaauucugaaugcaucacuccaaauggaagcauucccaaugacaaaccauuucaaaauguaaacaggaucacauauggggccugucccagauauguuaagcaaaacacucugaaauuggcaacagggaugcgaaauguaccagagaaacaaacuagaggcauauuuggcgcaaucgcggguuucauagaaaaugguugggagggaaugauggaugguugguacgguuucaggcaucaaaauucugagggaauaggacaagcagcagaucucaaaagcacucaagcagcaaucaaccaaaucaaugggaagcugaauagguugaucgggaaaaccaacgagaaauuccaucagauugaaaaagaauucucagaaguagaagggagaauucaggaccucgagaaauauguugaggacacuaaaauagaucucuggucauacaacgcggagcuucuuguugcccuggagaaccaacauacaauugaucuaacugacucagaaaugaacaaacuguuugaaagaacaaagaagcaacugagggaaaaugcugaggauaugggcaaugguuguuucaaaauauaccacaaaugugacaaugccugcauagggucaaucagaaauggaacuuaugaccaugauguauacagagaugaagcauuaaacaaccgguuccagaucaaagguguugagcugaagucaggauacaaagauuggauccuauggauuuccuuugccauaucauguuuuuugcuuuguguugcuuuguugggguucaucaugugggccugccaaaaaggcaacauuaggugcaacauuugcauuuga

SEQ ID NO: 32694 - RNA, 1701 nt, Artificial Sequence; identical to SEQ ID NO: 32330
  derived and/or modified CDS sequence (wt) from hemagglutinin__InfluenzaA__ABC86007

SEQ ID NO: 32695 - RNA, 1701 nt, Artificial Sequence
  derived and/or modified CDS sequence (wt) from hemagglutinin__InfluenzaA__ABC86018
augaagacuaucauugcuuugagcuacauucuaugucugguuuucgcucaaaaacuucccggaaaugacaacagcacggcaacgcugugccuugggcaccaugcaguaccaaacggaacgauagugaaaacaaucacgaaugaccaaauugaaguuacuaaugcuacugagcugguucagaguuccucaacagguggaauaugcgacaguccucaucagauccuugauggagaaaacugcacaauaauagaugcucuauugggagacccucagugugauggcuuccaaaauaagaaaugggaccuuuuuguugaacgcagcaaagccuacagcaacuguuacccuuaugaugugccggauuaugccucccuuaggucacuaguugccucauccggcacacuggaguuuaacaaugaaagcuucaauuggacuggagucacucaaaauggaacaagcucugcuugcaaaaggagaucuaauaacaguuucuuuaguagauugaauugguugacccauuuaaaauucaaauacccagcauugaacgugacuaugccaaacaaugaaaaauuugacaaauuguacauuugggggguucaccacccggguacggacaaugaccaaaucagccuauaugcucaagcaucaggaagaaucacagucucuaccaaaagaagccaacaaacuguaaucccgaauaucggaucuagacccaggguaagggauauccccagcagaauaagcaucuauuggacaauaguaaaaccgggagacauacuuuugauuaacagcacagggaaucuaauugcuccucgggguuacuucaaaauacgaagugggaaaagcucaauaaugagaucagaugcacccauuggcaaaugcaauucugaaugcaucacuccaaauggaagcauucccaaugacaaaccauuucaaaauguaaacaggaucacauauggggccugucccagauauguuaagcaaaacacucugaaauuggcaacagggaugcgaaauguaccagagaaacaaacuagaggcauauuuggcgcaaucgcggguuucauagaaaaugguugggagggaaugguggaugguugguacgguuucaggcaucaaaauucugagggaauaggacaagcagcagaucucaaaagcacucaagcagcaaucaaccaaaucaaugggaagcugaauagguugaucgggaaaaccaacgagaaauuccaucagauugaaaaagaauucucagaaguagaagggagaauucaggaccucgagaaauauguugaggacacuaaaauagaucucuggucauacaacgcggagcuucuuguugcccuggagaaccaacauacaauugaucuaacugacucagaaaugaacaaacuguuugaaagaacaaagaagcaacugagggaaaaugcugaggauaugggcaaugguuguuucaaaauauaccacaaaugugacaaugccugcauagggucaaucagaaauggaacuuaugaccaugauguauacagagaugaagcauuaaacaaccgguuccagaucaaagguguugagcugaagucaggauacaaagauuggauccuauggauuuccuuugccauaucauguuuuuugcuuuguguugcuuuguugggguucaucaugugggccugccaaaaaggcaacauuaggugcaacauuugcauuuga

SEQ ID NO: 32696 - RNA, 1701 nt, Artificial Sequence; identical to SEQ ID NO: 32330
  derived and/or modified CDS sequence (wt) from hemagglutinin__InfluenzaA__ABC86029

SEQ ID NO: 32697 - RNA, 1701 nt, Artificial Sequence; identical to SEQ ID NO: 32334
  derived and/or modified CDS sequence (wt) from hemagglutinin__InfluenzaA__ABC86040

SEQ ID NO: 32698 - RNA, 1701 nt, Artificial Sequence; identical to SEQ ID NO: 32528
  derived and/or modified CDS sequence (wt) from hemagglutinin__InfluenzaA__ABC86124

SEQ ID NO: 32699 - RNA, 1701 nt, Artificial Sequence
  derived and/or modified CDS sequence (wt) from hemagglutinin__InfluenzaA__ABC86137
augaagacuaucauugcuuugagcuacauuuucugucugguuuucgcccaaaaccuucccggaaaugacaaaagcacagcaacgcugugccugggacaccaugcagugccaaacggaacgcuagugaaaacaaucacgaaugaucagauugaagugacuaaugcuacugagcugguucagaguuccucaacagguagaauaugcgacaguccucaccgaauccuugaugggaaaaacugcacacugguagaugcucuauugggagacccucauugugauggcuuucagaaugagaaaugggaccuuuuuguugaacgcagcaaagcuuucagcaacuguuacccuuaugaugugccagauuaugccucccuuaggucacuaguugccucgucaggcacccuggaguuuaucaaugaaagcuucaauuggacuggagucacucagagugggggaagcuaugcuugcaaaaggggaucugauaacaguuucuucaguagacugaauugguuguacgaaucagaaagcaaauauccagugcugaacgugacuaugccaaacaauggcaauuuugacaaacuguacauuugggggguucaccacccgagcacggacaaagaacaaaccaaccuauauguucgagcaucagggagagucacagucucuaccaagagaagccagcaaacuauaaucccgaauaucgggucuagacccuggguaaggggucugucuagcagaauaagcaucuauuggacaauaguaaaaccgggagacauacuguuaauuaauaguaaugggaaccuaauugcuccucgggguuacuucaaaauacgcacugggaaaagcucaauaaugaggucagaugcaccuauuggcaccugcaguucugaaugcaucacuccaaauggaagcauucccaaugacaagcccuuucaaaauguaaacaagaucacauauggggcaugucccaaguauguuaagcaaaacacucugaaguuggcaacagggaugcggaauguaccagagaaacaaacuagaggcauauucggcgcaauagcagguuucauagaaaaugguugggagggaaugguagacgguugguacgguuucaggcaucaaaauucugagggcacaggacaagcagcagaucuuaaaagcacucaagcagcaaucgaccaaaucaaugggaaacugaauaggguaaucgagaaaacgaacgagaaauuccaucaaaucgaaaaggaauucucagaaguagaagggagaauucaggaccucgagaaauacguugaagacacuaaaauagaucucuggucuuacaacgcggaacuucuugucgcucuggagaaccaacauacaauugaucugacugacucggaaaugaacaaacuguuugaaaaaacaaggaggcaacugagggaaaaugcugaggacaugggcaaugguugcuucaaaauauaccacaaaugugacaaugcuugcauagggucaaucagaaauggaacuuaugaccaugauguauacagagacgaagcauuaaacaaccgguuucagaucaaagguguugagcugaagucaggauacaaagacuggauccuguggauuuccuuugccauaucaugcuuuuugcuuuguguuguuuugcugggguucaucaugugggccugccaaaaaggcaacauuaggugcaacauuugcauuuga

SEQ ID NO: 32700 - RNA, 1701 nt, Artificial Sequence
  derived and/or modified CDS sequence (wt) from hemagglutinin__InfluenzaA__ABC97374
augaagacuaucauugcuuugagcuacauuuucugucugguucucggccaagacuuuccaggaaaugacaacagcacagcaacgcugugccugggacaucaugcggugccaaacggaacacuagugaaaacaaucacaaaugaucagauugaagugacuaaugcuacugagcugguucagaguuccucaacggggaaaauaugcaacaauccucaucgaauccuugauggaauagacugcacacugauagaugcucuauugggggacccucauugugauggcuuucaaaaugagacaugggaccuuuucguugaacgcagcaaagcuuucagcaacuguuacccuuaugaugugccagauuaugccucccuuaggucacuaguugccucgucaggcacucuggaguuuaucaaugaaggcuucacuuggacuggggucacucagaaugggggaagcaaugcuugcaaaaggggaccugauagcgguuuuuucaguagacugaacugguuguacaaaucaggaagcacauauccagugcugaacgugacuaugccaaacaaugacaauuuugacaaacuauacauuugggggguucaccacccgagcacggaccaagaacaaaccagccuauauguucaagcaucagggagagucacagucucuaccaagagaagccagcaaacuauaaucccgaauaucgggucuagacccuggguaaggggucugucuaguagaauaagcaucuauuggacaauaguuaaaccgggagacauacugguaauuaauaguaaugggaaccuaauugcuccucgggguuauuucaaaaugcgcacugggaaaagcucaauaaugaggucagaugcaccuauuggcaccugcauuucugaaugcaucacuccaaauggaagcauucccaaugacaagcccuuucaaaacguaaacaagaucacauauggggcaugucccaaguauguuaagcaaaacacccugaaguuggcaacagggaugcggaauguaccagagaaacaaacuagaggccuauucggcgcaauagcagguuucauagaaaaugguugggagggaaugguagacgguugguacgguuucaggcaucaaaauucugagggcacaggacaagcagcagaucuuaaaaguacucaagcagccaucgaccaaaucaaugggaaacugaauaggguaaucgagaagacgaacgagaaauuccaucaaaucgaaaaggaauucucagaaguagaagggagaauucaggaccucgagaaauacguugaagacacuaaaauagaucucuggucuuacaaugcggagcuucuugucgcucuggagaaccaacauacaauugaucugacugacucggaaaugaacaaacuguuugaaaaaacaaggaggcaacugagggaaaaugcugaggacaugggcaaugguugcuucagaauauaccacaaaugugacaaugcuugcauagggucaaucagaaaugggacuuaugaccaugauguauacagagacgaagcauuaaacaaccgguuucagaucaaagguguugaacugaagucaggauacaaagacuggauccuguggauuuccuuugccauaucaugcuuuuugcuuuguguuguuuugcugggguucaucaugugggccugccagaaaggcaacauuaggugcaacauuugcauuuga

SEQ ID NO: 32701 - RNA, 1701 nt, Artificial Sequence; identical to SEQ ID NO: 32044
  derived and/or modified CDS sequence (wt) from hemagglutinin__InfluenzaA__ABD15449

SEQ ID NO: 32702 - RNA, 1701 nt, Artificial Sequence
  derived and/or modified CDS sequence (wt) from hemagglutinin__InfluenzaA__ABD15460
augaagacuaucauugcuuugagcuacauucuaugucugguuuucgcucaaaaacuucccggaaaugacaacagcacggcaacgcugugccuugggcaccaugcaguaccaaacggaacgauagugaaaacaaucacgaaugaccaaauugaaguuacuaaugcuacugagcugguucagauuuccucaacagguggaauaugcgacaguccuuaucagauccuugauggagaaaacugcacacuaauagaugcucuauugggagacccucagugugauggcuuccaaaauaagaaaugggaccuuuuuguugaacgcagcaaagccuacagcaacuguuacccuuaugaugugccggauuaugccucccuuaggucacuaguugccucauccggcacacuggaguuuaacaaugaaagcuucgauuggacuggagucacucagaauggaacaagcucugcuugcaaaaggagaucuaauaaaaguuucuuuaguagauugaauugguugacccacuuaaaauacaaauacccagcauugaacgugacuaugccaaacaaugaaaaauuugacaaauuguacauuugggggguucaccacccggguacggacagugaccaaaucagccuauaugcucaagcaucaggaagaaucacagucucuaccaaaagaagccaacaaacuguaaucccgaauaucggaucuagacccaggguaagggaugucuccagccgaauaagcaucuauuggacaauaguaaaaccgggagacauacuuuugauuaacagcacagggaaucuaauugcuccucgggguuacuucaaaauacgaagugggaaaagcucaauaaugagaucagaugcacccauuggcaaaugcaauucugaaugcaucacuccaaauggaagcauucccaaugacaaaccauuucaaaauguaaacaggaucacauauggggccugucccagauauguuaagcaaaacacucugaaauuggcaacagggaugcgaaauguaccagagaaacaaacuagaggcauauuuggcgcaaucgcggguuucauagaaaaugguugggagggaaugguggacgguugguacgguuucaggcaucaaaauucugagggcacaggacaagcagcagaucucaaaagcacucaagcagcaaucaaccaaaucaaugggaaacugaauagguuaaucgggaaaacaaacgagaaauuccaucagauugaaaaagaauucucggaaguagaaggaagaauucaggaccucgagaaauauguugaggacacuaaaauagaucucuggucauacaacgcggagcuucuuguugcccuggagaaccaacauacaauugaucuaacugacucagaaaugaacaaacuguuugaaagaacaaagaagcaacugagggaaaaugcugaggauaugggcaaugguuguuucaaaauauaccacaaaugugacaaugccugcauagggucaaucagaaauggaacuuaugaccaugauguguacagagaugaagcauuaaacaaccgguuucagaucaaagguguugagcugaagucaggauacaaagauuggauccuauggauuuccuuugccauaucauguuuuuugcuuuguguugcuuuguugggguucaucaugugggccugccaaaaaggcaacauuaggugcaacauuugcauuuga

SEQ ID NO: 32703 - RNA, 1701 nt, Artificial Sequence
  derived and/or modified CDS sequence (wt) from hemagglutinin__InfluenzaA__ABD15471
augaagacuaucauugcuuugagcuacauucuaugucugguuuucgcucaaaaacuucccggaaaugacaacagcacggcaacgcugugccuugggcaccaugcaguaccaaacggaacgauagugaaaacaaucacgaaugaccaaauugaaguuacuaaugcuacugagcugguacagaguuccucaacagguggaauaugcgacaguccucaucagauccuugauggagaaaacugcacacuaauagaugcucuauugggagacccucagugugauggcuuccaaaauaagaaaugggaccuuuuuguugaacgcagcaaagccuacagcaacuguuacccuuaugaugugccggauuaugccucccuuaggucacuaguugccucauccggcacacuggaguuuaacaaugaaagcuucgauuggacuggagucacucagaauggaacaagcucugcuugcaaaaggagaucuaauaaaaguuucuuuaguagauugaauugguugacccacuuaaaauacaaauacccagcauugaacgugacuaugccaaacaaugaaaaauuugacaaauuguacauuugggggguucaccacccggguacggacagugaccaaaucagccuauaugcucaagcaucaggaagaaucacagucucuaccaaaagaagccaacaaacuguaaucccgaauaucggaucuagacccaggguaagggaugucuccagccgaauaagcaucuauuggacaauaguaaaaccgggagacauacuuuugauuaacagcacagggaaucuaauugcuccucgggguuacuucaaaauacgaagugggaaaagcucaauaaugagaucagaugcacccauuggcaaaugcaauucugaaugcaucacuccaaauggaagcauucccaaugacaaaccauuucaaaauguaaacaggaucacauauggggccugucccagauauguuaagcaaaacacucugaaauuggcaacagggaugcgaaauguaccagagaaacaaacuagaggcauauuuggcgcaaucgcggguuucauagaaaaugguugggagggaaugguggacgguugguacgguuucaggcaucaaaauucugagggcacaggacaagcagcagaucucaaaagcacucaagcagcaaucaaccaaaucaaugggaaacugaauagguuaaucgggaaaacaaacgagaaauuccaucagauugaaaaagaauucucagaaguagaagggagaauucaagaccucgagaaauauguugaggacacuaaaauagaucucuggucauacaacgcggagcuucuuguugcccuggagaaccaacauacaauugaucuaacugacucagaaaugaacaaacuguuugaaagaacaaagaagcaacugagggaaaaugcugaggauaugggcaaugguuguuucaaaauauaccacaaaugugacaaugccugcauagggucaaucagaaauggaacuuaugaccaugauguguacagagaugaagcauuaaacaaccgguuccagaucaaagguguugagcugaagucaggauacaaagauuggauccuauggauuuccuuugccauaucauguuuuuugcuuuguguugcuuuguugggguucaucaugugggccugccaaaaaggcaacauuaggugcaacauuugcauuuga

SEQ ID NO: 32704 - RNA, 1701 nt, Artificial Sequence; identical to SEQ ID NO: 32048
  derived and/or modified CDS sequence (wt) from hemagglutinin__InfluenzaA__ABD15482

SEQ ID NO: 32705 - RNA, 1701 nt, Artificial Sequence; identical to SEQ ID NO: 32702
  derived and/or modified CDS sequence (wt) from hemagglutinin__InfluenzaA__ABD15493

SEQ ID NO: 32706 - RNA, 1701 nt, Artificial Sequence; identical to SEQ ID NO: 32279
  derived and/or modified CDS sequence (wt) from hemagglutinin__InfluenzaA__ABD15526

SEQ ID NO: 32707 - RNA, 1701 nt, Artificial Sequence
  derived and/or modified CDS sequence (wt) from hemagglutinin__InfluenzaA__ABD15537
augaagacuaucauugcuuugagcuacauuucaugucugguuuucgcucaaaaacuucccggaaaugacaacagcacggcaacgcugugccugggacaccaugcagugccaaacggaacacuagugaaaacaaucacaaaugaccaaauugaagugacuaaugcuacugagcugguucagaguuccucaacagguagaauaugcgacaguccucaccgaauccuugauggagaaaacugcacacugauagaugcucuauugggagacccucauugugauggcuuccaaaauaaggaaugggaccuuuuuguugaacgcagcaaagccuacagcaacuguuacccuuaugaugugccggauuaugccucccuuaggucacuaguugccucauccggcacucuggaguuuaacaaugaaagcuucaauuggacuggagucgcucagaauggaacaagcuaugcuugcaaaaggagaucuauuaaaaguuucuuuaguagauugaauugguugcaccaauuaaaauacaaauauccagcacugaacgugacuaugccaaacaaugacaaauuugacaaauuguacauuugggggguucaccacccgaguacggacagugaccaaaccagccuauaugcucaagcaucagggagagucacagucucuaccaaaagaagccaacaaacuguaaucccgaauaucggaucuagacccuggguaaggggugucuccagcagaauaagcaucuauuggacaauaguaaaaccgggagacauacuuuugauuaacagcacagggaaucuaauugcuccucgggguuacuucaaaauacgaagugggaaaagcucaauaaugaggucagaugcacccauuggcaaaugcaauucugaaugcaucacuccaaauggaagcauucccaaugacaaaccauuucaaaauguaaacaggaucacauauggggccugucccagauauguuaagcaaaacacucugaaauuggcaacagggaugcggaauguaccagagaaacaaacuagaggcauauucggcgcaaucgcagguuucauagaaaaugguugggagggaaugguagacgguugguacgguuucaggcaucaaaauucugagggcacaggacaagcagcagaucuuaaaagcacucaagcagcaaucaaccaaaucaacgggaaacugaauagguuaaucgagaaaacgaacgagaaauuccaucaaauugaaaaagaauucucagaaguagaagggagaauucaggaccucgagaaauauguugaggacacuaaaauagaucucuggucguacaacgcggagcuucuuguugcccuggagaaccaacauacaauugaucuaacugacucagaaaugaacaaacuguuugaaagaacaaggaagcaacugagggaaaaugcugaggauaugggcaaugguuguuucaaaauauaccacaaaugugacaaugccugcauagggucaaucagaaauggaacuuaugaccaugauguauacagagacgaagcauuaaacaaccgguuccagaucaaagguguugagcugaagucaggauacaaagauuggauccuauggauuuccuuugccauaucauguuuuuugcuuuguguuguuuugcugggguucaucaugugggccugccaaaaaggcaacauuaggugcaacauuugcauuuga

SEQ ID NO: 32708 - RNA, 1701 nt, Artificial Sequence; identical to SEQ ID NO: 32475
  derived and/or modified CDS sequence (wt) from hemagglutinin__InfluenzaA__ABD15548

SEQ ID NO: 32709 - RNA, 1701 nt, Artificial Sequence
  derived and/or modified CDS sequence (wt) from hemagglutinin__InfluenzaA__ABD15559
augaagacuaucauugcuuugagcuacauuuuaugucugguuuucgcucaaaaaauucccggaaaugacaacagcacggcaacgcugugccugggacaccaugcagugccaaacggaacgcuagugaaaacaaucacgaaugaccaaauugaagugacuaaugcuacugagcugguucagaguuccucaacagguagaauaugcgacaguccucaccgaauccuugauggagaaaacugcacacugauagaugcucuauugggagacccucauugugauggcuuccaaaauaaggaaugggaccuuuuuguugaacgcagcaaagccuacagcaacuguuacccuuaugaugugccggauuaugccucccuuaggucacuaguugccucauccggcacccuggaguuuaacaaugaaagcuucaauuggacuggagucgcucagaauggaacaagcuaugcuugcaaaaggagaucuauuaaaaguuucuuuaguagauugaauugguugcaccaauuaaaauacaaauauccagcacugaacgugacuaugccaaacaaugacaaauuugacaaauuguacauuugggggguucaccacccgaguacggacagugaccaaaccagccuauaugcucaagcaucagggagagucacagucucuaccaaaagaagccaacaaacuguaaucccgaauaucggaucuagacccuggguaaggggugucuccagcagaauaagcaucuauuggacaauaguaaaaccgggagacauacuuuugauuaacagcacagggaaucuaauugcuccucgggguuacuucaaaauacgaagugggaaaagcucaauaaugaggucagaugcacccauuggcaaaugcaauucugaaugcaucacuccaaauggaagcauucccaaugacaaaccauuucaaaauguaaacaggaucacauauggggccugucccagauauguuaagcaaaacacucugaaauuggcaacagggaugcggaauguaccagagaaacaaacuagaggcauauucggcgcaaucgcagguuucauagaaaaugguugggagggaaugguagacgguugguacgguuucaggcaucaaaauucugagggcacaggacaagcagcagaucuuaaaagcacucaagcagcaaucaaccaaaucaacgggaaacugaauagguuaaucgagaaaacgaacgagaaauuccaucaaauugaaaaagaauucucagaaguagaagggagaauucaggaccucgagaaauauguugaggacacuaaaauagaucucuggucguacaacgcagagcuucuuguugcccuggagaaccaacauacaauugaucuaacugacucagaaaugaacaaacuguuugaaagaacaaggaagcaacuaagggaaaaugcugaggauaugggcaaugguugcuucaaaauauaccacaaaugugacaaugccugcauagggucaaucagaaauggaacuuaugaccaugauguauacagagacgaagcauuaaacaaccgguuccagaucaaagguguugagcugaagucaggauacaaagauuggauccuauggauuuccuuugccauaucauguuuuuugcuuuguguuguuuugcugggguucaucaugugggccugccaaaaaggcaacauuaggugcaacauuugcauuuga

SEQ ID NO: 32710 - RNA, 1701 nt, Artificial Sequence; identical to SEQ ID NO: 32475
  derived and/or modified CDS sequence (wt) from hemagglutinin__InfluenzaA__ABD15570

SEQ ID NO: 32711 - RNA, 1701 nt, Artificial Sequence; identical to SEQ ID NO: 32514
  derived and/or modified CDS sequence (wt) from hemagglutinin__InfluenzaA__ABD15581

SEQ ID NO: 32712 - RNA, 1701 nt, Artificial Sequence
  derived and/or modified CDS sequence (wt) from hemagglutinin__InfluenzaA__ABD15592
augaagacuaucauugcuuugagcuacauuucaugucugguuuucgcucaaaaacuucccggaaaugacaacagcacggcaacgcugugccugggacaccaugcagugccaaacggaacacuagugaaaacaaucacaaaugaccaaauugaagugacuaaugcuacugagcugguucagaguuccucaacagguagaauaugcgacaguccucaccgaauccuugauggagaaaacugcacacugauagaugcucuauugggagacccucauugugauggcuuccaaaauaaggaaugggaccuuuuuguugaacgcagcaaagccuacagcaacuguuacccuuaugaugugccggauuaugccucccuuaggucacuaguugccucauccggcacucuggaguuuaacaaugaaagcuucaauuggacuggagucgcucagaauggaacaagcuaugcuugcaaaaggagaucuauuaaaaguuucuuuaguagauugaauugguugcaccaauuaaaauacaaauauccagcacugaacgugacuaugccaaacaaugacaaauuugacaaauuguacauuugggggguucaccacccgaguacggacagugaccaaaccagccuauaugcucaagcaucagggagagucacagucucuaccaaaagaagccaacaaacuguaaucccgaauaucggaucuagacccuggguaaggggugucuccagcagaauaagcaucuauuggacaauaguaaaaccgggagacauacuuuugauuaacagcacagggaaucuaauugcuccucgggguuacuucaaaauacgaagugggaaaagcucaauaaugaggucagaugcacccauuggcaaaugcaauucugaaugcaucacuccaaauggaagcauucccaaugacaaaccauuucaaaauguaaacaggaucacauauggggccugucccagauauguuaagcaaaacacucugaaauuggcaacagggaugcggaauguaccagagaaacaaacuagaggcauauucggcgcaaucgcagguuucauagaaaaugguugggagggaaugguagacgguugguacgguuucaggcaucaaaauucugagggcacaggacaagcagcagaucuuaaaagcacucaagcagcaaucaaccaaaucaacgggaaacugaauagguuaaucgagaaaacgaacgagaaauuccaucaaauugaaaaagaauucucagaaguagaagggagaauucaggaccucgagaaauauguugaggacacuaaaauagaucucuggucguacaacgcggagcuucuuguugcccuggagaaccaacauacaauugaucuaacugacucagaaaugaacaaacuguuugaaagaacaaggaagcaacugagggaaaaugcugaggauaugggcaaugguuguuucaaaauauaccacaaaugugacaaugccugcauagggucaaucagaaauggaacuuaugaccaugauguauacagagacgaagcauuaaacaaccgguuccagaucaaagguguugagcugaagucaggauacaaagauuggauccuauggauuuccuuugccauaucauguuuuuugcuuuguguuguuuugcugggguucaucaugugggccugccaaaaaggcaacauuagaugcaacauuugcauuuga

SEQ ID NO: 32713 - RNA, 1701 nt, Artificial Sequence; identical to SEQ ID NO: 32475
  derived and/or modified CDS sequence (wt) from hemagglutinin__InfluenzaA__ABD15603

SEQ ID NO: 32714 - RNA, 1701 nt, Artificial Sequence
  derived and/or modified CDS sequence (wt) from hemagglutinin__InfluenzaA__ABD15614
augaagacuaucauugcuuugagcuacauuucaugucugguuuucgcucaaaaacuucccggaaaugacaacagcacggcaacgcugugccugggacaccaugcagugccaaacggaacgcuagugaaaacaaucacgaaugaccaaauugaagugacuaaugcuacugagcugguucagaguuccucaacagguagaauaugcgacaguccucaccgaauccucgauggagaaaacugcacacugauagaugcucuauugggagacccucauugugauggcuuccaaaauaaggaaugggaccuuuuuguugaacgcagcaaagccuacagcaacuguuacccuuaugaugugccggauuaugccucccuuaggucacuaguugccucauccggcacucuggaguuuaacaaugaaagcuucaauuggacuggagucgcucagaauggaacaagcuaugcuugcaaaaggagaucuauuaaaaguuucuuuaguagauugaauugguugcaccaauuaaaauacaaauauccagcacugaacgugacuaugccaaacaaugacaaauuugacaaauuguacauuugggggguucaccacccgaguacggacagugaccaaaccagccuauaugcucaagcaucagggagagucacagucucuaccaaaagaagccaacaaacuguaaucccgaauaucggaucuagacccuggguaaggggugucuccagcagaauaagcaucuauuggacaauaguaaaaccgggagacauacuuuugauuaacagcacagggaaucuaauugcuccucgggguuacuucaaaauacgaagugggaaaagcucaauaaugaggucagaugcacccauuggcaaaugcaauucugaaugcaucacuccaaauggaagcauucccaaugacaaaccauuucaaaauguaaacaggaucacauauggggccugucccagauauguuaagcaaaacacucugaaauuggcaacagggaugcggaauguaccagagaaacaaacuagaggcauauucggcgcaaucgcagguuucauagaaaaugguugggagggaaugguagacgguugguacgguuucaggcaucaaaauucugagggcacaggacaagcagcagaucuuaaaagcacucaagcagcaaucaaccaaaucaacgggaaacugaauagguuaaucgagaaaacgaacgagaaauuccaucaaauugaaaaagaauucucagaaguagaagggagaauucaggaccucgagaaauauguugaggacacuaaaauagaucucuggucguacaacgcggagcuucuuguugcccuggagaaccaacauacaauugaucuaacugacucagaaaugaacaaacuguuugaaagaacaaggaagcaacugagggaaaaugcugaggauaugggcaaugguuguuucaaaauauaccacaaaugugacaaugccugcauagggucaaucagaaauggaacuuaugaccaugauguauacagagacgaagcauuaaacaaccgguuccagaucaaagguguugagcugaagucaggauacaaagauuggauccuauggauuuccuuugccauaucauguuuuuugcuuuguguuguuuugcugggguucaucaugugggccugccaaaaaggcaacauuaggugcaacauuugcauuuga

SEQ ID NO: 32715 - RNA, 1701 nt, Artificial Sequence
  derived and/or modified CDS sequence (wt) from hemagglutinin__InfluenzaA__ABD15625
augaagacuaucauugcuuugagcuacauucuaugucugguuuucgcucaaaaacuucccggaaaugacaacagcacggcaacgcugugccuugggcaccaugcaguaccaaacggaacgauagugaaaacaaucacgaaugaccaaauugaaguuacuaaugcuacugagcugguacagaguuccucaacagguggaauaugcgacaguccucaucagauccuugauggagaaaacugcacacuaauagaugcucuauugggagacccucagugugauggcuuccaaaauaagaaaugggaccuuuuuguugaacgcagcaaagccuacagcaacuguuacccuuaugaugugccggauuaugccucccuuaggucacuaguugccucauccggcacacuggaguuuaacaaugaaagcuucgauuggacuggagucacucagaauggaacaagcucugcuugcaaaaggagaucuaauaaaaguuucuuuaguagauugaauugguugacccacuuaaaauacaaauacccagcauugaacgugacuaugccaaacaaugaaaaauuugacaaauuguacauuugggggguucaccacccggguacggacagugaccaaaucagccuauaugcucaagcaucaggaagaaucacagucucuaccaaaagaagccaacaaacuguaaucccgaauaucggaucuagacccaggguaagggaugucuccagccaaauaagcaucuauuggacaauaguaaaaccgggagacauacuuuugauuaacagcacagggaaucuaauugcuccucgggguuacuucaaaauacgaagugggaaaagcucaauaaugagaucagaugcacccauuggcaaaugcaauucugaaugcaucacuccaaauggaagcauucccaaugacaaaccauuucaaaauguaaacaggaucacauauggggccugucccagauauguuaagcaaaacacucugaaauuggcaacagggaugcgaaauguaccagagaaacaaacuagaggcauauuuggcgcaaucgcggguuucauagaaaaugguugggagggaaugguggacgguugguacgguuucaggcaucaaaauucugagggcacaggacaagcagcagaucucaaaagcacucaagcagcaaucaaccaaaucaaugggaaacugaauagguuaaucgggaaaacaaacgagaaauuccaucagauugaaaaagaauucucagaaguagaagggagaauucaggaccucgugaaauauguugaggacacuaaaauagaucucuggucauacaacgcggagcuucuuguugcccuggagaaccaacauacaauugaucuaacugacucagaaaugaacaaacuguuugaaagaacaaagaagcaacugagggaaaaugcugaggauaugggcaaugguuguuucaaaauauaccacaaaugugacaaugccugcauagggucaaucagaaauggaacuuaugaccaugauguguacagagaugaagcauuaaacaaccgguuccagaucaaagguguugagcugaagucaggauacaaagauuggauccuauggauuuccuuugccauaucauguuuuuugcuuuguguugcuuuguugggguucaucaugugggccugccaaaaaggcaacauuaggugcaacauuugcauuuga

SEQ ID NO: 32716 - RNA, 1701 nt, Artificial Sequence
  derived and/or modified CDS sequence (wt) from hemagglutinin__InfluenzaA__ABD15636
augaagacuaucauugcuuugagcuacauuuuaugucugguuuucgcucaaaaaauucccggaaaugacaacagcacggcaacgcugugccugggacaccaugcagugccaaacggaacgcuagugaaaacaaucacgaaugaccaaauugaagugacuaaugcuacugagcugguucagaguuccucaacagguagaauaugcgacaguccucaccgaauccuugauggagaaaacugcacacugauagaugcucuauugggagacccucauugugauggcuuccaaaauaaggaaugggaccuuuuuguugaacgcagcaaagccuacagcaacuguuacccuuaugaugugccggauuaugccucccuuaggucacuaguugccucauccggcacccuggaguuuaacaaugaaagcuucaauuggacuggagucgcucagaauggaacaagcuaugcuugcaaaaggagaucuauuaaaaguuucuuuaguagauugaauugguugcaccaauuaaaauacaaauauccagcacugaacgugacuaugccaaacaaugacaaauuugacaaauuguacauuugggggguucaccacccgaguacggacagugaccaaaccagccuauaugcucaagcaucagggagagucacagucucuaccaaaagaagccaacaaacuguaaucccgaauaucggaucuagacccuggguaaggggugucuccagcagaauaagcaucuauuggacaauaguaaaaccgggagacauacuuuugauuaacagcacagggaaucuaauugcuccucgggguuacuucaaaauacgaagugggaaaagcucaauaaugaggucagaugcacccauuggcaaaugcaauucugaaugcaucacuccaaauggaagcauucccaaugacaaaccauuucaaaauguaaacaggaucacauauggggcaugucccagauauguuaagcaaaacacucugaaauuggcaacagggaugcggaauguaccagagaaacaaacuagaggcauauucggcgcaaucgcagguuucauagaaaaugguugggagggaaugguagacgguugguacgguuucaggcaucaaaauucugagggcacaggacaagcagcagaucuuaaaagcacucaagcagcaaucaaccaaaucaacgggaaacugaauagguuaaucgagaaaacgaacgagaaauuccaucaaauugaaaaagaauucucagaaguagaagggagaauucaggaccucgagaaauauguugaggacacuaaaauagaucucuggucguacaacgcggagcuucuuguugcccuggagaaccaacauacaauugaucuaacugacucagaaaugaacaaacuguuugaaagaacaaggaagcaacuaagggaaaaugcugaggauaugggcaaugguuguuucaaaauauaccacaaaugugacaaugccugcauagggucaaucagaaauggaacuuaugaccaugauguauacagagacgaagcauuaaacaaccgguuccagaucaaagguguugagcugaagucaggauacaaagauuggauccuauggauuuccuuugccauaucauguuuuuugcuuuguguuguuuugcugggguucaucaugugggccugccaaaaaggcaacauuaggugcaacauuugcauuuga

SEQ ID NO: 32717 - RNA, 1701 nt, Artificial Sequence
  derived and/or modified CDS sequence (wt) from hemagglutinin__InfluenzaA__ABD15680
augaagacuaucauugcuuugagcuacauuuuaugucugguuuucgcucaaaaacuucccggaaaugacaacagcacggcaacgcugugccuggggcaccaugcagugccaaacggaacgcuagugaaaacaaucacgaaugaccaaauugaagugacuaaugcuacugagcugguucagaguuccucaacagguggaauaugcgacaguccucaccaaauccuugauggagaaaacugcacacuaauagaugcucuauugggagacccucauugugauggcuuccaaaauaaggaaugggaccuuuuuguugaacgcagcaaagccuacagcaacuguuacccuuaugaugugccggauuaugccucccuuaggucacuaguugccucauccggcacacuggaguuuaacaaugaaagcuucaauuggacuggagucgcucagaauggaacaagcucugcuugcaaaaggagaucuaauaaaaguuucuuuaguagauugaauugguugcaccaauuaaaauacaaauacccagcacugaacgugacuaugccaaacaaugaaaaauuugacaaauuguacauuugggggguucaccacccgaguacggacagugaccaaaucagccuauaugcucaagcaccagggagagucacagucucuaccaaaagaagccaacaaacuguaaucccgaauaucggaucuagacccuggguaaggggugucuccagcagaauaagcaucuauuggacaauaguaaaaccgggagacauacuuuugauuaacugcacagggaaucuaauugcuccucgggguuacuucaaaauacgaagugggaaaagcucaauaaugaggucagaugcauccauuggcaaaugcaauucugaaugcaucacuccaaauggaagcauucccaaugacaaaccauuucaaaauguaaacaggaucacauauggggccugucccagauauguuaagcaaaacacucugaaauuggcaacagggaugcggaauguaccagagaaacaaaccagaggcauauucggcgcaaucgcggguuucauagaaaaugguugggagggaaugguggacgguugguacgguuucaggcaucaaaauucugagggcacaggacaagcagcagaucucaaaagcacucaagcagcaaucaaccaaaucaacgggaaacugaauagguuaaucgagaaaacgaacgagaaauuccaucaaauugaaaaagaauucucagaaguggaagggagaauucaggaccucgagaaauauguugaggacacuaaaauagaucucuggucguacaacgcggagcuucuuguugcccuggagaaccagcauacaauugaucuaacugacucagaaaugaacaaacuguuugaaagaacaaagaagcaacugagggaaaaugcugaggauaugggcaaugguuguuucaaaauauaccacaaaugugacaaugccugcauagggucaaucagaaaugggacuuaugaccaugauguauacagagacgaagcauuaaacaaccgguuccagaucaaagguguugagcugaagucaggauacaaagauuggauccuauggauuuccuuugccauaucauguuuuuugcuuuguguugucuugcugggauucaucaugugggccugccaaaaaggcaacauuaggugcaacauuugcauuuga

SEQ ID NO: 32718 - RNA, 1701 nt, Artificial Sequence
  derived and/or modified CDS sequence (wt) from hemagglutinin__InfluenzaA__ABD15691
augaagacuaucauugcuuugagcuacauuuuaugucugguuuucgcucaaaaacuucccguaaaugacaaaagcacggcaacgcugugccugggacaccaugcagugccaaacggaacgcuagugaaaacaaucacgaaugaccacauugaagugacuaaugcuacugagcugguucagaguuccccaacagguagaauaugcgacaguccucaccaaauccuugauggagaaaacugcacacuaauagaugcucuauugggagacccucauugugauggcuuccaaaauaaggaaugggaccuuuuuguugaacgcagcacagccuacagcaacuguuacccuuaugaugugccggauuaugccucccuuaggucacuaguugccucauccggcacacuggaguuuaacaaugaaagcuucaauuggacuggagucgcucagaauggaacaagcucugcuugcaaaaggagaucuauuaaaaguuucuuuaguagauugaauugguugcaccaauuaaaauacaaauauccagcacugaacgugacuaugccaaacaaugaaaaauuugacaaauuguacauuugggggguucaccacccgaguacggacagugaccaaaucagccuauaugcucaagcaucagggagagucacagucucuaccaaaagaagccaacaaacuguaaucccgaauaucggaucuagacccuggguaaggggugucuccagcagaauaagcaucuauuggacaauaguaaaaccgggagacauacuuuugauuaacagcacagggaaucuaauugcuccucgggguuacuucaaaauacgaagugggaaaagcucaauaaugaggucaaaugcacccauuggcaaaugcaauucugaaugcaucacuccaaauggaagcauucccaaugacaaaccauuucaaaauguaaacaggaucacauauggggccugucccagauauguuaagcaaaacacucugaaauuggcaacagggaugcggaauguaccagagaaacaaacuagaggcauauucggcgcaauugcagguuucauagaaaaugguugggaaggaaugguggacgguugguacgguuucaggcaucaaaauucugagggcacaggacaagcagcagaucuuaaaagcacucaagcugcaaucaaccaaaucaacgggaaacugaauagguuaaucgagaaaacaaacgagaaauuccaucaaauugaaaaagaauucucagaaguagaagggagaauucaggaccucgagaaauauguugaggacacuaaaauagaucucuggucguacaacgcggagcuucuuguugcccuggagaaccaacauacaauugaucuaacugacucagaaaugaacaaacuguuugaaagaacaaggaagcaacugagggaaaaugcugaggauaugggcaaugguuguuucaaaauauaccacaaaugugacaaugccugcauagggucaaucagaaauggaacuuaugaccaugauguauacagagacgaagcauuaaacaaccgguuccagaucaaagguguugagcugaagucaggauacaaagauuggauccuauggauuuccuuugccauaucauguuuuuugcuuuguguuguuuugcugggguucaucaugugggccugccaaaaaggcaacauuaggugcaacauuugcauuuga

SEQ ID NO: 32719 - RNA, 1701 nt, Artificial Sequence
  derived and/or modified CDS sequence (wt) from hemagglutinin__InfluenzaA__ABD15702
augaagacuaucauugcuuugagcuacauuuuaugucugguuuucgcucaaaaacuucccggaaaugacaacagcacggcaacgcugugccuggggcaccaugcagugccaaacggaacgcuagugaaaacaaucacgaaugaccaaauugaagugaccaaugcuacugagcugguucagaguuccucaacagguggaauaugcgacaguccucaccaaauccuugauggagaaaacugcacacuaauagaugcucuauugggagacccucauugugauggcuuccaaaauaaggaaugggaccuuuuuguugaacgcagcaaagccuacagcaacuguuacccuuaugaugugccggauuaugccucccuuaggucacuaguugccucauccggcacacuggaguuuaacaaugaaagcuucaauuggacuggagucgcucagaauggaacaagcucugcuugcaaaaggagaucuaauaaaaguuucuuuaguagauugaauugguugcaccaauuaaaauacaaauacccagcacugaacgugacuaugccaaacaaugaaaaauuugacaaauuguacauuugggggguucaccacccgaguacggacagugaccaaaccagccuauaugcucaagcaccagggagagucacagucucuaccaaaagaagccaacaaacuguaaucccgaauaucggaucuagacccuggguaaggggugucuccagcagaauaagcaucuauuggacaauaguaaaaccgggagacauacuuuugauuaacugcacagggaaucuaauugcuccucgggguuacuucaaaauacgaagugggaaaagcucaauaaugaggucagaugcauccauuggcaaaugcaauucugaaugcaucacuccaaauggaagcauucccaaugacaaaccauuucaaaauguaaacaggaucacauauggggccugucccagauauguuaagcaaaacacucugaaauuggcaacagggaugcggaauguaccagagaaacaaacuagaggcauauucggcgcaaucgcggguuucauagaaaaugguugggagggaaugguggacgguugguacgguuucaggcaucaaaauucugagggcacaggacaagcagcagaucucaaaagcacucaagcagcaaucaaccaaaucaacgggaaacugaauagguuaaucgagaaaacgaacgagaaauuccaucaaauugaaaaagaauucucagaaguggaagggagaauucaggaccucgagaaauauguugaggacacuaaaauagaucucuggucguacaacgcggagcuucuuguugcccuggagaaccagcauacaauugaucuaacugacucagaaaugaacaaacuauuugaaagaacaaagaagcaacugagggaaaaugcugaggauaugggcaaugguuguuucaaaauauaccacaaaugugacaaugccugcauagggucaaucagaaaugggacuuaugaccaugauguauacagagacgaagcauuaaacaaccgguuccagaucaaagguguugagcugaagucaggauacaaagauuggauccuauggauuuccuuugccauaucauguuuuuugcuuuguguugucuugcugggguucaucaugugggccugccaaaaaggcaacauuaggugcaacauuugcauuuga

SEQ ID NO: 32720 - RNA, 1701 nt, Artificial Sequence
  derived and/or modified CDS sequence (wt) from hemagglutinin__InfluenzaA__ABD15724
augaagacuaucauugcuuugagcuacauuuuaugucugguuuucgcucaaaaacuucccggaaaugacaacagcacggcaacgcugugccuggggcaccaugcagugccaaacggaacgcuagugaaaacaaucacgaaugaccaaauugaagugacuaaugcuacugagcugguucagaguuccucaacagguggaauaugcgacaguccucaccaaauccuugauggagaaaacugcacacuaauagaugcucuauugggagacccucauugugauggcuuccaaaauaaggaaugggaccuuuuuguugaacgcagcaaagccuacagcaacuguuacccuuaugaugugccggauuaugccucccuuaggucacuaguugccucauccggcacacuggaguuuaacaaugaaagcuucaauuggacuggagucgcucagaauggaacaagcucugcuugcaaaaggagaucuaauaaaaguuucuuuaguagauugaauugguugcaccaauuaaaauacaaauacccagcacugaacguggcuaugccaaacaaugaaaaauuugacaaauuguacauuugggggguucaccacccgaguacggacagugaccaaaucagccuauaugcucaagcaccagggagagucacagucucuaccaaaagaagccaacaaacuguaaucccgaauaucggaucuagacccuggguaaggggugucuccagcagaauaagcaucuauuggacaauaguaaaaccgggagacauacuuuugauuaacugcacagggaaucuaauugcuccucgggguuacuucaaaauacgaagugggaaaagcucaauaaugaggucagaugcauccauuggcaaaugcaauucugaaugcaucacuccaaauggaagcauucccaaugacaaaccauuucaaaauguaaacaggaucacauauggggccugucccagauauguuaagcaaaacacucugaaauuggcaacagggaugcggaauguaccagagaaacaaacuagaggcauauucggcgcaaucgcggguuucauagaaaaugguugggagggaaugguggacgguugguacgguuucaggcaucaaaauucugagggcacaggacaagcagcagaucucaaaagcacucaagcagcaaucaaccaaaucaacgggaaacugaauagguuaaucgagaaaacgaacgagaaauuccaucaaauugaaaaagaauucucagaaguggaagggagaauucaggaccucgagaaauauguugaggacacuaaaauagaucucuggucguacaacgcggagcuucuuguugcccuggagaaccagcauacaauugaucuaacugacucagaaaugaacaaacuguuugaaagaacaaagaagcaacugagggaaaaugcugaggauaugggcaaugguuguuucaaaauauaccacaaaugugacaaugccugcauagggucaaucagaaaugggacuuaugaccaugauguauacagagacgaagcauuaaacaaccgguuccagaucaaagguguugagcugaagucaggauacaaagauuggauccuauggauuuccuuugccauaucauguuuuuugcuuuguguugucuugcugggguucaucaugugggccugccaaaaaggcaacauuaggugcaacauuugcauuuga

SEQ ID NO: 32721 - RNA, 1701 nt, Artificial Sequence
  derived and/or modified CDS sequence (wt) from hemagglutinin__InfluenzaA__ABD15746
augaagacuaucauugcuuugagcuacauuuuaugucugguuuucgcucaaaaacuucccguaaaugacaacagcacggcaacgcugugccugggacaccaugcagugccaaacggaacgcuagugaaaacaaucacgaaugaccacauugaagugacuaaugcuacugaguugguucagaguuccucaacagguagaauaugcgacaguccucaccaaauccuugauggagaaaacugcacacuaauagaugcucuauugggagacccucauugugauggcuuccaaaauaaggaaugggaccuuuuuguugaacgcagcacagccuacagcaacuguuacccuuaugaugugccggauuaugccucccuuaggucacuaguugccucauccggcacacuggaguuuaacaaugaaagcuucaauuggacuggagucgcucagaauggaacaagcucugcuugcaaaaggagaucuauuaaaaguuucuuuaguagauugaauugguugcaccaauuaaaauacaaauauccagcacugaacgugacuaugccaaacaaugaaaaauuugacaaauuguacauuugggggguucaccacccgaguacggacagugaccaaaucagccuauaugcucaagcaucagggagagucacagucucuaccaaaagaagccaacaaacuguaaucccgaauaucggaucuagacccuggguaagggguaucuccagcagaauaagcaucuauuggacaauaguaaaaccgggagacauacuuuugauuaacagcacagggaaucuaauugcuccucgggguuacuuuaaaauacgaagugggaaaagcucaauaaugaggucaaaugcacccauuggcaaaugcaauucugaaugcaucacuccaaauggaagcauucccaaugacaaaccauuucaaaauguaaacaggaucacauauggggccugucccagauauguuaagcaaaacacucugaaauuggcaacaggaaugcggaauguaccagagaaacaaacuagaggcauauucggcgcaaucgcggguuucauagaaaaugguugggagggaaugguagacgguugguaugguuucaggcaucaaaauucugagggcacaggacaagcagcagaucuuaaaagcacucaagcagcaaucaaccaaaucaacgggaaacugaauagguuaaucgagaaaacaaacgagaaauuccaucaaauugaaaaagaauucucagaaguagaagggagaauucaggaccucgagaaauauguugaggacacuaaaauagaucucuggucguacaacgcggagcuucuuguugcccuggagaaccaacauacaauugaucuaacagacucagaaaugaacaaacuguuugaaagaacaaggaagcaacugagggaaaaugcugaggagaugggcaaugguuguuucaaaauauaccacaaaugugacaaugccugcauagggucaaucagaaauggaacuuaugaccaugauguauacagagacgaagcauuaaacaaccgguuccagaucaaagguguugagcugaagucaggauacaaagauuggauccuauggauuuccuuugccauaucauguuuuuugcuuuguguuguuuugcugggguucaucaugugggccugccaaaaaggcaacauuaggugcaacauuugcauuuga

SEQ ID NO: 32722 - RNA, 1701 nt, Artificial Sequence
  derived and/or modified CDS sequence (wt) from hemagglutinin__InfluenzaA__ABD15757
augaagacuaucauugcuuugagcuacauuuuaugucugguuuucgcucaaaaacuucccguaaaugacaacagcacggcaacgcugugccugggacaccaugcagugccaaacggaacgcuagugaaaacaaucacgaaugaccacauugaagugacuaaugcuacugaguugguucagaguuccucaacagguagaauaugcgacaguccucaccaaauccuugauggagaaaacugcacacuaauagaugcucuauugggagacccucauugugauggcuuccaaaauaaggaaugggaccuuuuuguugaacgcagcacagccuacagcaacuguuacccuuaugaugugccggauuaugccucccuuaggucacuaguugccucauccggcacacuggaguuuaacaaugaaagcuucaauuggacuggagucgcucagaauggaacaagcucugcuugcaaaaggagaucuauuaaaaguuucuuuaguagauugaauugguugcaccaauuaaaauacaaauauccagcacugaacgugacuaugccaaacaaugaaaaauuugacaaauuguacauuugggggguucaccacccgaguacggacagugaccaaaucagccuauaugcucaagcaucagggagagucacagucucuaccaaaagaagccaacaaacuguaaucccgaauaucggaucuagacccuggguaaggggugucuccagcagaauaagcaucuauuggacaauaguaaaaccgggagacauacuuuugauuaacagcacagggaaucuaauugcuccucgggguuacuuuaaaauacgaagugggaaaagcucaauaaugaggucaaaugcacccauuggcaaaugcaauucugaaugcaucacuccaaauggaagcauucccaaugacaaaccauuucaaaauguaaacaggaucacauauggggccugucccagauauguuaagcaaaacacucugaaauuggcaacaggaaugcggaauguaccagagaaacaaacuagaggcauauucggcgcaaucgcggguuucauagaaaaugguugggagggaaugguagacgguugguaugguuucaggcaucaaaauucugagggcacaggacaagcagcagaucuuaaaagcacucaagcagcaaucaaccaaaucaacgggaaacugaauagguuaaucgagaaaacaaacgagaaauuccaucaaauugaaaaagaauucucagaaguagaagggagaauucaggaccucgagaaauauguugaggacacuaaaauagaucucuggucguacaacgcggagcuucuuguugcccuggagaaccaacauacaauugaucuaacagacucagaaaugaacaaacuguuugaaagaacaaggaagcaacugagggaaaaugcugaggagaugggcaaugguuguuucaaaauauaccacaaaugugacaaugccugcauagggucaaucagaaauggaacuuaugaccaugauguauacagagacgaagcauuaaacaaccgguuccagaucaaagguguugagcugaagucaggauacaaagauuggauccuauggauuuccuuugccauaucauguuuuuugcuuuguguuguuuugcugggguucaucaugugggccugccaaaaaggcaacauuaggugcaacauuugcauuuga

SEQ ID NO: 32723 - RNA, 1701 nt, Artificial Sequence; identical to SEQ ID NO: 32662
  derived and/or modified CDS sequence (wt) from hemagglutinin__InfluenzaA__ABD15779

SEQ ID NO: 32724 - RNA, 1701 nt, Artificial Sequence; identical to SEQ ID NO: 32662
  derived and/or modified CDS sequence (wt) from hemagglutinin__InfluenzaA__ABD15790

SEQ ID NO: 32725 - RNA, 1701 nt, Artificial Sequence; identical to SEQ ID NO: 32662
  derived and/or modified CDS sequence (wt) from hemagglutinin__InfluenzaA__ABD16292

SEQ ID NO: 32726 - RNA, 1701 nt, Artificial Sequence; identical to SEQ ID NO: 32685
  derived and/or modified CDS sequence (wt) from hemagglutinin__InfluenzaA__ABD16303

SEQ ID NO: 32727 - RNA, 1701 nt, Artificial Sequence
  derived and/or modified CDS sequence (wt) from hemagglutinin__InfluenzaA__ABD16325
augaagacuaucauugcuuugagcuacauccuaugucugguuuucgcucaaaaacuucccggaaaugacaacagcacggcaacgcugugccuugggcaccaugcaguaccaaacggaacgauagugaaaacaaucacgaaugaccaaauugaaguuacuaaugcuacugagcugguucagaguuccucaacagguggaauaugcgacaguccucaucagauccuugauggagaaaacugcacacuaauagaugcucuauugggagacccucagugugauggcuuccaaaauaagaaaugggaccuuuuuguugaacgcagcaaagccuacagcaacuguuacccuuaugaugugccggauuaugccucccuuaggucacuaauugccucauccggcacacuggaguuuaacaaugaaagcuucaauuggacuggagucacucaaaauggaacaagcucugcuugcaaaaggagaucuaauagcaguuucuuuaguagauugaauugguugacccacuuaaaauucaaauacccagcauugaacgugacuaugccaaacaaugaagaauuugacaaauuguacauuugggggguucaccacccggguacauacaaugaccaaaucagccuauaugcucaagcaucaggaagaaucacagucucuaccaaaagaagccaacaaacuguaaucccgaauaucgggucuagacccaggguaagggauauccccagcagaauaagcaucuauuggacaauaguaaaaccgggagacauacuuuugauuaacagcacagggaaucuaauugcuccucgggguuacuucaaaauacgaagugggaaaagcucaauaaugagaucagaugcacccauuggcaaaugcaauucugaaugcaucacuccaaauggaagcauucccaaugacaaaccauuucaaaauguaaacaggaucacauauggggccugucccagauauguuaagcaaaacacucugaaauuggcaacagggaugcgaaauguaccagagaaacaaacuagaggcauauuuggcgcaaucgcggguuucauagaaaaugguugggagggaaugguggaugguugguacgguuucaggcaucaaaauucugagggaauaggacaagcagcagaucucaaaagcacucaagcagcaaucgaccaaaucaaugggaagcugaauagguugaucgggaaaaccaacgagaaauuccaucagauugaaaaagaauucucagaaguagaagggagaauucaggaccucgaaaaauauguugaggacacuaaaauagaucucuggucauacaacgcggagcuucuuguugcccuggagaaccaacauacaauugaucuaacugacucagaaaugaacaaacuguuugaaagaacaaagaagcaacugagggaaaaugcugaggauaugggcaaugguuguuucaaaauauaccacaaaugugacaaugccugcauagggucaaucagaaauggaacuuaugaccaugauguauacagagaugaagcauuaaacaaccgguuccagaucaaagguguugagcugaagucaggauacaaagauuggauucuauggauuuccuuugccauaucauguuuuuugcuuuguguugcuuuguugggguucaucaugugggccugccaaaaaggcaacauuaggugcaacauuugcauuuga

SEQ ID NO: 32728 - RNA, 1701 nt, Artificial Sequence
  derived and/or modified CDS sequence (wt) from hemagglutinin__InfluenzaA__ABD16336
augaagacuaucauugcuuugagcuacacucuaugucugguuuucgcucaaaaacuucccggaaaugacaacagcacggcaacgcugugccuugggcaccaugcaguaccaaacggaacgauagugaaaacaaucacgaaugaccaaauugaaguuacuaaugcuacugagcugguucagaguuccucaacagguggaauaugcgacaguccucaucagauccuugauggagaaaacugcacacuaauagaugcucuauugggagacccucagugugauggcuuccaaaauaagaaaugggaccuuuuuguugaacgcagcaaagccuacagcaacuguuacccuuaugaugugccggauuaugccucccuuaggucacuaauugccucauccggcacacuggaguuuaacaaugaaagcuucaauuggacuggagucacucaaaauggaacaagcucugcuugcaaaaggagaucuaauagcaguuucuuuaguagauugaauugguugacccacuuaaaauucaaauacccagcauugaacgugacuaugccaaacaaugaagaauuugacaaauuguacauuugggggguucaccacccggguacauacaaugaccaaaucagccuauaugcucaagcaucaggaagaaucacagucucuaccaaaagaagccaacaaacuguaaucccgaauaucgggucuagacccaggguaagggauauccccagcagaauaagcaucuauuggacaauaguaaaaccgggagacauacuuuugauuaacagcacagggaaucuaauugcuccucgggguuacuucaaaauacgaagugggaaaagcucaauaaugagaucagaugcacccauuggcaaaugcaauucugaaugcaucacuccaaauggaagcauucccaaugacaaaccauuucaaaauguaaacaggaucacauauggggccugucccagauauguuaagcaaaacacucugaaauuggcaacagggaugcgaaauguaccagagaaacaaacuagaggcauauuuggcgcaaucgcggguuucauagaaaaugguugggagggaaugguggaugguugguacgguuucagacaucaaaauucugagggaauaggacaagcagcagaucucaaaagcacucaagcagcaaucgaccaaaucaaugggaagcugaauagguugaucgggaaaaccaacgagaaauuccaucagauugaaaaagaauucucagaaguagaagggagaauucaggaccucgagaaauauguugaggacacuaaaauagaucucuggucauacaacgcggagcuucuuguugcccuggagaaccaacauacaauugaucuaacugacucagaaaugaacaaacuguuugaaagaacaaagaagcaacugagggaaaaugcugaggauaugggcaaugguuguuucaaaauauaccacaaaugugacaaugccugcauagggucaaucagaaauggaacuuaugaccaugauguauacagagaugaagcauuaaacaaccgguuccagaucaaagguguugagcugaagucaggauacaaagauuggauccuauggauuuccuuugccauaucauguuuuuugcuuuguguugcuuuguugggguucaucaugugggccugccaaaaaggcaacauuaggugcaacauuugcauuuga

SEQ ID NO: 32729 - RNA, 1701 nt, Artificial Sequence; identical to SEQ ID NO: 32645
  derived and/or modified CDS sequence (wt) from hemagglutinin__InfluenzaA__ABD16347

SEQ ID NO: 32730 - RNA, 1701 nt, Artificial Sequence
  derived and/or modified CDS sequence (wt) from hemagglutinin__InfluenzaA__ABD16358
augaagacuaucauugcuuugagcuacauucuaugucugguuuucgcucaaaaacuucccggaaaugacaacagcacggcaacgcugugccuugggcaccaugcaguaccaaacggaacgauagugaaaacaaucacgaaugaccaaauugaaguuacuaaugcuacugagcugguucagaguuccucaacagguggaauaugcgacaguccucaucagauccuugauggagaaaacugcacacuaauagaugcucuauugggagacccucagugugauggcuuccaaaauaagaaaugggaccuuuuuguugaacgcagcaaagccuacagcaacuguuacccuuaugaugugccggauuaugccucccuuaggucacuaauugccucauccggcacacuggaguuuaacaaugaaagcuucaauuggacuggagucacucaaaauggaacaagcucugcuugcaaaaggagaucuaauagcaguuucuuuaguagauugaauugguugacccacuuaaaauucaaauacccagcauugaacgugacuaugccaaacaaugaagaauuugacaaauuguacauuugggggguucaccacccggguacauacaaugaccaaaucagccuauaugcucaagcaucaggaagaaucacagucucuaccaaaagaagccaacaaacuguaaucccgaauaucgggucuagacccaggguaagggauauccccagcagaauaagcaucuauuggacaauaguaaaaccgggagacauacuuuugauuaacagcacagggaaucuaauugcuccucgggguuacuucaaaauacgaagugggaaaagcucaauaaugagaucagaugcacccauuggcaaaugcaauucugaaugcaucacuccaaauggaagcauucccaaugacaaaccauuucaaaauguaaacaggaucacauauggggccugucccagauauguuaagcaaaacacucugaaauuggcaacagggaugcgaaauguaccagagaaacaaacuagaggcauauuuggugcaaucgcggguuucauagaaaaugguugggagggaaugguggaugguugguacgguuucaggcaucaaaauucugagggaauaggacaagcagcagaucucaaaagcacucaagcagcaaucgaccaaaucaaugggaagcugaauagguugaucgggaaaaccaacgagaaauuccaucagauugaaaaagaauucucagaaguagaagggagaauucaggaccucgagaaauauguugaggacaccaaaauagaucucuggucauacaacgcggagcuucuuguugcccuagagaaccaacauacaauugaucuaacugacuuagaaaugaacaaacuguuugaaagaacaaagaagcaacugagggaaaaugcugaggauaugggcaaugguuguuucaaaauauaccacaaaugugacaaugccugcauagggucaaucagaaauggaacuuaugaccaugauguauacagagaugaagcauuaaacaaccgguuccagaucaaagguguugagcugaagucaggauacaaagauuggauccuauggauuuccuuugccauaucauguuuuuugcuuuguguugcuuuguugggguucaucaugugggccugccaaaaaggcaacauuaggugcaacauuugcauuuga

SEQ ID NO: 32731 - RNA, 1701 nt, Artificial Sequence
  derived and/or modified CDS sequence (wt) from hemagglutinin__InfluenzaA__ABD16472
augaagacuaucauugcuuugagcuacauucuaugucugguuuucgcucaaaaacuucccggaaaugacaacagcacggcaacgcugugccuugggcaccaugcaguaccaaacggaacgauagugaaaacaaucacgaaugaccaaauugaaguuacuaaugcuacugagcugguucagaguuccucaacagguggaauaugcgacaguccucaucagauccuugauggagaaaacugcacacuaauagaugcucuauugggagacccucagugugauggcuuccaaaauaagaaaugggaccuuuuuguugaacgcagcaaagccuacagcaacuguuacccuuaugaugugccggauuaugccucccuuaggucacuaauugccucauccggcacacuggaguuuaacaaugaaagcuucaauuggacuggagucacucaaaauggaacaagcucugcuugcaaaaggagaucuaauagcaguuucuuuaguagauugaauugguugacccacuuaaaauucaaauacccagcauugaacgugacuaugccaaacaaugaagaauuugacaaauuguacauuugggggguucaccacccggguacauacaaugaccaaaucagccuauaugcucaagcaucaggaagaaucacagucucuaccaaaagaagccaacaaacuguaaucccgaauaucgggucuagacccaggguaagggauauccccagcagaauaagcaucuauuggacaauaguaaaaccgggagacauacuuuugauuaacagcacagggaaucuaauugcuccucgggguuacuucaaaauacgaagugggaaaagcucaauaaugagaucagaugcacccauuggcaaaugcaauucugaaugcaucacuccaaauggaagcauucccaaugacaaaccauuucaaaauguaaacaggaucacauauggggccugucccagauauguuaagcaaaacacucugaaauuggcaacagggaugcgaaauguaccagagaaacaaacuagaggcauauuuggcgcaaucgcggguuucauagaaaaugguugggagggaaugguggaugguugguacgguuucaggcaucaaaauucugagggaauaggacaagcagcagaucucaaaagcacucaagcagcaaucgaccaaaucaaugggaagcugaauagguugaucgggaaaaccaacgagaaauuccaucagauugaaaaagaauucucagaaguagaagggagaauucaggaccucgagaaauauguugaggacacuaaaauagaucucuggucauacaacgcggagcuucuuguugcccuggagaaccaacauacaauugaucuaacugacucagaaaugaacaaacuguuugaaagaacaaagaagcaacugagggaaaaugcugaggauaugggcaaugguuguuucaaaauauaccacaaaugugacaacgccugcauagggucaaucagaaauggaacuuaugaccaugauguauacagagaugaagcauuaaacaaccgguuccagaucaaagguguugagcugaagucaggauacaaagauuggauccuauggauuuccuuugccauaucauguuuuuugcuuuguguugcuuuguugggguucaucaugugggccugccaaaaaggcaacauuaggugcaacauuugcauuuga

SEQ ID NO: 32732 - RNA, 1701 nt, Artificial Sequence; identical to SEQ ID NO: 32645
  derived and/or modified CDS sequence (wt) from hemagglutinin__InfluenzaA__ABD16483

SEQ ID NO: 32733 - RNA, 1701 nt, Artificial Sequence; identical to SEQ ID NO: 32647
  derived and/or modified CDS sequence (wt) from hemagglutinin__InfluenzaA__ABD16494

SEQ ID NO: 32734 - RNA, 1701 nt, Artificial Sequence; identical to SEQ ID NO: 32669
  derived and/or modified CDS sequence (wt) from hemagglutinin__InfluenzaA__ABD16505

SEQ ID NO: 32735 - RNA, 1701 nt, Artificial Sequence
  derived and/or modified CDS sequence (wt) from hemagglutinin__InfluenzaA__ABD16516
augaagacuaucauugcuuugagcuacauucuauguaugguuuucgcucaaaaacuucccggaaaugacaacagcacggcaacgcugugccuugggcaccaugcaguaccaaacggaacgauagugaaaacaaucacgaaugaccaaauugaaguuacuaaugcuacugagcugguucagaguuccucaacagguggaauaugcgacaguccucaucagauccuugauggagaaaacugcacacuaauagaugcucuauugggagacccucagugugauggcuuccaaaauaagaaaugggaccuuuuuauugaacgcagcaaagccuacagcaacuguuacccuuaugauguaccggauuaugccucccuuagaucacuaguugccucauccggcacacuggaauuuaacaaugaaagcuucaauuggacuggagucacucaaaauggaacaagcucugcuugcaaaaggagaucuaauaacaguuucuuuaguagauugaauugguugacccacuuaaaauucaaauacccagcauugaacgugacuaugccaaacaaugaaaaauuugacaaauuguacauuugggggguucaccacccggguacggacaaugaccaaaucagccuauaugcucaagcuucaggaagaaucacagucucuaccaaaagaagccaacaaacuguaaucccgaacaucggaucuagacccaggguaagggauauucccagcagaauaagcaucuauuggacaauaguaaaaccgggagacauacuuuugauuaacagcacagggaaucuaauugcuccucgggguuacuucaaaauacgaagugggaaaagcucaauaaugagaucagaugcacccauugacaaaugcaauucugaaugcaucacuccaaauggaagcauucccaaugacaaaccauuucaaaauguaaacaggaucacauauggggccugucccagauauguuaagcaaaacacucugaaauuggcaacagggaugcgaaauguaccagagaaacaaacuagaggcauauuuggcgcaaucgcggguuucauagaaaaugguugggagggaaugguggaugguugguacgguuucaggcaucaaaauucugagggaauaggacaagcagcagaucucaaaagcacucaagcagcaaucaaccaaaucaaugggaagcugaauagguugaucgggaaaaccaacgagaaauuccaucagauugaaaaagaauucucagaaguagaagggagaauucaggaccucgagaaauauguugaggacacuaaaguagaucucuggucauacaacgcggagcuucuuguugcccuggagaaccaacauacaauugaucuaacugacucagaaaugaacaaacuguuugaaagaacaaagaagcaacugagggaaaaugcugaggauaugggcaaugguuguuucaaaauauaccacaaaugugacaaugccugcauagggucaaucagaaauggaaccuaugaccaugauguauacagagaugaagcauugaacaaccgguuccagaucaaagguguugagcugaagucaggauacaaagauuggauccuauggauuuccuuugccauaucauguuuuuugcuuuguguugcuuuguugggguucaucaugugggccugccaaaaaggcaacauuaggugcaacauuugcauuuga

SEQ ID NO: 32736 - RNA, 1701 nt, Artificial Sequence
  derived and/or modified CDS sequence (wt) from hemagglutinin__InfluenzaA__ABD16527
augaagacuaucauugcuuugagcuacauucuaugucugguuuucgcucaaaaacuucccgaaaaugacaacagcacggcaacgcugugccuugggcaccaugcaguaccaaacggaacgauagugaaaacaaucacaaaugaccaaauugaaguuacuaaugcuacugagcugguucagaguuccucaacagguggaauaugcgacaguccucaucagauccuugauggagaaaacugcacacuaauagaugcucuauugggagacccucagugugauggcuuccaaaauaagaaaugggaccuuuuuguugaacgcagcaaagccuacagcaacuguuacccuuaugaugugccggaucaugccucccuuaggucacuaguugccucauccggcacacuggaguuuaacaaugaaagcuucgauuggacuggagucacucagaauggaacaagcucugcuugcaaaaggagaucuaauaaaaguuucuuuaguagauugaauugguugacccacuuaaaauacaaauacccagcauugaacgugacuaugccaaacaaugaaaaauuugacaaauuguacauuugggggguucaccacccggguacggacagugaccaaaucagccuauaugcucaagcaucaggaagaaucacagucucuaccaaaagaagccaacaaacuguaaucccgaauaucggaucuagacccaggguaagggaugucuccagccgaauaagcaucuauuggacaauaguaaaaccgggagacauacuuuugauuaacagcacagggaaucuaauugcuccucgggguuacuucaaaauacgaagugggaaaagcucaauaaugagaucagaugcacccauuggcaaaugcaauucugaaugcaucacuccaaauggaagcauucccaaugacaaaccauuucaaaauguaaacaggaucacauauggggccugucccagauauguuaagcaaaacacucugaaauuggcaacagggaugcgaaauguaccagagaaacaaacuagaggcauauuuggcgcaaucgcggguuucauagaaaaugguugggagggaaugguggacgguugguacgguuucaggcaucaaaauucugagggcacaggacaagcagcagaucucaaaagcacucaagcagcaaucaaccaaaucaaugggaaacugaauagguuaaucgggaaaacaaacgagaaauuccaucagauugaaaaagaauucucagaaguagaagggagaauucaggaccucgagaaauauguugaggacacuaaaauagaucucuggucauacaacgcggagcuucuuguugcccuggagaaccaacauacaauugaucuaacugacucagaaaugaacaaacuguuugaaagaacaaagaagcaacugagggaaaaugcugaggauaugggcaaugguuguuucaaaauauaccacaaaugugacaaugccugcauagggucaaucagaaauggaacuuaugaccaugauguguacagagaugaagcauuaaacaaccgguuccagaucaaagguguugagcugaagucaggauauaaagauuggauccuauggauuuccuuugccauaucauguuuuuugcuuuguguugcuuuguugggguucaucaugugggccugccaaaaaggcaacauuaggugcgacauuugcauuuga

SEQ ID NO: 32737 - RNA, 1701 nt, Artificial Sequence; identical to SEQ ID NO: 32528
  derived and/or modified CDS sequence (wt) from hemagglutinin__InfluenzaA__ABD16538

SEQ ID NO: 32738 - RNA, 1701 nt, Artificial Sequence
  derived and/or modified CDS sequence (wt) from hemagglutinin__InfluenzaA__ABD16549
augaagacuaucauugcuuugagcuacauucuaugucugguuuucgcucaaaaacuucccggaaaugacaacagcacggcaacgcugugccuugggcaccaugcaguaccaaacggaacgauagugaaaacaaucacgaaugaccaaauugaaguuacuaaugcuacugagcugguucagaguuccucaacagguggaauaugcgacaguccucaucagauccuugauggagaaaacugcacacuaauagaugcucuauugggagacccucagugugauggcuuccaaaauaagaaaugggaccuuuuuguugaacgcagcaaagccuacagcaacuguuacccuuaugaugugccggauuacgccucccuuaggucacuaauugccucauccggcacacuggaguuuaacaaugaaagcuucaauuggacuggagucacucaaaauggaacaagcucugcuugcaaaaggagaucuaauagcaguuucuuuaguagauugaauugguugacccacuuaaaauucaaauacccagcauugaacgugacuaugccaaacaaugaagaauuugacaaauuguacauuugggggguucaccacccggguacauacaaugaccaaaucagccuauaugcucaagcaucaggaagaaucacagucucuaccaaaagaagccaacaaacuguaaucccgaauaucgggucuagacccaggguaagggauauccccagcagaauaagcaucuauuggacaauaguaaaaccgggagacauacuuuugauuaacagcacagggaaucuaauugcuccucgggguuacuucaaaauacgaagugggaaaagcucaauaaugagaucagaugcacccauuggcaaaugcaauucugaaugcaucacuccaaauggaagcauucccaaugacaaaccauuucaaaauguaaacaggaucacauauggggccugucccagauauguuaagcaaaacacucugaaauuggcaacagggaugcgaaauguaccagagaaacaaacuagaggcauauuuggcgcaaucgcggguuucauagaaaaugguugggagggaaugguggaugguugguacgguuucaggcaucaaaauucugagggaauaggacaagcagcagaucucaaaagcacucaagcagcaaucgaccaaaucaaugggaagcugaauagguugaucgggaaaaccaacgagaaauuccaucagauugaaaaagaauucucagaaguagaagggagaauucaggaccucgagaaauauguugaggacacuaaaauagaucucuggucauacaacgcggagcuucuuguugcccuggagaaccaacauacaauugaucuaacugacucagaaaugaacaaacuguuugaaagaacaaagaagcaacugagggaaaaugcugaggauaugggcaaugguuguuucaaaauauaccacaaaugugacaaugccugcauagggucaaucagaaauggaacuuaugaccaugauguauacagagaugaagcauuaaacaaccgguuccagaucaaagguguugagcugaagucaggauacaaagauuggauccuauggauuuccuuugccauaucauguuuuuugcuuuguguugcuuuguugggguucaucgugugggccugccaaaaaggcaacauuaggugcaacauuugcauuuga

SEQ ID NO: 32739 - RNA, 1701 nt, Artificial Sequence; identical to SEQ ID NO: 32643
  derived and/or modified CDS sequence (wt) from hemagglutinin__InfluenzaA__ABD16560

SEQ ID NO: 32740 - RNA, 1701 nt, Artificial Sequence
  derived and/or modified CDS sequence (wt) from hemagglutinin__InfluenzaA__ABD16571
augaagaccaucauugcuuugagcuacauuuucugucugguugucgcccaaaaacuucccggaaaugacaacagcacagcaacgcugugccugggacaucaugcagugccaaacggaacgauagugaaaacaaucacgaaugaccaaauugaagugacuaaugcuacugagcugguccagaguuccucaacaggucgaauaugcaacaguccucaccgaauccuugauggaaaaaacugcacacugauagaugcucuauugggagacccucauugugauagcuuccaaaauaaggaaugggaccuuuuuguugaacgcagcaaagcuuacagcaacuguuacccuuaugaugugccggauuaugccucccuuaggucacuaguugccucaucaggcacccuggaguuuaucaaugaagacuucaauuggacuggagucgcucagagugggggaagcuaugcuugcaaaaggggaucuguuaacaguuucuucaguagauugaauugguugcacgaaucagaauacaaauauccagcgcugaacgugacuaugccaaacaauggcaaauuugacaaauuguacauuugggggguucaccacccgagcacggacagagaacaaaccaaccuauauguucgagcaucagggagagucacagucuccaccaaaagaagccagcaaacuguaaucccgaauaucgggucuagacccuggguaaggggucuguccaguagaauaagcaucuauuggacaauaguaaaaccgggagacauacuguugauuaauagcaccgggaaccuaauugcuccucgggguuacuucaaaauacgaacuggaaaaagcucaauaaugaggucagaugcacccauuggcaccugcaguucugaaugcaucacuccaaauggaagcauucccaaugacaaacccuuucaaaauguaaacaggaucacauauggggcaugucccagauauguuaagcaaaacacucugaaauuggcaacagggaugcggaaugugccagagaaacaaacuagaggcauauucggcgcaaucgcagguuucauagaaaaugguugggagggaaugguagacgguugguacgguuucaggcaucaaaauucugagggcacaggacaagcagcagaucuuaaaagcacucaagcagcaaucgaccaaaucaacgggaaacugaauagguuaaucgagaaaacgaacgagaaauuccaucaaaucgaaaaggaauucucagaaguagaagggagaauucaggaccucgagaaauauguugaagacacuaaaauagaucucuggucuuacaacgcggagcuucuugucgcccuggagaaccaacauacaauugaucugacugacucagaaaugaacaaacuguuugaaaaaacaaggaagcaacugagggaaaaugcugaggacaugggcaaugguugcuucaagauauaccacaaaugugacaaugccugcauagggucaaucagaaauggaacuuaugaccaugauguauacagagacgaagcauuaaacaaccgguuccagaucaaagguguugagcugaagucaggauacaaagacuggauccuauggauuuccuuugccauaucaugcuuuuugcuuuguguuguuuugcugggguucaucaugugggccugccaaaaaggcaacauuaggugcaacauuugcauuuga

SEQ ID NO: 32741 - RNA, 1701 nt, Artificial Sequence
  derived and/or modified CDS sequence (wt) from hemagglutinin__InfluenzaA__ABD16718
augaagacuaucauugcuuugagcuacauuuucugucugguuuucgcccaaaaacuucccggaaaugacaacagcacagcaacgcugugccugggacaucaugcagugccaaacggaacgcuagugaaaacaaucacgaaugaucagauugaagugacuaaugcuacugagcugguucagaguuccucaacagguagaauaugcgacaguccucaccgaauccuugauggaaaaaacugcacacugauagaugcucuauugggagacccucauugugauggcuuccaaaaugagaaaugggaccuuuuuauugaacgcagcaaagcuuucagcaacuguuacccuuaugaugugccggauuaugccucccuuaggucacuaguugccucaucaggcacccuggaguuuaucaaugaaggcuucaauuggacuggagucacucagagugggggaagcuaugcuugcaaaaggggaucuguuaacaguuucuucaguagauugaauugguuguacgaaucagaauacaaauauccagcgcugaacgugacuaugccaaacaauggcaaauuugacaaacuguacauuugggggguucaccacccgaucacggaaaaagaacaaaccaaccuauauguucgagcaucagggagagucacagucucuaccaagagaagccagcaaacuguaaucccgaauaucgggucuagacccuggguaaggggucuguccaguagaauaagcaucuauuggacaauaguaaaaccgggagacauacuguugauuaauagcacugggaaccuaauugcuccucgggguuacuucaaaauacgcacugggaaaagcucaauaaugaggucagaugcaccuauuggcaccugcaguucugaaugcaucacuccaaauggaagcauucccaaugacaaacccuuucaaaauguaaacaagaucacauauggggcaugucccagguauguuaagcaaaacacucugaaauuggcaacagggaugcggaauguaccagagaaacaaacuagaggcauauucggcgcaauagcagguuucauagaaaaugguugggagggaaugguagacgguugguacgguuucaggcaucaaaauucugagggcacaggacaagcagcagaucuuaaaagcacucaagcagcaaucgaccaaaucaacggaaaacugaauagguuaaucgagaaaacgaacgagaaauuccaucaaaucgaaaaggaauucucagaaguagaagggagaauucaggaccucgagaaauauguugaagacacuaaaauagaucucuggucuuacaacgcggagcuucuugucgcccuggagaaccaacauacaauugaucugacugacucagaaaugaacaaacuguuugaaaaaacaaggaagcaacugagggaaaaugcugaggacaugggcaaugguugcuucaaaauauaccacaaaugugacaaugcuugcauagggucaaucagaaauggaacuuaugaccaugauguauacagagacgaagcauuaaacaaccgguuucagaucaaagguguugagcugaagucaggauacaaagacuggauccuauggauuuccuuugccauaucaugcuuuuugcuuuguguuguuuugcugggguucaucaugugggccugccaaaaaggcaacauuaggugcaacauuugcauuuga

SEQ ID NO: 32742 - RNA, 1701 nt, Artificial Sequence
  derived and/or modified CDS sequence (wt) from hemagglutinin__InfluenzaA__ABD16729
augaagacuaucauugcuuugagcuacauuuucugucugguuuucgcccaaaaacuucccggaaaugacaacagcacagcaacgcugugcuugggacaucaugcagugccaaacggaacgcuagugaaaacaaucacgaaugaucagauugaagugacuaaugcuacugagcugguucagaguuccucaacagguagaauaugcgacaguccucaccgaauccuugaugggaaaaacugcacacugauagaugcucuauugggagacccucauugugauggcuuccaaaaugagaaaugggaccuuuuuguugaacgcagcaaagcuuucagcaacuguuacccuuaugaugugccggauuaugccucccuuaggucacuaguugccucaucaggcaccuuggaguuuaucaaugaaggcuucaauuggacuggagucacucagaaugggggaagcuauacuugcaaaagaggaucuguuaacaguuucuucaguagauugaauugguuguacgaaucagaaagcaaauauccagugcugaacgugacuaugccaaauaauggcaaauuugacaaauuguacauuugggggguucaccacccgagcacggacaaagaacaaaccaacuuauauguucgagcaucagggaaagucacagucucuaccaagagaagccagcaaacuguaaucccgaauaucgggucuagacccuggguaaggggucugucuaguagaauaaguaucuauuggacaauaguaaaaccgggagacauacuguuaauuaauagcacuggaaaccuaauugcuccucgggguuacuucaaaauacgcacugggaaaagcucaauaaugaggucagaugcaccuauuggcaccugcaguucugaaugcaucacuccaaauggaagcauucccaaugacaaacccuuucaaaauguaaacaagaucacauauggagcaugucccagguauguuaagcaaaacacucugaaguuggcaacagggaugcggaauguaccagagaaacaaacuagaggcauauucggcgcaauagcagguuucauagaaaaugguugggagggaaugguagacgguugguacgguuucaggcaucaaaauucugagggcacaggacaagcagcagaucuuaaaagcacucaagcagcaaucgaccaaaucaacgggaaacugaacagguuaaucgagaaaacgaacgagaaauuccaucaaaucgaaaaggaauucucagaaguagaagggagaauucaggaccucgagaaauauguugaagacacuaaaauagaucucuggucuuacaacgcggagcuucuugucgcccuggagaaccaacauacaauugaucugacugauucagaaaugaacaaacuguuugaaaaaacaaggaaacaacugagggaaaaugcugaggacaugggcaaugguugcuucaaaauauaccacaaaugugacaaugcuugcauagggucaaucagaaauggaacuuaugaccaugauguauacagagacgaagcauuaaacaaccgguuucagaucaaagguguugagcugaagucaggauacaaagacuggauccuauggauuuccuuugccauaucaugcuuuuugcuuuguguuguuuugcugggguucaucaugugggccugccaaaaaggcaacauuaggugcaacauuugcauuuga

SEQ ID NO: 32743 - RNA, 1701 nt, Artificial Sequence
  derived and/or modified CDS sequence (wt) from hemagglutinin__InfluenzaA__ABD16751
augaagacuaucauugcuuugagcuacauuuucugucugguuuucgcccaagaccuuccaggaaaugacaacagcacagcaacucugugccugggacaucaugcggugccaaacggaacgcuagugaaaacaaucacgaaugaucagauugaagugacuaaugcuacugaacugguucauaguuccucaacggguaaaauaugcgacaauccucaucgaauccuugauggaauaaacugcacacugauagaugcucuauugggggacccucauugugauggcuuucaaaaugagaaaugggaccuuuucguugaacgcagcaaagcuuucagcaacuguuacccuuaugaugugccagauuaugccucccuuaggucacuaguugccucgucaggcacucuggaguuuaucaaugaaggcuucaauuggacuggggucacucagaaugggggaagcagugcuugcaaaaggggaccugauaacgguuuuuucaguagacugaacugguuguacaaaucaggaagcacauauccagugcagaacgugaccaugccaaacaaugacaacucugacaaacuauacauuugggggguucaccacccgagcacggacaaagaacaaaccgaccuauauguucaagcaucagggaaagucacagucuccaccaagagaagccagcaaacuguaaucccgaaugucgggucuagacccuggguaaggggucugucuaguagaguaagcaucuauuggacaauaguuaaaccgggagacauacugguaauuaauaguaauggaaaccuaauugcuccucgggguuacuucaaaaugcgcacugggaaaagcucaauaaugaggucagaugcaccuauuggcaccugcagcucugaaugcaucacuccaaauggaagcauucccaaugacaagcccuuucaaaacguaaacaagaucacauauggggcaugucccaaguauguuaagcaaaacacucugaaguuggcaacagggaugcggaauguaccagagaaacaaacuagaggcauauucggcgcaauagcagguuucauagaaaaugguugggagggaaugauagacgguugguacgguuucaggcaucaaaauucugagggcacaggacaagcagcagaucuuaaaagcacucaagcagccaucgaccaaaucaaugggaaacugaauaggguaaucgagaagacgaacgagaaauuccaucaaaucgaaaaggaauucucagaaguagaagggagaauucaggaccucgagaaauacguugaagacacuaaaauagaucucuggucuuacaaugcggagcuucuugucgcucuggagaaccaacauacaauugaucugacugacucggaaaugaacaaacuguuugaaaaaacaaggaggcaacugagggaaaaugcugaggacaugggcaaugguugcuucaaaauauaccacaaaugugacaaugcuugcauagggucaaucagaaaugggacuuaugaccaugauguauacagagacgaagcauuaaacaaccgguuucagaucaaagguguugaacugaagucaggauacaaagacuggauccuguggauuuccuuugccauaucaugcuuuuugcuuuguguuguuuugcugggguucaucaugugggccugccagaaaggcaacauuaggugcaacauuugcauuuga

SEQ ID NO: 32744 - RNA, 1701 nt, Artificial Sequence; identical to SEQ ID NO: 32699
  derived and/or modified CDS sequence (wt) from hemagglutinin__InfluenzaA__ABD16762

SEQ ID NO: 32745 - RNA, 1701 nt, Artificial Sequence
  derived and/or modified CDS sequence (wt) from hemagglutinin__InfluenzaA__ABD17323
augaagacuaucauugcuuugagcuacauuuucugucugguucucggccaagacuuuccaggaaaugacaacagcacagcaacgcugugccugggacaucaugcggugccaaacggaacacuagugaaaacaaucacaaaugaucagauugaagugacuaaugcuacugagcugguucagaguuccucaacggggaaaauaugcaacaauccucaucgaauccuugauggaauagacugcacacugauagaugcucuauugggggacccucauugugauggcuuucaaaaugagacaugggaccuuuucguugaacgcagcaaagcuuucagcaacuguuacccuuaugaugugccagauuaugccucccuuaggucacuaguugccucgucaggcacucuggaguuuaucaaugaaggcuucacuuggacuggggucacucagaaugggggaagcaaugcuugcaaaaggggaccugauagcgguuuuuucaguagacugaacugguuguacaaaucaggaagcacauauccagugcugaaugugacuaugccaaacaaugacaauuuugacaaacuauacauuugggggguucaccacccgagcacggaccaagaacaaaccagccuauauguucaagcaucagggagagucacagucucuaccaagagaagccagcaaacuauaaucccgaauaucgggucuagacccuggguaaggggucugucuaguagaauaagcaucuauuggacaauaguuaaaccgggggacauacugguaauuaauaguaaugggaaccuaauugcuccucgggguuauuucaaaaugcgcacugggaaaagcucaauaaugaggucagaugcaccuauuggcaccugcauuucugaaugcaucacuccaaauggaagcauucccaaugacaagcccuuucaaaacguaaacaagaucacauauggggcaugucccaaguauguuaagcaaaacacccugaaguuggcaacagggaugcggaauguaccagagaaacaaacuagaggccuauucggcgcaauagcagguuucauagaaaaugguugggagggaaugauagacgguugguacgguuucaggcaucaaaauucugagggcacaggacaagcagcagaucuuaaaagcacucaagcagccaucgaccaaaucaaugggaaacugaauaggguaaucgagaagacgaacgagaaauuccaucaaaucgaaaaggaauucucagaaguagaagggagaauucaggaccucgagaaauacguugaagacacuaaaauagaucucuggucuuacaaugcggagcuucuugucgcucuggagaaccaacauacaauugaucugacugacucggaaaugaacaaacuguuugaaaaaacaaggaggcaacugagggaaaaugcugaggacaugggcaaugguugcuucaaaauauaccacaaaugugacaaugcuugcauagggucaaucagaaaugggacuuaugaccaugauguauacagagacgaagcauuaaacaaccgguuucagaucaaagguguugaacugaagucaggauacaaagacuggauccuguggauuuccuuugccauaucaugcuuuuugcuuuguguuguuuugcugggguucaucaugugggccugccagaaaggcaacauuaggugcaacauuugcauuuga

SEQ ID NO: 32746 - RNA, 1701 nt, Artificial Sequence; identical to SEQ ID NO: 32574
  derived and/or modified CDS sequence (wt) from hemagglutinin__InfluenzaA__ABD38134

SEQ ID NO: 32747 - RNA, 1698 nt, Artificial Sequence
  derived and/or modified CDS sequence (wt) from hemagglutinin__InfluenzaA__ABD60779
augaaaguaaaacuacugguucuguuauguacauuuacagcuacauaugcagacacaauauguauaggcuaccaugccaacaacucaaccgacacuguugacacaguacuugagaagaaugugacagugacacacucugucaaccuacuugaggacagucacaauggaaaacuaugucuacuaaaaggaauagccccacuacaauuggguaauugcagcguugccggauggaucuuaggaaacccagaaugcgaauuacugauuuccaaggaaucaugguccuacauuguagaaacaccaaauccugaaaauggaacauguuacccaggguauuucgccgacuaugaggaacugagggagcaauugaguucaguaucuucauuugagagguucgaaauauuccccaaagagagcucauggcccaaccacaccguaaccggaguaucagcaucaugcucccauaacgggaaaagcaguuuuuacagaaauuugcuauggcugacggggaagaaugguuuguacccaaaccugagcaaguccuaugcaaacaacaaagagaaagaaguccuuguacuaugggguguucaucacccgccuaacauaggggaccaaagggcccucuaucauacagaaaaugcuuauaucucuguagugucuucacauuauagcagaagauucaccccagaaauagccaaaagacccaagguaagagaucaggaaggaagaaucaacuacuacuggacucugcuggaacccggggauacaauaauauuugaggcaaauggaaaucuaauagcgccaagguaugcuuucgcacugaguagaggcuuuggaucaggaaucaucaccucaaaugcaccaauggaugaaugugaugcgaagugucaaacaccucagggagcuauaaacagcagucuuccuuuccagaauguacacccagucacaauaggagaguguccaaaguaugucaggagugcaaaauuaaggaugguuacaggacuaaggaacaucccauccauucaauccagagguuuguuuggagccauugccgguuucauugaagggggguggacuggaaugguagaugguugguaugguuaucaucaucagaaugagcaaggaucuggguaugcugcagaucaaaaaagcacacaaaaugccauuaacgggauuacaaacaaggugaauucuguaauugagaaaaugaacacucaauucacagcugugggcaaagaauucaacaaauuggaaagaaggauggaaaacuuaaauaaaaagguugaugauggguuucuagacauuuggacauauaaugcagaauuguugguucuacuggaaaaugaaaggacuuuggauuuccaugacuccaacgugaagaaucuguaugagaaaguaaaaagccaauuaaagaauaaugccaaagaaauaggaaacggguguuuugaauucuaucacaaguguaacgaugaaugcauggagagugugaaaaauggaacuuaugacuauccaagauauuccgaagaaucaaaguuaaacagggagaaaauugauggagugaaauuggaaucaaugggagucuaucagauucuggcgaucuacucaacagucgccaguucccugguucuuuuggucucccugggggcaaucagcuucuggauguguuccaaugggucuuugcaguguagaauaugcaucuaa

SEQ ID NO: 32748 - RNA, 1701 nt, Artificial Sequence
  derived and/or modified CDS sequence (wt) from hemagglutinin__InfluenzaA__ABD60790
augaagacuaucauugcuuugagcuacauuuucugucugguucucggccaagacuuuccaggaaaugacaacagcacagcaacgcugugccugggacaucaugcggugccaaacggaacacuagugaaaacaaucacaaaugaucagauugaagugacuaaugcuacugagcugguucagaguuccucaacggggaaaauaugcaacaauccucaucgaauccuugauggaauagacugcacacugauagaugcuuuauugggggacccucauugugauggcuuucaaaaugagacaugggaccuuuucguugaacgcagcaaagcuuucagcaacuguuacccuuaugaugugccagauuaugccucccucaggucacuaguugccucgucaggcacucuggaguuuaucaaugaaggcuucacuuggacuggggucacucagaaugggggaagcaaugcuugcaaaaggggaccugauagcgguuuuuucaguagacugaacugguuguacaaaucgggaagcacauauccagugcugaacgugacuaugccaaacaaugacaauuuugacaaacuauacauuugggggguucaccacccgagcacggaccaagaacaaaccagccuauauguucaagcaucagggagagucacagucuccaccaagagaagccagcaaacuauaaucccgaauaucgggucuagacccuggguaaggggucugucuaguagaauaagcaucuauuggacaauaguuaaaccgggagacauacugauaauuaauaguaaugggaaccuaauugcuccucgggguuauuucaaaaugcgcacugggaaaagcucaauaaugaggucagaugcaccuauuggcaccugcauuucugaaugcaucacuccaaauggaagcauucccaaugacaagcccuuucaaaacguaaacaagaucacauauggggcaugucccaaguauguuaagcaaaacacccugaaguuggcaacagggaugcggaauguaccagagaaacaaacuagaggcauauucggcgcaauagcagguuucauagaaaaugguugggagggaaugauagacgguugguacgguuucaggcaucaaaauucugagggcacaggacaagcagcagaucuuaaaagcacucaagcagccaucgaccaaaucaaugggaaacugaauaggauaaucgagaagacgaacgagaaauuccaucaaaucgaaaaggaauucucagaaguagaagggagaauucaggaccucgagaaauacguugaagacacuaaaauagaucucuggucuuacaaugcggagcuucuugucgcucuggagaaccaacauacaauugaucugacugacucggaaaugaacaaacuguuugaaaaaacaaggaggcaacugagggaaaaugcugaggacaugggcaaugguugcuucaaaauauaccacaaaugugacaaugcuugcauagggucaaucagaaaugggacuuaugaccaugauguauacagagacgaagcauuaaacaaccgguuucagaucaaagguguugaacugaagucaggauacaaagacuggauccuguggauuuccuuugccauaucaugcuuuuugcuuuguguuguuuugcugggguucaucaugugggccugccagaaaggcaacauuaggugcaacauuugcauuuga

SEQ ID NO: 32749 - RNA, 1701 nt, Artificial Sequence
  derived and/or modified CDS sequence (wt) from hemagglutinin__InfluenzaA__ABD60801
augaagacuaucauugcuuugagcuacauuuuaugucugguuuucgcucaaaaacuucccggaaaugacaacagcacagcaacgcugugccugggacaucaugcagugccaaacggaacgcuagugaaaacaaucacgaaugaucaaauugaagugacuaaugcuacugagcugguucagaguuccucaacagguagacuaugcgacaguccucaccgaauccuugauggaaaaaacugcacacugauagaugcucuauugggagacccucauugugauggcuuccaaaauaaggaaugggaccuuuuuguugaacgcagcaaagcuuacagcaacuguuacccuuaugaugugccggauuaugccucccuuaggucacuaguugccucaucaggcacccuggaguuuaucaaugaagacuucaauuggacuggagucgcucaggaugggggaagcuaugcuugcagaaggggaucuguuaacaguuucuuuaguagauugaauugguugcacaaauuagaauacaaauauccagcgcugaacgugacuaugccaaacaauggcaaauuugacaaauuguacauuugggggguucaccacccgagcacggacagugaccaaaccagccuauauguucgagcaucagggagagucacagucucuaccaaaagaagccaacaaacuguaaucccgaauaucgggucuagacccuggguaaggggucaguccaguagaaugagcaucuauuggacaauaguaaaaccgggagacauacuuuugauuaauagcacagggaaucuaauugcuccucgggguuacuucaaaauacgaaaugggaaaagcucaauaaugagaucagaugcacccauuggcaacugcaguucugaaugcaucacuccaaauggaagcauucccaaugacaaaccuuuucaaaauguaaacaggaucacauauggggccugccccagauauguuaagcaacacacucugaaauuggcaacagggaugcggaauguaccagagaaacaaacuagaggcauauucggcgcaaucgcagguuucauagaaaaugguugggagggaaugguagacgguugguacgguuucaggcaucaaaauucugagggcacaggacaagcagcagaucuuaaaagcacucaagcagcaaucgaccaaaucaacgggaaacugaauagguuaaucgagaaaacgaacgagaaauuccaucaaaucgaaaaagaauucucagaaguagaagggagaauucaggaccucgagaaauauguugaagacacuaaaauagaucucuggucuuacaacgcggagcuucuuguugcccuggagaaccaacauacaauugaucuaacggacucagaaaugaacaaacuguuugaaagaacaaggaagcaacugagggaaaaugcugaggacaugggcaaugguugcuucaaaauauaccacaaaugugacaaugccugcauagggucaaucagaaauggaacuuaugaccaugauguauacagagacgaagcauuaaacaaccgguuccagaucaaagguguugagcuaaagucaggauacaaagauuggauccuauggauuuccuuugccauaucaugcuuuuugcuuuguguuguuuugcugggguucaucaugugggccugccaaaaaggcaacauuaggugcaacauuugcauuuga

SEQ ID NO: 32750 - RNA, 1701 nt, Artificial Sequence
  derived and/or modified CDS sequence (wt) from hemagglutinin__InfluenzaA__ABD60812
augaagacuaucauugcuuugagcuacauucuaugucugauuuucgcucaaaaacuucccggaaaugacaacagcacggcaacgcugugccuugggcaccaugcaguaccaaacggaacgauagugaaaacaaucacgaaugaccaaauugaaguuacuaaugcuacugagcugguucagaguuccucaacagguggaauaugcgacaguccucaucagauccuugauggagaaaacugcacacuaauagaugcucuauugggagacccucagugugauggcuuccaaaauaagaaaugggaccuuuuuguugaacgcagcaaagccuacagcaacuguuacccuuaugaugugccggauuaugccucccuuaggucacuaguugccucauccggcacacuggaguuuaacaaugaaagcuucaauuggacuggagucacucaaaauggaacaagcucugcuugcaaaaggagaucuaauaacaguuucuuuaguagauugaauugguugacccacuuaaaauucaaauacccagcauugaacgugacuaugccaaacaaugaaaaauuugacaaauuguacauuugggggguucaccacccggguacggacaaugaccaaaucuuccuguaugcucaagcaucaggaagaaucacagucucuaccaaaagaagccaacaaacuguaaucccgaguaucgguucuagacccagaguaaggaauauccccagcagaauaagcaucuauuggacaauaguaaaaccgggagacauacuuuugauuaacagcacagggaaucuaauugcuccuagggguuacuucaaaauacgaagugggaaaagcucaauaaugagaucagaugcacccauuggcaaaugcaauucugaaugcaucacuccaaauggaagcauucccaaugacaaaccauuucaaaauguaaacaggaucacauauggggccugucccagauauguuaagcaaaacacucugaaauuggcaacagggaugcgaaauguaccagagaaacaaacuagaggcauauuuggcgcaaucgcggguuucauagaaaaugguugggagggaaugguggaugguugguacgguuucaggcaucaaaauucugagggaauaggacaagcagcagaucucaaaagcacucaagcagcaaucaaucaaaucaaugggaagcugaauagguugaucgggaaaaccaacgagaaauuccaucagauugaaaaagaauucucagaaguagaagggagaauucaggaccucgagaaauauguugaggacacuaaaauagaucucuggucauacaacgcggagcuucuuguugcccuggagaaccaacauacaauugaucuaacugacucagaaaugaacaaacuguuugaaagaacaaagaagcaacugagggaaaaugcugaggauaugggcaaugguuguuucaaaauauaccacaaaugugacaaugccugcauaggaucaaucagaaauggaacuuaugaccaugauguauacagagaugaagcauuaaacaaccgguuccagaucaaaggcguugagcugaagucaggauacaaagauuggauccuauggauuuccuuugccauaucauguuuuuugcuuuguguugcuuuguugggguucaucaugugggccugccaaaaaggcaacauuaggugcaacauuugcauuuga

SEQ ID NO: 32751 - RNA, 1701 nt, Artificial Sequence; identical to SEQ ID NO: 32669
  derived and/or modified CDS sequence (wt) from hemagglutinin__InfluenzaA__ABD60823

SEQ ID NO: 32752 - RNA, 1701 nt, Artificial Sequence
  derived and/or modified CDS sequence (wt) from hemagglutinin__InfluenzaA__ABD60845
augaagacuaucauugcuuugagcuacauuuuaugucugguuuucgcucaaaaacuucccguaaaugacaacagcacggcaacgcugugccugggacaccaugcagugccaaacggaacgcuagugaaaacaaucacgaaugaccacauugaagugacuaaugcuacugagcugguucagaguuccucaacagguagaauaugcgacaguccucaccaaauccuugauggagaaaacugcacacuaauagaugcucuauugggagacccccauugugauggcuuccaaaauaaggaaugggaccuuuuuguugaacgcagcacagccuacagcaacuguuacccuuaugaugugccggauuaugccucccuuaggucacuaguugccucauccggcacacuugaguuuaacaaugaaagcuucaauuggacuggagucgaucagaauggaacaagcucugcuugcaaaaggagaucuacuaaaaguuucuuuaguagauugaauugguugcaccaauuaaaauacaaauauccagcacugaacgugacuaugccaaacaaugaaaaauuugacaaauuguacauuugggggguucaccauccgaguacggacagugaccaaaucagccuauaugcucaagcaucagggagagucacagucucuaccaaaagaagccaacaaacuguaaccccgaauaucggaucuagacccuggguaaggggugucuccagcagaauaagcauuuauuggacaauaguaaaaccgggagacauacuuuugauuaacagcacagggaaucuaauugcuccucgggguuacuucaaaauacgaagugggaaaagcucaauaaugaggucaaaugcacucauuggcaaaugcaauucugaaugcaucacuccaaauggaagcauucccaaugacaaaccauuucaaaauguaaacaggaucacauauggggccugucccagauauguuaagcaaaacacucugaaauuggcaacagggaugcggaauguaccagagaaacaaacuagaggcauauucggcgcaaucgcagguuucauagaaaaugguugggagggaaugguggacgguugguacgguuucaggcaucaaaauucugagggcacaggacaagcagcagaucuuaaaagcacucaagcagcaaucaaccaaaucaacgggaaacugaauagguuaaucgagaaaacaaacgagaaauuccaucaaauugaaaaagaauucucagaaguagaagggagaauucaggaccucgagaaauauguugaggacacuaaaauagaucucuggucguacaacgcggagcuucuuguugcccuggagaaccaacauacaauugaucuaacugacucagaaaugaacaaacuguucgaaagaacaaggaaacaacugagggaaaaugcugaggauaugggcaaugguuguuucaaaauauaccacaaaugugacaaugccugcauagggucaaucagaaauggaacuuaugaccaugauguauacagagacgaagcauuaaacaaccgguuccagaucaaagguguugagcugaagucaggauacaaagauuggauccuauggauuuccuuugccauaucauguuuuuugcuuuguguuguuuugcugggguucaucaugugggccugccaaaaaggcaacauuaggugcaacauuugcauuuga

SEQ ID NO: 32753 - RNA, 1698 nt, Artificial Sequence
  derived and/or modified CDS sequence (wt) from hemagglutinin__InfluenzaA__ABD60878
augaaaguaaaacuacugguccuguuauguacauuuacagcuacauaugcagacacaauauguauaggguaccaugccaacaacucaaccgacacuguugacacaguacuugagaagaaugugacagugacacacucugucaaccuacuugaggacagucacaauggaaaacuaugucuacuaaaaggaauagccccacuacaauuggguaauugcagcguugccggauggaucuuaggaaacccagaaugcgaauuacugauuuccaaggaaucaugguccuacauuguagaaacaccaaauccugagaauggaacauguuacccaggguauuucgccgacuaugaggaacugagggagcaauugaguucaguaucuucauuugagagauucgaaauauuccccaaagaaagcucauggcccaaccacaccguaaccggaguaucagcaucaugcucccauaaugggaaaagcaguuuuuacagaaauuugcuauggcugacggggaagaaugguuuguacccaaaccugagcaaguccuaugcaaacaacaaagagaaagaaguccuuguacuaugggguguucaucacccgccuaacauaggggaccaaaaggcccucuaucauacagaaaaugcuuaugucucuguagugucuucacauuauagcagaagauucaccccagaaauagccaaaagacccaaaguaagagaucaggaaggaagaaucaacuacuacuggacucugcuggaacccggggauacaauaauauuugaggcaaauggaaaucuaauagcgccacgguaugcuuucgcacugaguagaggcuuuggaucaggaaucaucaccucaaaugcaccaauggaugaaugugaugcgaagugucaaacaccucagggagcuauaaacagcagucuuccuuuccagaacguacacccagucacaauaggagaguguccaaaguaugucaggagugcaaaauuaaggaugguuacaggacuaaggaacaucccauccauucaauccagagguuuguuuggagccauugccgguuucauugaagggggguggacuggaaugguagaugggugguaugguuaucaucaucagaaugagcaaggaucuggcuaugccgcagaucaaaaaagcacacaaaaugccauuaacgggauuacaaacaaggugaauucuguaauugagaaaaugaacacucaauucacagcugugggcaaagaauucaacaaauuggaaagaaggauggaaaacuuaaauaaaaaaguugaugauggguuucuagacauuuggacauauaaugcagaauuguugguucuacuggaaaaugaaaggacuuuggauuuccaugacuccaaugugaagaaucuguaugagaaaguaaaaagccaauuaaagaauaaugccaaagaaauaggaaacggguguuuugaauucuaucacaaguguaacaaugaaugcauggagagugugaaaaauggaacuuaugacuauccaaaauauuccgaagaaucaaaguuaaacagggagaaaauugauggagugaaauuggaaucaaugggagucuaucagauucuggcgaucuacucaacugucgccaguucccugguucuuuuggucucccugggggcaaucagcuucuggauguguuccaaugggucuuugcaguguagaauaugcaucuga

SEQ ID NO: 32754 - RNA, 1698 nt, Artificial Sequence
  derived and/or modified CDS sequence (wt) from hemagglutinin__InfluenzaA__ABD60889
augaaaguaaaacuacugguccuguuauguacauuuacagcuacauaugcagacacaauauguauaggguaccaugccaacaacucaaccgacacuguugacacaguacuugagaagaaugugacagugacacacucugucaaccuacuugaggacagucacaauggaaaacuaugucuacuaaaaggaauagccccacuacaauuggguaauugcagcguugccggauggaucuuaggaaacccagaaugcgaauuacugauuuccaaggaaucaugguccuacauuguagaaacaccaaauccugagaauggaacauguuacccaggguauuucgccgacuaugaggaacugagggagcaauugaguucaguaucuucauuugagagauucgaaauauuccccaaagaaagcucauggcccaaccacaccguaaccggaguaucagcaucaugcucccauaaugggaaaagcaguuuuuacagaaauuugcuauggcugacggggaagaaugguuuguacccaaaccugagcaaguccuaugcaaacaacaaagagaaagaaguccuuguacuaugggguguucaucacccgccuaacauaggggaccaaagggcccucuaucauacagaaaaugcuuaugucucuguagugucuucacauuauagcagaagauucaccccagaaauagccaaaagacccaaaguaagagaucaggaaggaagaaucaacuacuacuggacucugcuggaacccggggauacaauaauauuugaggcaaauggaaaucuaauagcgccacgguaugcuuucgcacugaguagaggcuuuggaucaggaaucaucaccucaaaugcaccaauggaugaaugugaugcgaagugucaaacaccucagggagcuauaaacagcagucuuccuuuccagaacguacacccagucacaauaggagaguguccaaaguaugucaggagugcaaaauuaaggaugguuacaggacuaaggaacaucccauccauucaauccagagguuuguuuggagccauugccgguuucauugaagggggguggacuggaaugguagaugggugguaugguuaucaucaucagaaugagcaaggaucuggcuaugccgcagaucaaaaaagcacacaaaaugccauuaacgggauuacaaacaaggugaauucuguaauugagaaaaugaacacucaauucacagcugugggcaaagaauucaacaaauuggaaagaaggauggaaaacuuaaauaaaaaaguugaugauggguuucuagacauuuggacauauaaugcagaauuguugguucuacuggaaaaugaaaggacuuuggauuuccaugacuccaaugugaagaaucuguaugagaaaguaaaaagccaauuaaagaauaaugccaaagaaauaggaaacggguguuuugaauucuaucacaaguguaacaaugaaugcauggagagugugaaaaauggaacuuaugacuauccaaaauauuccgaagaaucaaaguuaaacagggagaaaauugauggagugaaauuggaaucaaugggagucuaucagauucuggcgaucuacucaacugucgccaguucccugguucuuuuggucucccugggggcaaucagcuucuggauguguuccaaugggucuuugcaguguagaauaugcaucuga

SEQ ID NO: 32755 - RNA, 1698 nt, Artificial Sequence
  derived and/or modified CDS sequence (wt) from hemagglutinin__InfluenzaA__ABD60900
augaaaguaaaacgacugguccuguuauguacauuuacagcuacauaugcagacacaauauguauaggguaccaugccaacaacucaaccgacacuguugacacaguacuugagaagaaugugacagugacacacucugucaaccuacuugaggacagucacaauggaaaacuaugucuacuaaaaggaauagccccacuacaauuggguaauugcagcguugccggauggaucuuaggaaacccagaaugcgaauuacugauuuccaaggaaucaugguccuacauuguagaaacaccaaauccugagaauggaacauguuacccaggguauuucgccgacuaugaggaacugagggagcaauugaguucaguaucuucauuugagagauucgaaauauuccccaaagaaagcucauggcccaaccacaccguaaccggaguaucagcaucaugcucccauaaugggaaaagcaguuuuuacagaaauuugcuauggcugacggggaagaaugguuuguacccaaaccugagcaaguccuaugcaaacaacaaagagaaagaaguccuuguacuaugggguguucaucacccgccuaacauaggggaccaaaaggcccucuaucauacagaaaaugcuuaugucucuguagugucuucacauuauagcagaagauucaccccagaaauagccaaaagacccaaaguaagagaucaggaaggaagaaucaacuacuacuggacucugcuggaacccggggauacaauaauauuugaggcaaauggaaaucuaauagcgccacgguaugcuuucgcacugaguagaggcuuuggaucaggaaucaucaccucaaaugcaccaauggaugaaugugaugcgaagugucaaacaccucagggagcuauaaacagcagucuuccuuuccagaacguacacccagucacaauaggagaguguccaaaguaugucaggagugcaaaauuaaggaugguuacaggacuaaggaacaucccauccauucaauccagagguuuguuuggagccauugccgguuucauugaagggggguggacuggaaugguagaugggugguaugguuaucaucaucagaaugagcaaggaucuggcuaugccgcagaucaaaaaagcacacaaaaugccauuaacgggauuacaaacaaggugaauucuguaauugagaaaaugaacacucaauucacagcugugggcaaagaauucaacaaauuggaaagaaggauggaaaacuuaaauaaaaaaguugaugauggguuucuagacauuuggacauauaaugcagaauuguugguucuacuggaaaaugaaaggacuuuggauuuccaugacuccaaugugaagaaucuguaugagaaaguaaaaagccaauuaaagaauaaugccaaagaaauaggaaacggguguuuugaauucuaucacaaguguaacaaugaaugcauggagagugugaaaaauggaacuuaugacuauccaaaauauuccgaagaaucaaaguuaaacagggagaaaauugauggagugaaauuggaaucaaugggagucuaucagauucuggcgaucuacucaacugucgccaguucccugguucuuuuggucucccugggggcaaucagcuucuggauguguuccaaugggucuuugcaguguagaauaugcaucuga

SEQ ID NO: 32756 - RNA, 1698 nt, Artificial Sequence
  derived and/or modified CDS sequence (wt) from hemagglutinin__InfluenzaA__ABD60911
augaaagcaaaacuaaugguccuguuauguacauuuacagcuacauaugcagacacaauauguaucggcuaccaugccaacaacucaaccgacacuguugacacaguacuugagaagaaugugacagugacacacucugucaaccuacuugaggacagucacaauggaaaacuaugucuacuaaaaggaauagccccacuacaauuggguaacugcagcguugccggauggaucuuaggaaacccagaaugcgaauuacugauuuccaaggaaucaugguccuacauuguagaaacaccaaauccugagaauggaacauguuacccaggauauuucgccgacuaugaggaacugagggagcaauugaguucaguaucuucauuugagagauucgaaauauuccccaaagaaagcucauggcccaaccacaccguaaccggaguaucagcaucaugcucccauaaugggaaaagcaguuuuuacagaaauuugcuauggcugacggggaagaaugguuuguacccaaaccugagcaaguccuaugcaaacaacaaagagaaagaaguccuuguacuaugggguguucaucacccgccuaacauaggggaccaaagggcccucuaucauacagaaaaugcuuaugucucuguagugucuucacauuauagcagaagauucaccccagaaauagccaaaagacccaaaguaagagaucaggaaggaagaaucaacuacuacuggacucugcuggaacccggggauacaauaauauuugaggcaaauggaaaucuaauagcgccaugguaugcuuucgcacugaguagaggcuuuggaucaggaaucaucaccucaaaugcaccaaugggugaaugugaugcgaagugucaaacaccucagggagcuauaaacagcagucuuccuuuccagaauguacacccagucacaauaggagaauguccaaaguaugucaggagugcaaaauuaaggaugguuacaggacuaaggaacaucccauccauucaauccagagguuuguuuggagccauugccgguuucauugaagggggguggacuggaaugguagaugggugguaugguuaucaucaucagaaugagcaaggaucuggcuaugcugcagaucaaaaaagcacacaaaaugccauugacgggauuacaaacaaggugaauucuauaauugagaaaaugaacacucaauucacagcugugggcaaagaauucaacaaauuggaaagaaggauggaaaacuuaaauaaaaaaguugaugauggguuucuagacauuuggacauauaaugcagaauuguugguucuacuggaaaaugaaaggacuuuggauuuccaugacuccaaugugaagaaucuguaugagaaaguaaaaagccaauuaaagaauaaugccaaagaaauaggaaacggguguuuugaauucuaucacaaguguaacaaugaaugcauggagagugugaaaaauggaacuuaugacuauccaaaauauuccgaagaaucaaaguuaaacagggagaaaauugauggagugaaauuggaaucaaugggagucuaucagauucuggcgaucuacucaacugucgccaguucccugguucuuuuggucucccugggggcaaucagcuucuggauguguuccaaugggucguugcaguguagaauaugcaucuga

SEQ ID NO: 32757 - RNA, 1701 nt, Artificial Sequence
  derived and/or modified CDS sequence (wt) from hemagglutinin__InfluenzaA__ABD60922
augaagacuaucauugcuuugagcuacauucuaugucugguuuucgcucaaaaacuucccggaaaugacaacagcacggcaacgcugugccuugggcaccaugcaguaccaaacggaacgauagugaaaacaaucacgaaugaccaaauugaaguuacuaaugcuacugagcugguacagaguuccucaacagguggaauaugcgacaguccucaucagauccuugauggagaaaacugcacacuaauagaugcucuauugggagacccucagugugauggcuuccaaaauaagaaaugggaccuuuuuguugaacgcagcaaagccuacagcaacuguuacccuuaugaugugccggauuaugccucccuuaggucacuaguugccucauccggcacacuggaguuuaacaaugaaagcuucgauuggacuggagucacucagaauggaacaagcucugcuugcaaaaggagaucuaauaaaaguuucuuuaguagauugaauugguugacccacuuaaaauacaaauacccagcauugaacgugacuaugccaaacaaugaaaaauuugacaaauuguacauuugggggguucaccacccggguacggacagugaccaaaucagccuauaugcucaagcaucaggaagaaucacagucucuaccaaaagaagccaacaaacuguaaucccgaauaucggaucuagacccaggguaagggaugucuccagccgaauaagcaucuauuggacaauaguaaaaccgggagacauacuuuugauuaacagcacagggaaucuaauugcuccucgggguuacuucaaaauacgaagugggaaaagcucaauaaugagaucagaugcacccauuggcaaaugcaauucugaaugcaucacuccaaauggaagcauucccaaugacaaaccauuucaaaauguaaacaggaucacauauggggccugucccagauauguuaagcaaaacacucugaaauuggcaacagggaugcgaaauguaccagagaaacaaacuagaggcauauuuggcgcaaucgcggguuucauagaaaaugguugggagggaaugguggacgguugguacgguuucaggcaucaaaauucugagggcacaggacaagcagcagaucucaaaagcacucaagcagcaaucaaccaaaucaaugggaaacugaauagguuaaucgggaaaacaaacgagaaauuccaucagauugaaaaagaauucucagaaguagaagggagaauucaggaccucgagaaauauguugaggacacuaaaauagaucucuggucauacaacgcggagcuucuuguugcccuggagaaccaacauacaauugaucuaacugacucagagaugaacaaacuguuugaaagaacaaagaagcaacugagggaaaaugcugaggauaugggcaaugguuguuucaaaauauaccacaaaugugacaaugccugcauagggucaaucagaaauggaacuuaugaccaugauguguacagagaugaagcauuaaacaaccgguuccagaucaaagguguugagcugaagucaggauacaaagauuggauccuauggauuuccuuugccauaucauguuuuuugcuuuguguugcuuuguugggguucaucaugugggccugccaaaaaggcaacauuaggugcaacauuugcauuuga

SEQ ID NO: 32758 - RNA, 1701 nt, Artificial Sequence
  derived and/or modified CDS sequence (wt) from hemagglutinin__InfluenzaA__ABD60933
augaaagcaaaacuacugguccuguuaugugcacuuucagcuacagaugcagacacaauauguauaggcuaccaugcgaacaacucaaccgacacuguugacacaguacucgaaaagaacgugacagugacacacucugucaaccuacuugaggacagucacaacggaaaacuaugcagacuaaaaggaauagccccacuacaauuggggaaaugcagcauugccggauggaucuuaggaaacccagaaugcgaaucacugguuucuaagaaaucaugguccuacauugcagaaacaccaaacuccgagaauggaacauguuacccaggauauuucgccgacuaugaggaauugagggagcaauugagcucaguaucaucauucgagagauucgaaauauuccccaaggaaagaucauggcccaaacacaacguaaccagaggcguaacggcaucaugcucccauaaggggaaaagcaguuuuuacagaaauuugcuauggcugacggagaaaaauggcucguacccaaaucugagcaaguccuaugugaacaacaaagagaaagaaguccuuguacuaugggguguucaucacccgucuaacauagaggaccaaaagaccaucuaucggaaagaaaaugcuuaugucucuguagugucuucaaauuauaacaggagauucaccccagaaauagcagaaagacccaaaguaagaggucaagcagggagaauuaacuacuacuggacucugcuggaacccggggacacaauaauauuugaggcaaauggaaaucuaauagcgccauggcaugcuuucgcacugaauagaggcuuugggucaggaaucaucaccucaaacgcaucgauggaugaaugugacacgaagugucaaacaccccagggagcuauaaacaguagucuuccuuuccagaauauacacccagucacaauaggggagugcccaaaauacgucaggaguacaaaauugaggaugguuacaggacuaaggaacaucccauccauucaauccagaggucuguuuggagccauugccgguuucauugaagggggauggacuggaaugauagauggaugguaugguuaucaucaucagaaugaacagggaucuggcuaugcugcggaucaaaaaagcacacaaaaugccauuaacgggauuacaaacaaggugaacucuguuaucgagaaaaugaacacucaauucacagcuguggguaaagaauucaacaaauuagaaaaaaggauggaaaacuuaaauaaaaaaguugaugauggauuucuggacauuuggacauauaaugcagaauuguugguucuacuggaaaaugaaaggacuuuggauuuucaugacucaaaugugaagaaucuguaugagaaaguaaaaagccaauuaaagaauaaugccaaagaaauaggaaacggguguuuugaauucuaccacaaguguaacaaugaaugcauggaaaguguaaaaaauggaacuuaugacuauccaaaauauucagaggaaucaaaguuaaacagggaaaaaauugauggagugaaauuggaaucaaugggagucuaucagauucuggcgaucuacucaacugucgccaguucacuggugcuuuuggucucccugggggcaaucagcuucuggauguguucuaaugggucuuugcagugcagaauaugcaucuga

SEQ ID NO: 32759 - RNA, 1701 nt, Artificial Sequence
  derived and/or modified CDS sequence (wt) from hemagglutinin__InfluenzaA__ABD60944
augaaagcaaaacuacugguccuguuaugugcacuuucagcuacagaugcagacacaauauguauaggcuaccaugcgaacaacucaaccgacacuguugacacaguacucgaaaagaacgugacagugacacacucugucaaccuacuugaggacagucacaacggaaaacuaugcagacuaaaaggaauagccccacuacaauuggggaaaugcagcauugccggauggaucuuaggaaacccagaaugcgaaucacuguuuucuaagaaaucaugguccuacauugcagaaacaccaaacuccgagaauggaacauguuacccaggauauuucgccgacuaugaggaacugagggagcaauugaguucaguaucaucauucgagagauucgaaauauuccccaaggaaagaucauggcccaaacacaacguaaccagaggaguaacggcaucaugcucccauaaggggaaaagcaguuuuuacagaaauuugcuauggcugacggagaaaaauggcucguacccaaaucugagcaaguccuaugugaacaacaaagagaaagaaguccuuguacuaugggguguucaucacccgucuaacauagaggaccaaaagaccaucuaucggaaagaaaaugcuuaugucucuguagugucuucaaauuauaacaggagauucaccccagaaauagcagaaagacccaaaguaagaggucaagcagggagaauuaacuacuacuggacucugcuggaacccggggacacaauaauauuugaggcaaauggaaaucuaauagcgccaugguaugcuuucgcacugaguagaggcuuugggucaggaaucaucaccucaaacgcaucgauggaugaaugugacacgaagugucaaacaccccagggagcuauaaacaguagucuuccuuuccagaauguacacccagucacaauaggagagugcccaaaauacgucaggaguacaaaauuaaggaugguuacaggacuaaggaacaucccauccauucaauccagaggucuguuuggagccauugccgguuucauugaagggggauggacuggaaugauagauggaugguaugguuaucaucaucagaaugaacagggaucuggcuaugcugcggaucaaaaaagcacacaaaaugccauuaacgggauuacaaacaaggugaacucuguuaucgagaaaaugaacacucaauucacagcuguggguaaagaauucaacaaauuagaaaaaaggauggaaaacuuaaauaaaaaaguugaugauggauuucuggacauuuggacauauaaugcagaauuguugguucuacuggaaaaugaaaggacuuuggauuuucaugacucaaaugugaagaaucuguaugagaaaguaaaaagccaauuaaagaauaaugccaaagaaauaggaaacggguguuuugaauucuaccacaaguguaacaaugaaugcauggaaaguguaaaaaauggaacuuaugacuauccaaaauauucagaggaaucaaaguuaaacagggaaaaaauugauggagugaaauuggaaucaaugggagucuaucagauucuggcgaucuacucaacugucgccaguucacuggugcuuuuggucucccugggggcaaucagcuucuggauguguucuaaugggucuuugcagugcagaauaugcaucuga

SEQ ID NO: 32760 - RNA, 1701 nt, Artificial Sequence
  derived and/or modified CDS sequence (wt) from hemagglutinin__InfluenzaA__ABD60955
augaaagcaaaacuacuaguccuguuaugugcauuuacagcuacauaugcagacacaauauguauaggcuaccaugcgaacaacucaaccgacacuguugacacaguacuugagaagaacgugacagugacacacucugucaaccuacuugaggacagucacaacggaaaacuaugucgacuaaagggaauagccccacuacaauuggguaauugcagcguugccggauggaucuuaggaaacccaaaaugcgaaucacuguuuucuaaggaaucaugguccuacauugcagaaacaccaaacccugagaauggaacauguuacccaggguauuucgccgacuaugaggaacugagggagcaauugaguucaguaucaucauucgagagauucgaaauauuccccaaagaaagcucauggcccaaccacaccguaaccaaaggaguaacgacaucaugcucccauaaugggaaaagcaguuuuuacagaaauuugcuauggcugacggagaagaauggcuuguacccaaaucugagcaaguccuauguaaacaacaaagagaaagaaguccuuguacuaugggguguucaucacccgucuaacauaagggaccaaagggccaucuaucauacagaaaaugcuuaugucucuguagugucuucacauuauagcagaagauucaccccagaaauagcaaaaagacccaaaguaagagaucaagaaggaagaauuaacuacuacuggacucugcuggaacccggggacacaauaauauuugaggcaaauggaaaucuaauagcgccaugguaugcuuucgcacugaguagaggcuuugggucaggaaucaucaccucaaacgcaucaauggaugaaugugacgcgaagugucaaacaccccagggagcuauaaacaguagucuuccuuuccagaauguacacccagucacaauaggagaguguccaaaguaugucaggaguacaaaauuaaggaugguuacaggacuaaggaacaucccauccauucaauccagagguuuguuuggagccauugccgguuucauugaagggggguggacuggaaugauagauggaugguaugguuaucaucaucagaaugaacaaggaucuggcuaugcugcggaccaaaaaagcacacaaaaugccauuaacgggauuacaaacaaggugaauucuguaaucgagaaaaugaacacucaauucacagcugugggcaaagaauucaacaaauuagaaagaaggauggaaaacuuaaauaaaaaaguugaugauggauuucuggacauuuggacauauaaugcagaauuguugguucuacuggaaaauggaaggacuuuggauuuucaugacucaaaugugaagaaucuguaugagaaaguaaaaagccaauugaagaauaaugccaaagaaauagggaacggguguuuugaauucuaucacaaguguaacaaugaaugcauggaaagugugaaaaauggaacuuaugacuauccaaaauauuccgaagaaucaaaguuaaacaggggaaaaauugauggagugaaauuggaaucaaugggagucuaucagauucuggcgaucuacucaacugucgccaguucacuggugcuuuuggucucccugggggcaaucagcuucuggauguguucuaaugggucuuugcaguguagaauaugcaucuga

SEQ ID NO: 32761 - RNA, 1701 nt, Artificial Sequence
  derived and/or modified CDS sequence (wt) from hemagglutinin__InfluenzaA__ABD61260
augaagacuaucauugcuuugagcuacauucuaugucugguuuucgcucaaaaacuucccggaaaugacaacagcacggcaacgcugugccuugggcaccaugcaguaccaaacggaacgauagugaaaacaaucacgaaugaccaaauugaaguuacuaaugcuacugagcugguucagaguuccucaacagguggaauaugcgacaguccucaucagauccuugauggagaaaacugcacacuaauagaugcucuauugggagacccucagugugauggcuuccaaaauaagaaaugggaccuuuuuguugaacgcagcaaagccuacagcaacuguuacccuuaugaugugccggauuaugccucccuuaggucacuaguugccucauccggcacacuggaguuuaacaaugaaagcuucgauuggacuggagucacucagaauggaacaagcucugcuugcaaaaggagaucuaauaaaaguuucuuuaguagauugaauugguugacccacuuaaaauacaaauacccagcauugaacgugacuaugccaaacaaugaaaaauuugacaaauuguacauuugggggguucaccacccggguacggacagugaccaaaucagccuauaugcucaagcaucaggaagaaucacagucucuaccaaaagaagccaacaaacuguaaucccgaauaucggaucuagacccaggguaagggaugucuccagccgaauaagcaucuauuggacaauaguaaaaccgggagacauacuuuugauuaacagcacagggaaucuaauugcuccucgggguuacuucaaaauacgaagugggaaaagcucaauaaugagaucagaugcacccauuggcaaaugcaauucugaaugcaucacuccaaauggaagcauucccaaugacaaaccauuucaaaauguaaacaggaucacauauggggccugucccagauauguuaagcaaaacacucugaaauuggcaacagggaugcgaaauguaccagagaaacaaacuagaggcauauuuggcgcaaucgcggguuucauagaaaaugguugggagggaaugguggacgguugguacgguuucaggcaucaaaauucugagggcacaggacaagcagcagaucucaaaagcacucaagcagcaaucaaccaaaucaaugggaaacugaauagguuaaucgggaaaacaaacgagaaauuccaucagauugaaaaagaauucucagaaguagaagggagaauucaggaccucgagaaauauguugaggacacuaaaauagaucucuggucauacaacgcggagcuucuuguugcccuggagaaccaacauacaauugaucuaacugacucagaaaugaacaaacuguuugaaagaacaaagaagcaacugagggaaaaugcugaggauaugggcaaugguuguuucaaaauauaccacaaaugugacaaugccugcauagggucaaucagaaauggaacuuaugaccaugauguguacagagaugaagcauuaaacaaccgguuccagaucaaagguguugagcugaagucaggauacaaagauuggauccuauggauuuccuuugccauaucauguuuuuugcuuuguguugcuuuguugggguucaucaugugggccugccaaaaaggcaacauuaggugcaacauuugcauuuga

SEQ ID NO: 32762 - RNA, 1701 nt, Artificial Sequence
  derived and/or modified CDS sequence (wt) from hemagglutinin__InfluenzaA__ABD61271
augaagacuaucauugcuuugagcuacauucuaugucugguuuucgcucaaaaacuucccggaaaugacaacagcacggcaacgcugugccuugggcaccaugcaguaccaaacggaacgauagugaaaacaaucacgaaugaccaaauugaaguuacuaaugcuacugagcugguacagaguuccucaacagguggaauaugcgacaguccucaucagauccuugauggagaaaacugcacacuaauagaugcucuauugggagacccucagugugauggcuuccaaaauaagaaaugggaccuuuuuguugaacgcagcaaagccuacagcaacuguuacccuuaugaugugccggauuaugccucccuuaggucacuaguugccucauccggcacacuggaguuuaacaaugaaagcuucgauuggacuggagucacucagaauggaacaagcucugcuugcaaaaggagaucuaauaaaaguuucuuuaguagauugaauugguugacccacuuaaaauacaaauacccagcauugaacgugacuaugccaaacaaugaaaaauuugacaaauuguacauuugggggguucaucacccggguacggacagugaccaaaucagccuauaugcucaagcaucaggaagaaucacagucucuaccaaaagaagccaacaaacuguaaucccgaauaucggaucuagacccaggguaagggaugucuccagccgaauaagcaucuauuggacaauaguaaaaccgggagacauacuuuugauuaacagcacagggaaucuaauugcuccucgggguuacuucaaaauacgaagugggaaaagcucaauaaugagaucagaugcacccauuggcaaaugcaauucugaaugcaucacuccaaauggaagcauucccaaugacaaaccauuucaaaauguaaacaggaucacauauggggccugucccagauauguuaagcaaaacacucugaaauuggcaacagggaugcgaaauguaccagagaaacaaacuagaggcauauuuggcgcaaucgcggguuucauagaaaaugguugggagggaaugguggacgguugguacgguuucaggcaucaaaauucugagggcacaggacaagcagcagaucucaaaagcacucaagcagcaaucaaccaaaucaaugggaaacugaauagguuaaucgggaaaacaaacgagaaauuccaucagauugaaaaagaauucucagaaguagaagggagaauucaggaccucgagaaauauguugaggacacuaaaauagaucucuggucauacaacgcggagcuucuuguugcccuggagaaccaacauacaauugaucuaacugacucagagaugaacaaacuguuugaaagaacaaagaagcaacugagagaaaaugcugaggauaugggcaaugguuguuucaaaauauaccacaaaugugacaaugccugcauagggucaaucagaaauggaacuuaugaccaugauguguacagagaugaagcauuaaacaaccgguuccagaucaaagguguugagcugaagucaggauacaaagauuggauccuauggauuuccuuugccauaucauguuuuuugcuuuguguugcuuuguugggguucaucaugugggccugccaaaaaggcaacauuaggugcaacauuugcauuuga

SEQ ID NO: 32763 - RNA, 1701 nt, Artificial Sequence; identical to SEQ ID NO: 32298
  derived and/or modified CDS sequence (wt) from hemagglutinin__InfluenzaA__ABD61282

SEQ ID NO: 32764 - RNA, 1701 nt, Artificial Sequence; identical to SEQ ID NO: 32532
  derived and/or modified CDS sequence (wt) from hemagglutinin__InfluenzaA__ABD61293

SEQ ID NO: 32765 - RNA, 1701 nt, Artificial Sequence; identical to SEQ ID NO: 32750
  derived and/or modified CDS sequence (wt) from hemagglutinin__InfluenzaA__ABD61304

SEQ ID NO: 32766 - RNA, 1701 nt, Artificial Sequence; identical to SEQ ID NO: 32662
  derived and/or modified CDS sequence (wt) from hemagglutinin__InfluenzaA__ABD61315

SEQ ID NO: 32767 - RNA, 1701 nt, Artificial Sequence
  derived and/or modified CDS sequence (wt) from hemagglutinin__InfluenzaA__ABD61337
augaagacuaucauugcuuugagcuacauuuuaugucugguuuucgcucaaaaacuucccguaaaugacaacagcacggcaacgcugugccugggacaccaugcagugccaaacggaacgcuagugaaaacaaucacgaaugaccacauugaagugacuaaugcuacugagcugguucagaguuccucaacagguagaauaugcgacaguccucaccaaauccuugauggagaaaacugcacacuaauagaugcucuauugggagacccucauugugauggcuuccaaaauaaggaaugggaccuuuuuguugaacgcagcacagccuacagcaacuguuacccuuaugaugugccggauuaugccucccuuaggucacuaguugccucauccggcacacuggaguuuaacaaugaaagcuucaauuggacuggagucgcucagaauggaacaagcucugcuugcaaaaggagaucuauuaaaaguuucuuuaguagauugaauugguugcaccaauuaaaauacaaauauccagcacugaacgugacuaugccaaacaaugaaaaauuugacaaauuguacauuugggggguucaccacccgaguacggacagugaccaaaucagccuguaugcucaagcaucagggagagucacagucucuaccaaaagaagccaacaaacuguaaucccgaauaucggaucuagacccuggguaaggggugucuccagcagaauaagcaucuauuggacaauaguaaaaccgggagacauacuuuugauuaacagcacagggaaucuaauugcuccucgggguuacuuuaaaauacgaagugggaaaagcucaauaaugaggucaaaugcacccauuggcaaaugcaauucugaaugcaucacuccaaauggaagcauucccaaugacaaaccauuucaaaauguaaacaggaucacauauggggccugucccagauauguuaagcaaaacacucugaaauuggcaacagggaugcggaauguaccagagaaacaaacuagaggcauauucggcgcaaucgcggguuucauagaaaaugguugggagggaaugguggacgguugguacgguuucaggcaucaaaauucugagggcacaggacaagcagcagaucuuaaaagcacucaagcagcaaucaaccaaaucaacgggaaacugaauagguuaaucgagaaaacaaacgagaaauuccaucaaauugaaaaagaauucucagaaguagaagggagaauucaggaccucgagaaauauguugaggacacuaaaauagaucucuggucguacaacgcggagcuucuuguugcccuggagaaccaacauacaauugaucuaacugacucagaaaugaacaaacuguuugaaagaacaaggaagcaacugagggaaaaugcugaggauaugggcaaugguuguuucaaaauauaccacaaaugugacaaugccugcauagggucaaucagaaauggaacuuaugaccaugauguauacagagacgaagcauuaaacaaccgguuccagaucaaagguguugagcugaagucaggauacaaagauuggauccuauggauuuccuuugccauaucauguuuuuugcuuuguguuguuuugcugggguucaucaugugggccugccaaaaaggcaacauuaggugcaacauuugcauuuga

SEQ ID NO: 32768 - RNA, 1701 nt, Artificial Sequence
  derived and/or modified CDS sequence (wt) from hemagglutinin__InfluenzaA__ABD61348
augaagacuaucauugcuuugagcuacauuuuaugucugguuuucgcucaaaaacuucccguaaaugacaacagcacggcaacgcugugccugggacaccaugcagugccaaacggaacgcuagugaaaacaaucacgaaugaccacauugaagugacuaaugcuacugagcugguucagaguuccucaacagguagaauaugcgacaguccucaccaaauccuugauggagaaaacugcacacuaauagaugcucuauugggagacccucauugugauggcuuccaaaauaaggaaugggaccuuuuuguugaacgcagcacagccuacagcaacuguuacccuuaugaugugccggauuaugccucccuuaggucacuaguugccucauccggcacacuggaguuuaacaaugaaagcuucaauuggacuggagucgcucagaauggaacaagcucugcuugcaaaaggagaucuauuaaaaguuucuuuaguagauugaauugguugcaccaauuaaaauacaaauauccagcacugaacgugacuaugccaaacaaugaaaaauuugacaaauuguacauuugggggguucaccauccgaguacggacagugaccaaaucagccuauaugcucaagcaucagggagagucacagucucuaccaaaagaagccaacaaacuguaaucccgaauaucggaucuagacccuggguaaggggugucuccagcagaauaagcaucuauuggacaauaguaaaaccgggagacauacuuuugauuaacagcacagggaaucuaauugcuccucgggguuacuuuaaaauacgaagugggaaaagcucaauaaugaggucaaaugcacccauuggcaaaugcaauucugaaugcaucacuccaaauggaagcauucccaauaacaaaccauuucaaaauguaaacaggaucacauauggggcaugucccagauauguuaagcaaaacacucugaaauuggcaacagggaugcggaauguaccagagaaacaaacuagaggcauauucggcgcaaucgcggguuucauagaaaaugguugggagggaaugguggacgguugguacgguuucaggcaucaaaauucugagggcacaggacaagcagcagaucuuaaaagcacucaagcagcaaucaaccaaaucaacgggaaacugaauagguuaaucgagaaaacaaacgagaaauuccaucaaauugaaaaagaauucucagaaguagaagggagaauucaggaccucgagaaauauguugaggacacuaaaauagaucucuggucguacaacgcggagcuucuuguugcccuggagaaccaacauacaauugaucuaacugacucagaaaugaacaaacuguuugaaagaacaaggaagcaacugagggaaaaugcugaggauaugggcaaugguuguuucaaaauauaccacaaaugugacaaugccugcauagggucaaucagaaauggaacuuaugaccaugauguauacagagacgaagcauuaaacaaccgguuccagaucaaagguguugagcugaagucaggauacaaagauuggauccuauggauuuccuuugccauaucauguuuuuugcuuuguguuguuuugcugggguucaucaugugggccugccaaaaaggcaacauuaggugcaacauuugcauuuga

SEQ ID NO: 32769 - RNA, 1701 nt, Artificial Sequence; identical to SEQ ID NO: 32302
  derived and/or modified CDS sequence (wt) from hemagglutinin__InfluenzaA__ABD61359

SEQ ID NO: 32770 - RNA, 1701 nt, Artificial Sequence; identical to SEQ ID NO: 32722
  derived and/or modified CDS sequence (wt) from hemagglutinin__InfluenzaA__ABD61370

SEQ ID NO: 32771 - RNA, 1701 nt, Artificial Sequence; identical to SEQ ID NO: 32662
  derived and/or modified CDS sequence (wt) from hemagglutinin__InfluenzaA__ABD61381

SEQ ID NO: 32772 - RNA, 1701 nt, Artificial Sequence
  derived and/or modified CDS sequence (wt) from hemagglutinin__InfluenzaA__ABD61392
augaagacuaucauugcuuugagcuacauuuuaugucugguuuucgcucaaaaacuucccggaaaugacaacagcacggcaacgcugugccuggggcaccaugcagugccaaacggaacgcuagugaaaacaaucacgaaugaccaaauugaagugacuaaugcuacugagcugguucagaguuccucaacagguggaauaugcgacaguccucaccaaauccuugauggagaaaacugcacacuaauagaugcucuauugggagacccucauugugauggcuuccaaaauaaggaaugggaccuuuuuguugaacgcagcaaagccuacagcaacuguuacccuuaugaugugccggauuaugccucccuuaggucacuaguugccucauccggcacacuggaguuuaacaaugaaagcuucaauuggacuggagucgcucagaauggaacaagcucugcuugcaaaaggggaucuaauaaaaguuucuuuaguagauugaauugguugcaccaauuaaaauacaaauacccagcacugaacgugacuaugccaaacaaugaaaaauuugacaaauuguacauuugggggguucaccacccgaguacggacagugaccaaaucagccuauaugcucaagcaccagggagagucacagucucuaccaaaagaagccaacaaacuguaaucccgaauaucggaucuagacccuggguaaggggugucuccagcagaauaagcaucuauuggacaauaguaaaaccgggagacauacuuuugauuaacugcacagggaaucuaauugcuccucgggguuacuucaaaauacgaagugggaaaagcucaauaaugaggucagaugcauccauuggcaaaugcaauucugaaugcaucacuccaaauggaagcauucccaaugacaaaccauuucaaaauguaaacaggaucacauauggggccugucccagauauguuaagcaaaacacucugaaauuggcaacagggaugcggaauguaccagagaaacaaacuagaggcauauucggcgcaaucgcggguuucauagaaaaugguugggagggaaugguggacgguugguacgguuucaggcaucaaaauucugagggcacaggacaagcagcagaucucaaaagcacucaagcagcaaucaaccaaaucaacgggaaacugaauagguuaaucgagaaaacgaacgagaaauuccaucaaauugaaaaagaauucucagaaguggaagggagaauucaggaccucgagaaauauguugaggacacuaaaauagaucucuggucguacaacgcggagcuucuuguugcccuggagaaccagcauacaauugaucuaacugacucagaaaugaacaaacuguuugaaagaacaaagaagcaacugagggaaaaugcugaggauaugggcaaugguuguuucaaaauauaccacaaaugugacaaugccugcauagggucaaucagaaaugggacuuaugaccaugauguauacagagacgaagcauuaaacaaccgguuccagaucaaagguguugagcugaagucaggauacaaagauuggauccuauggauuuccuuugccauaucauguuuuuugcuuuguguugucuugcugggguucaucaugugggccugccaaaaaggcaacauuaggugcaacauuugcauuuga

SEQ ID NO: 32773 - RNA, 1701 nt, Artificial Sequence
  derived and/or modified CDS sequence (wt) from hemagglutinin__InfluenzaA__ABD61403
augaagacuaucauugcuuugagcuacauuuuaugucugguuuucgcucaaaaacuucccguaaaugacaacagcacggcaacgcugugccugggacaccaugcagugccaaacggaacgcuagugaaaacaaucacgaaugaccacauugaagugacuaaugcuacugagcugguucagaguuccucaacagguagaauaugcgacaguccucaccaaauccuugauggagaaaacugcacacuaauagaugcucuauugggagacccccauugugauggcuuccaaaauaaggaaugggaccuuuuuguugaacgcagcacagccuacagcaacuguuacccuuaugaugugccggauuaugccucccuuaggucacuaguugccucauccggcacacuugaguuuaacaaugaaagcuucaauuggacuggagucgaucagaauggaacaagcucugcuugcaaaaggagaucuacuaaaaguuucuuuaguagauugaauugguugcaccaauuaaaauacaaauauccagcacugaacgugacuaugccaaacaaugaaaaauuugacaaauuguacauuugggggguucaccauccgaguacggacagugaccaaaucagccuauaugcucaagcaucagggagagucacagucucuaccaaaagaagccaacaaacuguaaccccgaauaucggaucuagacccuggguaaggggugucuccagcagaauaagcauuuauuggacaauaguaaaaccgggagacauacuuuugauuaacagcacagggaaucuaauugcuccucgggguuacuucaaaauacgaagugggaaaagcucaauaaugaggucaaaugcacucauuggcaaaugcaauucugaaugcaucacuccaaauggaagcauucccaaugacaaaccauuccaaaauguaaacaggaucacauauggggccugucccagauauguuaagcaaaacacucugaaauuggcaacagggaugcggaauguaccagagaaacaaacuagaggcauauucggcgcaaucgcagguuucauagaaaaugguugggagggaaugguggacgguugguacgguuucaggcaucaaaauucugagggcacaggacaagcagcagaucuuaaaagcacucaagcagcaaucaaccaaaucaacgggaaacugaauagguuaaucgagaaaacaaacgagaaauuccaucaaauugaaaaagaauucucagaaguagaagggagaauucaggaccucgagaaauauguugaggacacuaaaauagaucucuggucguacaacgcggagcuucuuguugcccuggagaaccaacauacaauugaucuaacugacucagaaaugaacaaacuguucgaaagaacaaggaaacaacugagggaaaaugcugaggauaugggcaaugguuguuucaaaauauaccacaaaugugacaaugccugcauagggucaaucagaaauggaacuuaugaccaugauguauacagagacgaagcauuaaacaaccgguuccagaucaaagguguugagcugaagucaggauacaaagauuggauccuauggauuuccuuugccauaucauguuuuuugcuuuguguuguuuugcugggguucaucaugugggccugccaaaaaggcaacauuaggugcaacauuugcauuuga

SEQ ID NO: 32774 - RNA, 1701 nt, Artificial Sequence
  derived and/or modified CDS sequence (wt) from hemagglutinin__InfluenzaA__ABD61529
augaagacuaucauugcuuugagcuacauuuucugucugguuuucgcccaaaaacuucccggaaaugacaacagcacagcaacgcugugccugggacaucaugcagugccaaacggaacgcuagugaaaacaaucacgaaugaucagauugaagugacuaaugcuacugagcugguucagaguuccucaacagguagaauaugcgacaguccucaccgaauccuugaugggaaaaacugcacacugauagaugcucuauugggagacccucauugugauggcuuccaaaaugagaaaugggaccuuuuuguugaacgcagcaaagcuuucagcaacuguuacccuuaugaugugccggauuaugccucccuuaggucacuaguugccucaucaggcacccuggaguuuaucaaugaaggcuucaauuggacuggagucacucagagugggggaagcuaugcuugcaaaaggggaucuguuaacaguuucuucaguagauugaauugguuguacgaaucagaaagcaaauauccagugcugaacgugacuaugccaaacaauggcaaauuugacaaauuguacauuugggggguucaccacccgagcacggacaaagaacaaaccaaccuauauguucgagcaucagggagagucacagucucuaccaagagaagccagcaaacuguaaucccgaauaucgggucuagacccuggguaaggggucugucuagcagaauaaguaucuauuggacaauaguaaaaccgggagacauacuguuaauuaauagcacugggaaccuaauugcuccucgggguuacuucaaaauacgcacugggaaaagcucaauaaugaggucagaugcaccuauuggcaccugcaguucugaaugcaucacuccaaauggaagcauucccaaugacaaacccuuucaaaauguaaacaagaucacauauggggcaugucccagguauguuaagcaaaacacucugaaguuggcaacagggaugcggaauguaccagagaaacaaacuagaggcauauucggcgcaauagcagguuucauagaaaaugguugggagggaaugguagacgguugguacgguuucaggcaucaaaauucugagggcacaggacaagcagcagaucuuaaaagcacucaagcagcaaucgaccaaaucaacgggagacugaauagguuaaucgagaaaacgaacgagaaauuccaucaaaucgaaaaggaauucucagaaguagaagggagaauucaggaccucgagaaauauguugaagacacuaaaauagaucucuggucuuacaacgcggagcuucuugucgcccuggagaaccaacauacaauugaucugacugacucagaaaugaacaaacuguuugaaaaaacaaggaagcaacugagggaaaaugcugaggacaugggcaaugguugcuucaaaauauaccacaaaugugacaaugcuugcauagggucaaucagaaauggaacuuaugaccaugauguauacagagacgaagcauuaaacaaccgguuucagaucaaagguguugagcugaagucaggauacaaagacuggauccuauggauuuccuuugccauaucaugcuuuuugcuuuguguuguuuugcugggguucaucaugugggccugccaaaaaggcaacauuaggugcaacauuugcauuuga

SEQ ID NO: 32775 - RNA, 1698 nt, Artificial Sequence; identical to SEQ ID NO: 32753
  derived and/or modified CDS sequence (wt) from hemagglutinin__InfluenzaA__ABD61540

SEQ ID NO: 32776 - RNA, 1701 nt, Artificial Sequence
  derived and/or modified CDS sequence (wt) from hemagglutinin__InfluenzaA__ABD61757
augaagacuaucauugcuuugagcuacauuuucugucugguuuucgcccaagaccuuccaggaaaugacaacagcacagcaacucugugccugggacaucaugcggugccaaacggaacgcuagugaaaacaaucacgaaugaucagauugaagugacuaaugcuacugaacugguucagaguuccucaacggguaaaauaugcgacaauccucaucgaauccuugauggaauaaacugcacacugauagaugcucuauugggggacccucauugugauggcuuucaaaaugagaaaugggaccuuuucguugaacgcagcaaagcuuucagcaacuguuacccuuaugaugugccagauuaugccucccuuaggucacuaguugccucgucaggcacucuggaguuuaucaaugaaggcuucaauuggacuggggucacucagaaugggggaagcagugcuugcaaaaggggaccugauaacgguuuuuucaguagacugaacugguuguacaaaucaggaagcacauauccagugcagaacgugaccaugccaaacaaugacaacucugacaaacuauacauuugggggguucaccacccgagcacggacaaagaacaaaccgaccuauauguucaagcaucagggaaagucacagucuccaccaagagaagccagcaaacuguaaucccgaaugucgggucuagacccuggguaaggggucugucuaguagaguaagcaucuauuggacaauaguuaaaccgggagacauacugguaauuaauaguaauggaaaccuaauugcuccucgggguuacuucaaaaugcgcacugggaaaagcucaauaaugaggucagaugcaccuauuggcaccugcagcucugaaugcaucacuccaaauggaagcauucccaaugacaagcccuuucaaaacguaaacaagaucacauauggggcaugucccaaguauguuaagcaaaacacucugaaguuggcaacagggaugcggaauguaccagagaaacaaacuagaggcauauucggcgcaauagcagguuucauagaaaaugguugggagggaaugauagacgguugguacgguuucaggcaucaaaauucugagggcacaggacaagcagcagaucuuaaaagcacucaagcagccaucgaccaaaucaaugggaaacugaauaggguaaucgagaagacgaacgagaaauuccaucaaaucgaaaaggaauucucagaaguagaagggagaauucaggaccucgagaaauacguugaagacacuaaaauagaucucuggucuuacaaugcggagcuucuugucgcucuggagaaccaacauacaauugaucugacugacucggaaaugaacaaacuguuugaaaaaacaaggaggcaacugagggaaaaugcugaggacaugggcaaugguugcuucaaaauauaccacaaaugugacaaugcuugcauagggucaaucagaaaugggacuuaugaccaugauguauacagagacgaagcauuaaacaaccgguuucagaucaaagguguugaacugaagucaggauacaaagacuggauccuguggauuuccuuugccauaucaugcuuuuugcuuuguguuguuuugcugggguucaucaugugggccugccagaaaggcaacauuaggugcaacauuugcauuuga

SEQ ID NO: 32777 - RNA, 1701 nt, Artificial Sequence
  derived and/or modified CDS sequence (wt) from hemagglutinin__InfluenzaA__ABD61777
augaagacuaucauugcuuugagcuacauuuucugucuggguuucgcccaaaaacuucccggaaaugacaacagcacagcaacgcugugccugggacaccaugcagugccaaacggaacgcuagugaaaacaaucacgaaugaucagauugaagugacuaaugcuacugagcugguucagaguuccucaacagguagaauaugcgacaguccucaccgaauccuugaugggaaaaacugcacacugauagaugcucuauugggagacccucauugugauggcuuccaaaaugagaaaugggaccuuuuuguugaacgcagcaaagcuuucagcaacuguuacccuuaugaugugccggauuaugccucccuuaggucacuaguugccucaucaggcacccuggaguuuaucaaugaaggcuucaauuggacuggagucacucagagugggggaagcuaugcuugcaaaaggggaucuguuaacaguuucuucaguagauugaauugguuguacgaaucagaaagcaaauauccagcgcugaacgugacuaugccaaacaauggcaaauuugacaaauuguacauuugggggguucaccacccgagcacggacaaagaacaaaccaaccuauauguucgagcaucagggagagucacagucucuaccaagagaagccagcaaacuguaaucccgaauaucgggucuagacccuggguaaggggucugucuaguagaauaagcaucuauuggacaauaguaaaaccgggagacauacuguugauuaauagcacuggaaaccuaauugcuccucgggguuacuucaaaauacgcacugggaaaagcucaauaaugaggucagaugcaccuauuggcaccugcaguucugaaugcaucacuccaaauggaagcauucccaaugacaaacccuuucaaaauguaaacaagaucacauauggggcaugucccagguauguuaaacaaaacacucugaaauuggcaacagggaugcggaauguaccagagaaacaaacuagaggcauauucggcgcaauagcagguuucauagaaaaugguugggagggaaugguagacgguugguacgguuucaggcaucaaaauucugagggcacaggacaagcagcagaucuuaaaagcacucaagcagcaaucgaccaaaucaacgggaaacugaauagguuaaucgagaaaacgaacgagaaauuccaucaaaucgaaaaggaauucucagaaguagaagggagaauucaggaccucgagaaauauguugaagacacuaaaauagaucucuggucuuacaacgcggagcuucuugucgcccuggagaaccaacauacaauugaucugacugacucagaaaugaacaaacuguuugaaaaaacaaggaagcaacugagggaaaaugcugaggacaugggcaaugguugcuucaaaauauaccacaaaugugacaaugcuugcauaggaucaaucagaaauggaacuuaugaccaugauguauacagagacgaagcauugaacaaccgguuucagaucaaagguguugagcugaagucaggauacaaagacuggauccuauggauuuccuuugccauaucaugcuuuuugcuuuguguuguuuugcugggguucaucaugugggccugccaaaaaggcaacauuaggugcaacauuugcauuuga

SEQ ID NO: 32778 - RNA, 1701 nt, Artificial Sequence
  derived and/or modified CDS sequence (wt) from hemagglutinin__InfluenzaA__ABD77598
augaagacuaucauugcuuugagcuacauuuuaugucugguuuucgcucaaaaacuucccguaaaugacaacagcacggcaacgcugugccugggacaccaugcagugccaaacggaacgcuagugaaaacaaucacgaaugaccacauugaagugacuaaugcuacugagcugguucagaguuccccaacagguagaauaugcgacaguccucaccaaauccuugauggagaaaacugcacacuaauagaugcucuauugggagacccucauugugauggcuuccaaaauaaggaaugggaccuuuuuguugaacgcagcacagccuacagcaacuguuacccuuaugaugugccggauuaugccucccuuaggucacuaguugccucauccggcacacuggaguuuaacaaugaaagcuucaauuggacuggagucgcucagaauggaacaagcucugcuugcaaaaggagaucuauuaaaaguuucuuuaguagauugaauugguugcaccaauuaaaauacaaauauccagcacugaacgugacuaugccaaacaaugaaaaauuugacaaauuguacauuugggggguucaccacccgaguacggacagugaccaaaucagccuauaugcucaagcaucagggagagucacagucucuaccaaaagaagccaacaaacuguaaucccgaauaucggaucuagacccuggguaaggggugucuccagcagaauaagcaucuauuggacaauaguaaaaccgggagacauacuuuugauuaacagcacagggaaucuaauugcuccucgggguuacuucaaaauacgaagugggaaaagcucaauaaugaggucaaaugcacccauuggcaaaugcaauucugaaugcaucacuccaaauggaagcauucccaaugacaaaccauuucaaaauguaaacaggaucacauauggggccugucccagauauguuaagcaaaacacucugaaauuggcaacagggaugcggaauguaccagagaaacaaacuagaggcauauucggcgcaauugcagguuucauagaaaaugguugggaaggaaugguggacgguugguacgguuucaggcaucaaaauucugagggcacaggacaagcagcagaucuuaaaagcacucaagcugcaaucaaccaaaucaacgggaaacugaauagguuaaucgagaaaacaaacgagaaauuccaucaaauugaaaaagaauucucagaaguagaagggagaauucaggaccucgagaaauauguugaggacacuaaaauagaucucuggucguacaacgcggagcuucuuguugcccuggagaaccaacauacaauugaucuaacugacucagaaaugaacaaacuguuugaaagaacaaggaagcaacugagggaaaaugcugaggauaugggcaaugguuguuucaaaauauaccacaaaugugacaaugccugcauagggucaaucagaaauggaacuuaugaccaugauguauacagagacgaagcauuaaacaaccgguuccagaucaaagguguugagcugaagucaggauacaaagauuggauccuauggauuuccuuugccauaucauguuuuuugcuuuguguuguuuugcugggguucaucaugugggccugccaaaaaggcaacauuaggugcaacauuugcauuuga

SEQ ID NO: 32779 - RNA, 1701 nt, Artificial Sequence
  derived and/or modified CDS sequence (wt) from hemagglutinin__InfluenzaA__ABD77609
augaagacuaucauugcuuugagcuacauuuuaugucugguuuucgcucaaaaacuucccggaaaugacaacagcacggcaacgcugugccuggggcaccaugcagugccaaacggaacgcuagugaaaacaaucacgaaugaccaaauugaagugacuaaugcuacugagcugguucagaguuccucaacagguggaauaugcgacaguccucaccaaauccuugauggagaaaacugcacacuaauagaugcucuauugggagacccucauugugauggcuuccaaaauaaggaaugggaccuuuuuguugaacgcagcaaagccuacagcaacuguuacccuuaugaugugccggauuaugccucccuuaggucacuaguugccucauccggcacacuggaguuuaacaaugaaagcuucaauuggacuggagucgcucagaauggaacaagcucugcuugcaaaaggagaucuaauaaaaguuucuuuaguagauugaauugguugcaccaauuaaaauacaaauacccagcacugaacgugacuaugccaaacaaugaaaaauuugacaaauuguacauuugggggguucaccacccgaguacggacagugaccaaaucagccuauaugcucaagcaccagggagagucacagucucuaccaaaagaagccaacaaacuguaaucccgaauaucggaucuagacccuggguaaggggugucuccagcagaauaagcaucuauuggacaauaguaaaaccgggagacauacuuuugauuaacugcacagggaaucuaauugcuccucgggguuacuucaaaauacgaagugggaaaagcucaauaaugaggucagaugcauccauuggcaaaugcaauucugaaugcaucacuccaaauggaagcauucccaaugacaaaccauuucaaaauguaaacaggaucacauauggggccugucccagauauguuaagcaaaacacucugaaauuggcaacagggaugcggaauguaccagagaaacaaacuagaggcauauucggcgcaaucgcggguuucauagaaaaugguugggagggaaugguggacgguugguacgguuucaggcaucaaaauucugagggcacaggacaagcagcagaucucaaaagcacucaagcagcaaucaaccaaaucaacgggaaacugaauagguuaaucgagaaaacgaacgagaaauuccaucaaauugaaaaagaauucucagaaguggaagggagaauucaggaccucgagaaauauguugaggacacuaaaauagaucucuggucguacaacgcggagcuucuuguugcccuggagaaccagcauacaauugaucuaacugacucagaaaugaacaaacuguuugaaagaacaaagaagcaacugagggaaaaugcugaggauaugggcaaugguuguuucaaaauauaccacaaaugugacaaugccugcauagggucaaucagaaaugggacuuaugaccaugauguauacagagacgaagcauuaaacaaccgguuccagaucaaagguguugaguugaagucaggauacaaagauuggauccuauggauuuccuuugccauaucauguuuuuugcuuuguguugucuugcugggguucaucaugugggccugccaaaaaggcaacauuaggugcaacauuugcauuuga

SEQ ID NO: 32780 - RNA, 1701 nt, Artificial Sequence
  derived and/or modified CDS sequence (wt) from hemagglutinin__InfluenzaA__ABD77620
augaagacuaucauugcuuugagcuacauuuuaugucugguuuucgcucaaaaacuucccggaaaugacaacagcacggcaacgcugugccuggggcaccaugcagugccaaacggaacgcuagugaaaacaaucacgaaugaccaaauugaagugacuaaugcuacugagcugguucagaguuccucaacagguggaauaugcgacaguccucaccaaauccuugauggagaaaacugcacacuaauagaugcucuauugggagacccucauugugauggcuuccaaaauaaggaaugggaccuuuuuguugaacgcagcaaagccuacagcaacuguuacccuuaugaugugccggauuaugccucccuuaggucacuaguugccucauccggcacacuggaguuuaacaaugaaagcuucaauuggacuggagucgcucagaauggaacaagcucugcuugcaaaaggagaucuaauaaaaguuucuuuaguagauugaauugguugcaccaauuaaaauacaaauacccagcacugaacgugacuaugccaaacaaugaaaaauuugacaaauuguacauuugggggguucaccacccgaguacggacagugaccaaaucagccuauaugcucaagcaccagggagagucacagucucuaccaaaagaagccaacaaacuguaaucccgaauaucggaucuagacccuggguaaggggugucuccagcagaauaagcaucuauuggacaauaguaaaaccgggagacauacuuuugauuaacugcacagggaaucuaauugcuccucgggguuacuucaaaauacgaagugggaaaagcucaauaaugaggucagaugcauccauuggcaaaugcaauucugaaugcaucacuccaaauggaagcauucccaaugacaaaccauuucaaaauguaaacaggaucacauauggggccugucccagauauguuaagcaaaacacucugaaauuggcaacagggaugcggaauguaccagagaaacaaacuagaggcauauucggcgcaaucgcggguuucauagaaaaugguugggagggaaugguggacgguugguacgguuucaggcaucaaaauucugagggcacaggacaagcagcagaucucaaaagcacucaagcagcaaucaaccaaaucaacgggaaacugaauagguuaaucgagaaaacgaacgagaaauuccaucaaauugaaaaagaauucucagagguggaagggagaauucaggaccucgagaaauauguugaggacacuaaaauagaucucuggucguacaacgcggagcuucuuguugcccuggagaaccagcauacaauugaucuaacugacucagaaaugaacaaacuguuugaaagaacaaagaagcaacugagggaaaaugcugaggauaugggcaaugguuguuucaaaauauaccacaaaugugacaaugccugcauagggucaaucagaaaugggacuuaugaccaugauguauacagagacgaagcauuaaacaaccgguuccagaucaaagguguugaguugaagucaggauacaaagauuggauccuauggauuuccuuugccauaucauguuuuuugcuuuguguugucuugcugggguucaucaugugggccugccaaaaaggcaacauuaggugcaacauuugcauuuga

SEQ ID NO: 32781 - RNA, 1701 nt, Artificial Sequence; identical to SEQ ID NO: 32779
  derived and/or modified CDS sequence (wt) from hemagglutinin__InfluenzaA__ABD77631

SEQ ID NO: 32782 - RNA, 1701 nt, Artificial Sequence; identical to SEQ ID NO: 32779
  derived and/or modified CDS sequence (wt) from hemagglutinin__InfluenzaA__ABD77642

SEQ ID NO: 32783 - RNA, 1701 nt, Artificial Sequence; identical to SEQ ID NO: 32779
  derived and/or modified CDS sequence (wt) from hemagglutinin__InfluenzaA__ABD77653

SEQ ID NO: 32784 - RNA, 1698 nt, Artificial Sequence; identical to SEQ ID NO: 32753
  derived and/or modified CDS sequence (wt) from hemagglutinin__InfluenzaA__ABD77708

SEQ ID NO: 32785 - RNA, 1698 nt, Artificial Sequence
  derived and/or modified CDS sequence (wt) from hemagglutinin__InfluenzaA__ABD77719
augaaaguaaaacuacugguccuguuauguacauuuacagcuacauaugcagacacaauauguauaggguaccaugccaacaacucaaccgacacuguugacacaguacuugagaagaaugugacagugacacacucugucaaccuacuugaggacagucacaauggaaaacuaugucuacuaaaaggaauagccccacuacaauuggguaauugcagcguugccggauggaucuuaggaaacccagaaugcgaauuacugauuuccaaggaaucaugguccuacauuguagaaacaccaaauccugagaauggaacauguuacccaggguauuucgccgacuaugaggaacugagggagcaauugaguucaguaucuucauuugagagauucgaaauauuccccaaagaaagcucauggcccaaccacaccguaaccggaguaucagcaucaugcucccauaaugggaaaagcaguuuuuacagaaauuugcuauggcugacggggaagaaugguuuguacccaaaccugagcaaguccuaugcaaacaacaaagagaaagaaguccuuguacuaugggguguucaucacccgccuaacauaggggaccaaagggcccucuaucauacagaaaaugcuuaugucucuguagugucuucacauuauagcagaagauucaccccagaaauagccaaaagacccaaaguaagaaaucaggaaggaagaaucaacuacuacuggacucugcuggaacccggggauacaauaauauuugaggcaaauggaaaucuaauagcgccacgguaugcuuucgcacugaguagaggcuuuggaucaggaaucaucaccucaaaugcaccaauggaugaaugugaugcgaagugucaaacaccucagggagcuauaaacagcagucuuccuuuccagaacguacacccagucacaauaggagaguguccaaaguaugucaggagugcaaaauuaaggaugguuacaggacuaaggaacaucccauccauucaauccagagguuuguuuggagccauugccgguuucauugaagggggguggacuggaaugguagaugggugguaugguuaucaucaucagaaugagcaaggaucuggcuaugccgcagaucaaaaaagcacacaaaaugccauuaacgggauuacaaacaaggugaauucuguaauugagaaaaugaacacucaauucacagcugugggcaaagaauucaacaaauuggaaagaaggauggaaaacuuaaauaaaaaaguugaugauggguuucuagacauuuggacauauaaugcagaauuguugguucuacuggaaaaugaaaggacuuuggauuuccaugacuccaaugugaagaaucuguaugagaaaguaaaaagccaauuaaagaauaaugccaaagaaauaggaaacggguguuuugaauucuaucacaaguguaacaaugaaugcauggagagugugaaaaauggaacuuaugacuauccaaaauauuccgaagaaucaaaguuaaacagggagaaaauugauggagugaaauuggaaucaaugggagucuaucagauucuggcgaucuacucaacugucgccaguucccugguucuuuuggucucccugggggcaaucagcuucuggauguguuccaaugggucuuugcaguguagaauaugcaucuga

SEQ ID NO: 32786 - RNA, 1698 nt, Artificial Sequence
  derived and/or modified CDS sequence (wt) from hemagglutinin__InfluenzaA__ABD77730
augaaaguaaaacuacugguccuguuauguacauuuacagcuacauaugcagacacaauauguauaggguaccaugccaacaacucaaccgacacuguugacacaguacuugagaagaaugugacagugacacacucugucaaccuacuugaggacagucacaauggaaaacuaugucuacuaaaaggaauagccccacuacaauuggguaauugcagcguugccggauggaucuugggaaacccagaaugcgaauuacugauuuccaaggaaucaugguccuacauuguagaaacaccaaauccugagaauggaacauguuacccaggguauuucgccgacuaugaggaacugagggagcaauugaguucaguaucuucauuugagagauucgaaauauuccccaaagaaagcucauggcccaaccacaccguaaccggaguaucagcaucaugcucccauaaugggaaaagcaguuuuuacagaaauuugcuauggcugacggggaagaaugguuuguacccaaaccugagcaaguccuaugcaaacaacaaagagaaagaaguccuuguacuaugggguguucaucacccgccuaacauaggggaccaaaaggcccucuaucauacagaaaaugcuuaugucucuguagugucuucacauuauagcagaagauucaccccagaaauagccaaaagacccaaaguaagagaucaggaaggaagaaucaacuacuacuggacucugcuggaacccggggauacaauaauauuugaggcaaauggaaaucuaauagcgccacgguaugcuuucgcacugaguagaggcuuuggaucaggaaucaucaccucaaaugcaccaauggaugaaugugaugcgaagugucaaacaccucagggagcuauaaacagcagucuuccuuuccagaacguacacccagucacaauaggagaguguccaaaguaugucaggagugcaaaauuaaggaugguuacaggacuaaggaacaucccauccauucaauccagagguuuguuuggagccauugccgguuucauugaagggggguggacuggaaugguagaugggugguaugguuaucaucaucagaaugagcaaggaucuggcuaugccgcagaucaaaaaagcacacaaaaugccauuaacgggauuacaaacaaggugaauucuguaauugagaaaaugaacacucaauucacagcugugggcaaagaauucaacaaauuggaaagaaggauggaaaacuuaaauaaaaaaguugaugauggguuucuagacauuuggacauauaaugcagaauuguugguucuacuggaaaaugaaaggacuuuggauuuccaugacuccaaugugaagaaucuguaugagaaaguaaaaagccaauuaaagaauaaugccaaagaaauaggaaacggguguuuugaauucuaucacaaguguaacaaugaaugcauggagagugugaaaaauggaacuuaugacuauccaaaauauuccgaagaaucaaaguuaaacagggagaaaauugauggagugaaauuggaaucaaugggagucuaucagauucuggcgaucuacucaacugucgccaguucccugguucuuuuggucucccugggggcaaucagcuucuggauguguuccaaugggucuuugcaguguagaauaugcaucuga

SEQ ID NO: 32787 - RNA, 1701 nt, Artificial Sequence; identical to SEQ ID NO: 32779
  derived and/or modified CDS sequence (wt) from hemagglutinin__InfluenzaA__ABD77752

SEQ ID NO: 32788 - RNA, 1701 nt, Artificial Sequence; identical to SEQ ID NO: 32779
  derived and/or modified CDS sequence (wt) from hemagglutinin__InfluenzaA__ABD77763

SEQ ID NO: 32789 - RNA, 1701 nt, Artificial Sequence
  derived and/or modified CDS sequence (wt) from hemagglutinin__InfluenzaA__ABD77774
augaagacuaucauugcuuugagcuacauuuuaugucugguuuucgcucaaaaacuuccuguaaaugacaacagcacggcaacgcugugccugggacaccaugcagugccaaacggaacgcuagugaaaacaaucacgaaugacaacauugaagugacuaaugcuacugagcugguucagaguuccucaacagguagaauaugcgacaguccucaccaaauccuugauggagaaaacugcacacuaauagaugcucuauugggagacccucauugugauggcuuccaaaauaaggaaugggaccuuuuuguugaacgcagcacagccuacagcaacuguuacccuuaugaugugccggauuaugccucccuuaggucacuaguugccucauccggcacacuggaguuuaacaacgaaagcuucaauuggacuggagucgaucagaauggaacaagcucugcuugcaaaaggagaucuaauaaaaguuucuuuaguagauugaauugguugcaccaauuaaaauacaaauauccagcacugaacgugacuaugccaaacaaugaaaaauuugacaaauuguacauuugggggguucaccacccgaguacggacagugaccaaaucagccuauaugcucaagcaucagggagagucacagucucuaccaaaagaagccaacaaacuguaaucccgaauaucggaucuagacccuggguaaggggugucuccagcagaauaagcaucuauuggacaauaguaaaaccgggagacauacuuuugauuaacagcacagggaaucuaauugcuccucgggguuacuucaaaauacgaagugggaaaagcucaauaaugaggucaaaugcacccauuggaaaaugcaauucugaaugcaucacucaaaauggaagcauucccaaugacaaaccauuucaaaauguaaacaggaucacauauggggccugucccagauauguuaaacaaaacacucugaaauuggcaacagggaugcggaauguaccagagaaacaaacuagaggcauauucggcgcaaucgcagguuucauagaaaaugguugggagggaaugguggacgguugguacgguuucaggcaucaaaauucugagggcacaggacaagcagcagaucuuaaaagcacucaagcagcaaucaaccaaaucaacgggaaacugaauagguuaaucgagaaaacaaacgagaaauuccaucaaauugaaaaagaauucucagaaguagaaggaagaauccaggaccucgagaaauauguugaggacacuaaaauagaucucuggucguacaacgcggagcuucuuguugcccuggagaaccaacauacaauugaucuaacugacucagaaaugaacaaacuguucgaaagaacaaggaagcaacugagggaaaaugcugaggauaugggcaaugguuguuucaaaauauaccacaaaugugacaaugccugcauagggucaaucagaaauggaacuuaugaccaugauguauacagagacgaagcauuaaacaaccgguuccagaucaaagguguugagcugaagucaggauacaaagauuggauccuauggauuuccuuugccauaucauguuuuuugcuuuguguuguuuugcugggguucaucaugugggccugccaaaaaggcaacauuaggugcaacauuugcauuuaa

SEQ ID NO: 32790 - RNA, 1701 nt, Artificial Sequence
  derived and/or modified CDS sequence (wt) from hemagglutinin__InfluenzaA__ABD77785
augaagacuaucauugcuuugagcuacauuuuaugucugguuuucgcucaaaaacuucccguaaaugacaacagcacggcaacgcugugccugggacaccaugcagugccaaacggaacgcuagugaaaacaaucacgaaugacaacauugaagugacuaaugcuacugagcugguucagaguuccucaacagguagaauaugcgacaguccucaccaaauccuugauggagaaaacugcacacuaauagaugcucuauugggagacccucauugugauggcuuccaaaauaaggaaugggaccuuuuuguugaacgcagcacagccuacagcaacuguuacccuuaugaugugccggauuaugccucccuuaggucacuaguugccucauccggcacacuggaguuuaacaacgaaagcuucaauuggacuggagucgaucagaauggaacaagcucugcuugcaaaaggagaucuaauaaaaguuucuuuaguagauugaauugguugcaccaauuaaaauacaaauauccagcacugaacgugacuaugccaaacaaugaaaaauuugacaaauuguacauuugggggguucaccacccgaguacggacagugaccaaaucagccuauaugcucaagcaucagggagagucacagucucuaccaaaagaagccaacaaacuguaaucccgaauaucggaucuagacccuggguaaggggugucuccagcagaauaagcaucuauuggacaauaguaaaaccgggagacauacuuuugauuaacagcacagggaaucuaauugcuccucgggguuacuucaaaauacgaagugggaaaagcucaauaaugaggucaaaugcacccauuggaaaaugcaauucugaaugcaucacucaaaauggaagcauucccaaugacaaaccauuucaaaauguaaacaggaucacauauggggccugucccagauauguuaaacaaaacacucugaaauuggcaacagggaugcggaauguaccagagaaacaaacuagaggcauauucggcgcaaucgcagguuucauagaaaaugguugggagggaaugguggacgguugguacgguuucaggcaucaaaauucugagggcacaggacaagcagcagaucuuaaaagcacucaagcagcaaucaaccaaaucaacgggaaacugaauagguuaaucgagaaaacaaacgagaaauuccaucaaauugaaaaagaauucucagaaguagaaggaagaauccaggaccucgagaaauauguugaggacacuaaaauagaucucuggucguacaacgcggagcuucuuguugcccuggagaaccaacauacaauugaucuaacugacucagaaaugaacaaacuguucgaaagaacaaggaagcaacugagggaaaaugcugaggauaugggcaaugguuguuucaaaauauaccacaaaugugacaaugccugcauagggucaaucagaaauggaacuuaugaccaugauguauacagagacgaagcauuaaacaaccgguuccagaucaaagguguugagcugaagucaggauacaaagauuggauccuauggauuuccuuugccauaucauguuuuuugcuuuguguuguuuugcugggguucaucaugugggccugccaaaaaggcaacauuaggugcaacauuugcauuuaa

SEQ ID NO: 32791 - RNA, 1701 nt, Artificial Sequence
  derived and/or modified CDS sequence (wt) from hemagglutinin__InfluenzaA__ABD77807
augaaagcaaaacuacugauccuguuaugugcacuuucagcuacagaugcagacacaauauguauaggcuaccaugcgaacaacucaaccgacacuguugacacaguacucgaaaagaaugugacagugacacacucuguaaaccuacucgaagacagccacaacgggaaauuaugcagauuaaaaggaauagccccacuacaauuggggaaauguaacauugccggauggaucuuaggaaacccagaaugcgaaucacugcuuucuaagagaucaugguccuacauugcagaaacaccaaacucugagaauggaacauguuacccaggagauuucgccgacuaugaggaacugagggagcaauugagcucagugucaucauucgagagauucgaaauauuccccaaggaaagaucauggcccaaacacaacauaaccagaggaguaacggcagcaugcucccaugcggggaaaagcaguuuuuacaaaaauuugcucuggcugacggagacaaauggcucauacccaaagcugagcaaguccuaugugaacaauaaagagaaagaaguccuugugcuaugggguguucaucacccgucuaacauagaggaucaaaagacccucuaucggaaagaaaaugcuuaugucucuguagugucuucaaauuauaacaggagauucaccccggaaauagcagaaagacccaaaguaagaggucaagcagggagaaugaacuauuacuggacuuugcuagaacccggagacacaauaauauuugaggcaaauggaaaucuaauagcgccaugguaugcuuucgcacugaguagaggcuuuggaucaggaaucaucaccucaaacgcaucaauggaugaaugugacacgaagugucaaacaccccagggagcuauaaacaguagucucccuuuucagaauauacacccagucacaauaggagagugcccaaaauacgucaagaguaccaaauugaggaugguuacaggauuaaggaacaucccauccauucaauccagaggucuguuuggagccauugccgguuucauugaggggggauggacuggaaugauagauggaugguaugguuaccaucaucagaaugaacagggaucuggcuaugcugcggaucaaaaaagcacacaaaaugcaauuaacgggauuacaaauaaggugaacucuguuaucgagaaaaugaacacucaauucacagcuguggguaaagaauucaacaaauuagaaaaaagaauggaaaacuuaaauaaaaaaguugaugauggauuucuggacauuuggacauauaaugcagaauuguugguucuacuggaaaaugaaaggacuuuggauuuccaugacucaaaugugaagaaucuguaugagaaaguaaaaaaccaauuaaggaauaaugcaaaggaaauaggaaacggguguuuugaguucuaccacaaguguaacaaugaaugcauggaaaguguaaaaaauggaacuuaugauuacccaaaauauucagaggaaucaaaguuaaacagggaaaaaauugauggagugaaauuggaaucaaugggggucuaucagauucuggcgaucuacucaacugucgccaguucacuggugcuucuggucucccugggggcaaucagcuucuggauguguucuaaugggucuuugcaaugcagaauaugcaucuga

SEQ ID NO: 32792 - RNA, 1701 nt, Artificial Sequence
  derived and/or modified CDS sequence (wt) from hemagglutinin__InfluenzaA__ABD77818
augaaagcaaaacugcugguccuguuaugugcacuuucagcuacagaugcagacacaauauguauaggcuaccaugcgaacaacucaaccgauacuguugacacaguacucgaaaagaacgugacagugacacacucugucaaccuacuugaggacagucacaacggaaaacuaugcagacuaaaaggaauagccccacuacaauuggggaaaugcagcauugccggauggaucuuaggaaacccagaaugugaaucacuguuuucuaagaaaucaugguccuacauugcagaaacaccaaacuccgagaaugggacauguuacccaggguauuucgccgacuaugaggaacugagggagcaauugaguucaguaucaucauucgagagauucgaaauauuccccaaggaaaguucauggcccaaacacaccguaaccagaggaguaacggcuucaugcucccauaaggggaaaagcaguuuuuacagaaauuugcuauggcugacggagaaaaauggcucguacccaaaucugagcaaguccuaugugaacaacaaagagaaagaaguccuuguacuaugggguguucaucacccgucaaacauagaggaccaaaagaccaucuaucguaaagaaaaugcuuaugucucuguagugucuucacauuauaacagaagauucaccccagaaauagcaaaacgacccaaaguaagagaucaagaagggagaauuaacuacuacuggacucugcuggaacccggggacacaauaauauuugaggcaaauggaaaucuaauagcgccaugguaugcuuucgcacugaguagaggcuuugggucaggaaucaucaccucaaacgcaucaauggaugaaugugacgcgaagugucaaacaccccagggagcuauaaacaguagucuuccuuuccagaauguacacccagucacaauaggagagugcccaaaauacgucaggaguacaaaauuaaggauggucacaggacuaaggaacauuccauccauucaauccagagguuuguuuggagccauugcugguuucauugaagggggauggacuggaaugauagauggaugguaugguuaucaucaucagaaugaacagggauccggcuaugcugcagaucaaaaaagcacacaaaaugccauuaacgggauuacaaacaaggugaacucuguuaucgagaaaaugaacacucaauucacagcuguagguaaagaauucaacaaauuagaaaaaaggauggaaaacuuaaauaaaaaaguugaugauggguuucuggacauuuggacauauaaugcagaauuguugguucuacuggaaaaugaaaggacuuuggauuuucaugacucaaaugugaagaaccuguaugagaagguaaaaagccaauuaaagaguaaugccaaagaaauaggaaacggguguuuugaauucuaccacaaguguaacaaugaaugcauggaaaguguaaaaaauggaacuuaugacuauccaaaauauucagaggaaucaaaguuaaacagggaaaaaauugauggagugaaauuggaaucaaugggagucuaucagauucuggcgaucuacucaacugucgccaguucacuggugcuuuuggucucccugggggcaaucagcuucuggauguguucuaaugggucuuugcagugcagaauaugcaucuga

SEQ ID NO: 32793 - RNA, 1701 nt, Artificial Sequence
  derived and/or modified CDS sequence (wt) from hemagglutinin__InfluenzaA__ABD77829
augaagacuaucauugcuuugagcuacauuuuauaucugguuuucgcucaaaaacuucccggaaaugacaacagcacggcaacgcugugccugggacaccaugcagugccaaacggaacacuagugaaaacaaucacgaaugaccaaauugaagugacuaaugcuacugagcugguucagaguuccucaacagguagacuaugcgacaguccucaccgaauccuugacgggaaaaacugcacacugauagaugcucuauugggagacccucauugugauggcuuccaaaauaaggaaugggaccuuuuuguugaacgcagcaaagcuuacagcgacuguuacccuuaugaugugccggauuaugcuucccuuaggucacuaguugccucauccggcacccuggaguuuaccaaugaaggcuucaauuggacuggagucgcucagaauggaacaagcuaugcuugcaaaaggggaucuguuaaaaguuucuuuaguagauugaauugguugcacaaauuagaauacaaauauccagcacugaacgugacuaugccaaacaaugacaaauuugacaaauuguacauuugggggguucaccacccgaguacggacagugaccaaaccagccuauauguucaagcaucagggagagucacagucucuaccaaaagaagccaacaaacuguaaucccgaauaucgggucuagacccuggguaaggggggucuccagcagaauaagcaucuauuggacaauaguaaaaccgggagacauacuuuugauuaauagcacagggaaucuaauugccccucgggguuacuucaaaauacgaagugggaaaagcucaauaaugaggucagaugcacccauuggcaacugcaauucugaaugcaucacuccaaauggaagcauucccaaugacaaaccuuuucaaaauguaaacaggaucacauauggggccugucccagauauguuaagcaaaacacucugaaauuggcaacagggaugcggaauguaccagagaaacaaacuagaggcauauucggcgcaaucgcagguuucauagaaaaugguugggagggaaugguagacgguugguacgguuucaggcaucaaaauucugagggcacaggacaagcagcagaucuuaaaagcacucaagcagcaaucaaccaaaucaaugggaaacugaauagguuaaucgagaaaacgaacgagaaauuccaucaaaucgaaaaagaauucucagaaguagaagggagaauucaggaccucgagaaauauguugaagacacuaaaauagaucucuggucuuacaacgcagagcuucuuguugcccuggagaaccaacauacaauugaucuaacugacucagaaaugaacaaacuguuugaaagaacaaggaagcaacugagggaaaaugcugaggacaugggcaaugguugcuucaaaauauaccacaaaugugacaaugccugcauagguucaaucagaaauggaacuuaugaccaugauguauacagagacgaagcauuaaacaaccgguuccagaucaaagguguugagcugaagucaggauacaaagauuggauccuauggauuuccuuugccauaucaugcuuuuugcuuuguguuguuuugcugggguucaucaugugggccugccaaaaaggcaacauuaggugcaacauuugcauuuga

SEQ ID NO: 32794 - RNA, 1701 nt, Artificial Sequence
  derived and/or modified CDS sequence (wt) from hemagglutinin__InfluenzaA__ABD77862
augaagacuaucauugcuuugagcuacauuuuaugucugguuuucgcucaaaaacuucccggaaaugacaacagcacggcaacgcugugccugggacaccaugcagugccaaacggaacgcuagugaaaacaaucacgaaugaccaaauugaagugacuaaugcuacugagcugguucagaguuccucaacagguagaauaugcgacaguccucaccgaauccuugauggaaaaaacugcacacugauagaugcucuauugggagacccucauugugauggcuuccaaaauaaggaaugggaccuuuuuguugaacgcagcaaagcuuacagcgacuguuacccuuaugaugugccggauuaugcuucccuuaggucacuaguugccucauccggcacccuggaguuuaccaaugaaggcuucaauuggacuggagucgcucaggauggaacaagcuaugcuugcaaaaggggaucuguuaaaaguuucuuuaguagauugaauugguugcacaaauuagaauacaaauauccagcacugaacgugacuaugccaaacaaugacaaauuugacaaauuguacauuugggggguucaccacccgaguacggacagugaccaaaccagcauauauguucaagcaucagggagagucacagucucuaccaaaagaagccaacaaacuguaaucccgaauaucgggucuagacccuggguaaggggggucuccagcagaauaagcaucuauuggacaauaguaaaaccgggagacauacuuuugauuaauagcacagggaaucuaauugccccucgggguuacuucaaaauacgaagugggaaaagcucaauaaugaggucagaugcacccauuggcaacugcaauucugaaugcaucacuccaaauggaagcauucccaaugacaaaccuuuucagaauguaaacaggaucacauauggggccugucccagauauguuaagcaaaacacucugaaauuggcaacagggaugcggaauguaccagagaaacaaacuagaggcauauucggcgcaaucgcagguuucauagaaaaugguugggagggaaugguagacgguugguacgguuucaggcaucaaaauucugagggcacaggacaagcagcagaucuuaaaagcacucaagcagcaaucaaccaaaucaaugggaaacugaauagguuaaucgagaaaacgaacgagaaauuccaucaaaucgaaaaagaauucucagaaguagaagggagaauucaggaccucgagaaauauguugaagacacuaaaauagaucucuggucuuacaacgcagagcuucuuguugcccuggagaaccaacauacaauugaucuaacugacucagaaaugaacaaacuguuugaaagaacaaggaagcaacugagggaaaaugcugaggacaugggcaaugguugcuucaaaauauaccacaaaugugacaaugccugcauagggucaaucagaaauggaacuuaugaccaugauguauacagagacgaagcauuaaacaaccgguuccagaucaaagguguugagcugaagucaggauacaaagauuggauccuauggauuuccuuugccauaucaugcuuuuugcuuuguguuguuuugcugggguucaucaugugggccugccaaaaaggcaacauuaggugcaacauuugcauuuga

SEQ ID NO: 32795 - RNA, 1701 nt, Artificial Sequence
  derived and/or modified CDS sequence (wt) from hemagglutinin__InfluenzaA__ABD77884
augaagacuauuauugcuuugagcuacauuuuaugucugguuuucgcucaaaaacuucccggaaaugacaacagcacggcaacgcugugccugggacaccaugcagugccaaacggaacgcuagugaaaacaaucacgaaugaccaaauugaagugacuaaugcuacugagcuuguucaggguuccucaacagguagaauaugcgacaguccucaccgaauccuugauggaaaaaacugcacacugauagaugcucuauugggagacccucauugugauggcuuccaaaauaaggaaugggaccuuuuuguugaacgcagcaaagcuuacagcaacuguuacccuuaugaugugccggauuaugccucccuuaggucacuaguugccucauccggcacccuggaguuuaacaaugaaagcuucaauuggacuggagucgcccagaauggaacaagcuaugcuugcaaaaggagaucuguuaaaaguuucuuuaguagauugaauugguugcacaaauuagaauacaaauauccagcacugaacgugacuaugccaaacaaugacaaauuugacaaauuguacauuugggggguucaccacccgaguacggacagugaccaaaccagccuauauguucaagcaucagggagagucacagucucuaccaaaagaagccaacaaacuguaaucccgaauaucggaucuagacccuggguaaggggugucuccagcagaauaagcauauauuggacaauaguaaaaccgggagacauacuuuugauuaacagcacagggaaucuaauugcuccucgggguuacuucaaaauacgaagugggaaaagcucaauaaugaggucagaugcacccauugacaacugcaauucugaaugcaucacuccaaauggaagcauucccaaugacaaaccauuucaaaauguaaacaggaucacauauggggccugucccagauauguuaagcaaaacacucugaaauuggcaacagggaugcggaauguaccagagaaacaaacuagaggcauauucggcgcaaucgcagguuucauagaaaaugguugggagggaaugguagacgguugguacgguuucaggcaucaaaauucugagggcacaggacaagcagcagaucuuaaaagcacucaagcagcaaucaaccaaaucaacgggaaacugaauagguuaaucgagaaaacgaacgagaaauuccaucaaauugaaaaagaauucucagaaguagaagggagaauucaggaccuagagaaauauguugaagacacuaaaauagaucucuggucguacaacgcggagcuucuuguugcccuggagaaccaacauacaauugaucuaacugacucagaaaugaacaaacuguuugaaagaacaaggaagcaacugagggaaaaugcugaggacaugggcaaugguugcuucaaaauauaccacaaaugugacaaugccugcauagggucaaucagaaauggaacuuaugaccaugauguauacagagacgaagcauuaaacaaccgguuccagaucaaagguguugagcugaagucaggauacaaagauuggauccuauggauuuccuuugccauaucauguuuuuugcuuuguguuguuuugcugggguucaucaugugggccugccaaaaaggcaacauuaggugcaacauuugcauuuga

SEQ ID NO: 32796 - RNA, 1701 nt, Artificial Sequence
  derived and/or modified CDS sequence (wt) from hemagglutinin__InfluenzaA__ABD77895
augaagacuauuauugcuuugagcuacauuuuaugucugguuuucgcucaaaaacuucccggaaaugacaacagcacggcaacgcugugccugggacaccaugcagugccaaacggaacgcuagugaaaacaaucacgaaugaccaaauugaagugacuaaugcuacugagcugguucagaguuccucaacagguagaauaugcgacaguccucaccgaauccuugauggaaaaaacugcacacugauagaugcucuauugggagacccucauugugauggcuuccaaaauaaggaaugggaccuuuuuguugaacgcagcaaagcuuacagcaacuguuacccuuaugaugugccggauuaugccucccuuaggucacuaguugccucauccggcacccuggaguuuaacaaugaaagcuucaauuggacuggagucgcccagaauggaacaagcuaugcuugcaaaaggagaucuguuaaaaguuucuuuaguagauugaauugguugcacaaauuagaauacaaauauccagcacugaacgugacuaugccaaacaaugacaaauuugacaaauuguacauuugggggguucaccacccgaguacggacagugaccaaaccagccuauauguucaagcaucagggagagucacagucucuaccaaaagaagccaacaaacuguaaucccgaauaucggaucuagacccuggguaagggguaucuccagcagaauaagcauauauuggacaauaguaaaaccgggagacauacuuuugauuaacagcacagggaaucuaauugcuccucgggguuacuucaaaauacgaagugggaaaagcucaauaaugaggucagaugcacccauugacaacugcaauucugaaugcaucacuccaaauggaagcauucccaaugacaaaccauuucaaaauguaaacaggaucacauauggggccugucccagauauguuaagcaaaacacucugaaauuggcaacagggaugcggaauguaccagagaaacaaacuagaggcauauucggcgcaaucgcagguuucauagaaaaugguugggagggaaugguagacgguugguacgguuucaggcaucaaaauucugagggcacaggacaagcagcagaucuuaaaagcacucaagcagcaaucaaccaaaucagcgggaaacugaauagguuaaucgagaaaacgaacgagaaauuccaucaaaucgaaaaagaauucucagaaguagaagggagaauucaggaccucgagaaauauguugaagacacuaaaauagaucucuggucguacaacgcggagcuucuuguugcccuggagaaccaacauacaauugaucuaacugacucagaaaugaacaaacuguuugaaagaacaaggaagcaacugagggaaaaugcugaggacaugggcaaugguugcuucaaaauauaccacaaaugugacaaugccugcauagggucaaucagaaauggaacuuaugaccaugauguauacagagacgaagcauuaaacaaccgguuccagaucaaagguguugagcugaagucaggauacaaagauuggauccuauggauuuccuuugccauaucauguuuuuugcuuuguguuguuuugcugggguucaucaugugggccugccaaaaaggcaacauuaggugcaacauuugcauuuga

SEQ ID NO: 32797 - RNA, 1701 nt, Artificial Sequence
  derived and/or modified CDS sequence (wt) from hemagglutinin__InfluenzaA__ABD77906
augaagacuauuauugcuuugagcuacauuuuaugucugguuuucgcucaaaaacuucccggaaaugacaacagcacggcaacgcugugccugggacaccaugcagugccaaacggaacgcuagugaaaacaaucacgaaugaccaaauugaagugacuaaugcuacugagcuuguucaggguuccucaacagguagaauaugcgacaguccucaccgaauccuugauggaaaaaacugcacacugauagaugcucuauugggagacccucauugugauggcuuccaaaauaaggaaugggaccuuuuuguugaacgcagcaaagcuuacagcaacuguuacccuuaugaugugccggauuaugccucccuuaggucacuaguugccucauccggcacccuggaguuuaacaaugaaagcuucaauuggacuggagucgcccagaauggaacaagcuaugcuugcaaaaggagaucuguuaaaaguuucuuuaguagauugaauugguugcacaaauuagaauacaaauauccagcacugaacgugacuaugccaaacaaugacaaauuugacaaauuguacauuugggggguucaccacccgaguacggacagugaccaaaccagccuauauguucaagcaucagggagagucacagucucuaccaaaagaagccaacaaacuguaaucccgaauaucggaucuagacccuggguaaggggugucuccagcagaauaagcauauauuggacaauaguaaaaccgggagacauacuuuugauuaacagcacagggaaucuaauugcuccucgggguuacuucaaaauacgaagugggaaaagcucaauaaugaggucagaugcacccauugacaacugcaauucugaaugcaucacuccaaauggaagcauucccaaugacaaaccauuucaaaauguaaacaggaucacauauggggccugucccagauauguuaagcaaaacacucugaaauuggcaacagggaugcggaauguaccagagaaacaaacuagaggcauauucggcgcaaucgcagguuucauagaaaaugguugggagggaaugguagacgguugguacgguuucaggcaucaaaauucugagggcacaggacaagcagcagaucuuaaaagcacucaagcagcaaucaaccaaaucaacgggaaacugaauagguuaaucgagaaaacgaacgagaaauuccaucaaauugaaaaagaauucucagaaguagaagggagaauucaggaccucgagaaauauguugaagacacuaaaauagaucucuggucguacaacgcggagcuucuuguugcccuggagaaccaacauacaauugaucuaacugacucagaaaugaacaaacuguuugaaagaacaaggaagcaacugagggaaaaugcugaggacaugggcaaugguugcuucaaaauauaucacaaaugugacaaugccugcauagggucaaucagaaauggaacuuaugaccaugauguauacagagacgaagcauuaaacaaccgguuccagaucaaagguguugagcugaagucaggauacaaagauuggauccuauggauuuccuuugccauaucauguuuuuugcuuuguguuguuuugcugggguucaucaugugggccugccaaaaaggcaacauuaggugcaacauuugcauuuga

SEQ ID NO: 32798 - RNA, 1698 nt, Artificial Sequence
  derived and/or modified CDS sequence (wt) from hemagglutinin__InfluenzaA__ABD77917
augaaaguaaaacuacugguccuguuauguacauuuacagcuacauaugcagacacaauauguauaggguaccaugccaacaacucaaccgacacuguugacacaguacuugagaagaaugugacagugacacacucugucaaccuacuugaggacagucacaauggaaaacuaugucuacuaaaaggaauagccccacuacaauuggguaauugcagcguugccggauggaucuuaggaaacccagaaugcgaauuacugauuuccaaggaaucaugguccuacauuguagaaacaccaaauccugagaauggaacauguuacccaggguauuucgccgacuaugaggaacugagggagcaauugaguucaguaucuucauuugagagauucgaaauauuccccaaagaaagcucauggcccaaccacaccguaaccggaguaucagcaucaugcucccauaaugggaaaagcaguuuuuacagaaauuugcuauggcugacggggaagaaugguuuguacccaaaccugagcaaguccuaugcaaacaacaaagagaaagaaguccuuguacuaugggguguucaucacccgccuaacauagggaaccaaaaggcccucuaucauacagaaaaugcuuaugucucuguagugucuucacauuauagcagaagauucaccccagaaauagccaaaagacccaaaguaagagaucaggaaggaagaaucaacuacuacuggacucugcuggaacccggggauacaauaauauuugaggcaaauggaaaucuaauagcgccacgguaugcuuucgcacugaguagaggcuuuggaucaggaaucaucaccucaaaugcaccaauggaugaaugugaugcgaagugucaaacaccucagggagcuauaaacagcagucuuccuuuccagaacguacacccagucacaauaggagaguguccaaaguaugucaggagugcaaaauuaaggaugguuacaggacuaaggaacaucccauccauucaauccagagguuuguuuggagccauugccgguuucauugaagggggguggacuggaaugguagaugggugguaugguuaucaucaucagaaugagcaaggaucuggcuaugccgcagaucaaaaaagcacacaaaaugccauuaacgggauuacaaacaaggugaauucuguaauugagaaaaugaacacucaauucacagcugugggcaaagaauucaacaaauuggaaagaaggauggaaaacuuaaauaaaaaaguugaugauggguuucuagacauuuggacauauaaugcagaauuguugguucuacuggaaaaugaaaggacuuuggauuuccaugacuccaaugugaagaaucuguaugagaaaguaaaaagccaauuaaagaauaaugccaaagaaauaggaaacggguguuuugaauucuaucacaaguguaacaaugaaugcauggagagugugaaaaauggaacuuaugacuauccaaaauauuccgaagaaucaaaguuaaacagggagaaaauugauggagugaaauuggaaucaaugggagucuaucagauucuggcgaucuacucaacugucgccaguucccugguucuuuuggucucccugggggcaaucagcuucuggauguguuccaaugggucuuugcaguguagaauaugcaucuga

SEQ ID NO: 32799 - RNA, 1698 nt, Artificial Sequence
  derived and/or modified CDS sequence (wt) from hemagglutinin__InfluenzaA__ABD77928
augaaaguaaaacuacugguccuguuauguacauuuacagcuacauaugcagacacaauauguauaggguaccaugccaacaacucaaccgacacuguugacacaguacuugagaagaaugugacagugacacacucugucaaccuacuugaggacagucacaauggaaaacuaugucuacuaaaaggaauagccccacuacaauuggguaauugcagcguugccggauggaucuuaggaaacccagaaugcgaauuacugauuuccaaggaaucaugguccuacauuguagaaacaccaaauccugagaauggaacauguuacccaggguauuucgccgacuaugaggaacugagggagcaauugaguucaguaucuucauuugagagauucgaaauauuccccaaagaaagcucauggcccaaccacaccguaaccggaguaucagcaucaugcucccauaaugggaaaagcaguuuuuacagaaauuugcuauggcugacggggaagaaugguuuguacccaaaccugagcaaguccuaugcaaacaacaaagagaaaaaaguccuuguacuaugggguguucaucacccgccuaacauaggggaccaaaaggcccucuaucauacagaaaaugcuuaugucucuguagugucuucacauuauagcagaagauucaccccagaaauagccaaaagacccaaaguaagagaucaggaaggaagaaucaacuacuacuggacucugcuggaacccggggauacaauaauauuugaggcaaauggaaaucuaauagcgccacgguaugcuuucgcacugaguagaggcuuuggaucaggaaucaucaccucaaaugcaccaauggaugaaugugaugcgaagugucaaacaccucagggagcuauaaacagcagucuuccuuuccagaacguacacccagucacaauaggagaguguccaaaguaugucaggagugcaaaauuaaggaugguuacaggacuaaggaacaucccauccauucaauccagagguuuguuuggagccauugccgguuucauugaagggggguggacuggaaugguagaugggugguaugguuaucaucaucagaaugagcaaggaucuggcuaugccgcagaucaaaaaagcacacaaaaugccauuaacgggauuacaaacaaggugaauucuguaauugagaaaaugaacacucaauucacagcugugggcaaagaauucaacaaauuggaaagaaggauggaaaacuuaaauaaaaaaguugaugauggguuucuagacauuuggacauauaaugcagaauuguugguucuacuggaaaaugaaaggacuuuggauuuccaugacuccaaugugaagaaucuguaugagaaaguaaaaagccaauuaaagaauaaugccaaagaaauaggaaacggguguuuugaauucuaucacaaguguaacaaugaaugcauggagagugugaaaaauggaacuuaugacuauccaaaauauuccgaagaaucaaaguuaaacagggagaaaauugauggagugaaauuggaaucaaugggagucuaucagauucuggcgaucuacucaacugucgccaguucccugguucuuuuggucucccugggggcaaucagcuucuggauguguuccaaugggucuuugcaguguagaauaugcaucuga

SEQ ID NO: 32800 - RNA, 1698 nt, Artificial Sequence
  derived and/or modified CDS sequence (wt) from hemagglutinin__InfluenzaA__ABD77939
augaaaguaaaacuacugguccuguuauguacauuuacagcuacauaugcagacacaauauguauaggguaccaugccaacaacucaaccgacacuguugacacagugcuugagaagaaugugacagugacacacucugucaaccuacuugaggacagucacaauggaaaacuaugucuacuaaaaggaauagccccacuacaauuggguaauugcagcguugccggauggaucuuaggaaacccagaaugcgaauuacugauuuccaaggaaucaugguccuacauuguagaaacaccaaauccugagaauggaacauguuacccaggguauuucgccgacuaugaggaacugagggagcaauugaguucaguaucuucauuugagagauucgaaauauuccccaaagaaagcucauggcccaaccacaccguaaccggaguaucagcaucaugcucccauaaugggaaaagcaguuuuuacagaaauuugcuauggcugacggggaagaaugguuuguacccaaaccugagcaaguccuaugcaaacaacaaagagaaagaaguccuuguacuaugggguguucaucacccgccuaacauaggggaccaaagggcccucuaucauacagaaaaugcuuaugucucuguagugucuucacauuauagcagaagauucaccccagaaauagccaaaagacccaaaguaagagaucaggaaggaagaaucaacuacuacuggacucugcuggaacccggggauacaauaauauuugaggcaaauggaaaucuaauagcgccacgguaugcuuucgcacugaguagaggcuuuggaucaggaaucaucaccucaaaugcaccaauggaugaaugugaugcgaagugucaaacaccucagggagcuauaaacagcagucuuccuuuccagaacguacacccagucacaauaggagaguguccaaaguaugucaggagugcaaaauuaaggaugguuacaggacuaaggaacaucccauccauucaauccagagguuuguuuggagccauugccgguuucauugaagggggguggacuggaaugguagaugggugguaugguuaucaucaucagaaugagcaaggaucuggcuaugccgcagaucaaaaaagcacacaaaaugccauuaacgggauuacaaacaaggugaauucuguaauugagaaaaugaacacucaauucacagcugugggcaaagaauucaacaaauuggaaagaaggauggaaaacuuaaauaaaaaaguugaugauggguuucuagacauuuggacauauaaugcagaauuguugguucuacuggaaaaugaaaggacuuuggauuuccaugacuccaaugugaagaaucuguaugagaaaguaaaaagccaauuaaagaauaaugccaaagaaauaggaaacggguguuuugaauucuaucacaaguguaacaaugaaugcauggagagugugaaaaauggaacuuaugacuauccaaaauauuccgaagaaucaaaguuaaacagggagaaaauugauggagugaaauuggaaucaaugggagucuaucagauucuggcgaucuacucaacugucgccaguucccugguucuuuuggucucccugggggcaaucagcuucuggauguguuccaaugggucuuugcaguguagaauaugcaucuga

SEQ ID NO: 32801 - RNA, 1698 nt, Artificial Sequence; identical to SEQ ID NO: 32754
  derived and/or modified CDS sequence (wt) from hemagglutinin__InfluenzaA__ABD77950

SEQ ID NO: 32802 - RNA, 1698 nt, Artificial Sequence
  derived and/or modified CDS sequence (wt) from hemagglutinin__InfluenzaA__ABD77961
augaaaguaaaacuacugguccuguuauguacauuuacagcuacauaugcagacacaauauguauaggguaccaugccaacaacucaaccgacacuguugacacaguacuugagaagaaugugacagugacacacucugucaaccuacuugaggacagucacaauggaaaacuaugucuacuaaaaggaauagccccacuacaauuggguaauugcagcguugccggauggaucuuaggaaacccagaaugcgaauuacugauuuccaaggaaucaugguccuacauuguagaaacaccaaauccugagaauggaacauguuacccaggguauuucgccgacuaugaggaacugagggagcaauugaguucaguaucuucauuugagagauucgaaauauuccccaaagaaagcucauggcccaaccacaccguaaccggaguaucagcaucaugcucccauaaugggaaaagcaguuuuuacagaaauuugcuauggcugacggggaagaaugguuuguacccaaaccugagcaaguccuaugcaaacaacaaagagaaagaaguccuuguacuaugggguguucaucacccgcccaacauaggggaccaaaaggcccucuaucauacagaaaaugcuuaugucucuguagugucuucacauuauagcagaagauucaccccagaaauagccaaaagacccaaaguaagagaucaggaaggaagaaucaacuacuacuggacucugcuggaacccggggauacaauaauauuugaggcaaauggaaaucuaauagcgccacgguaugcuuucgcacugaguagaggcuuuggaucaggaaucaucaccucaaaugcaccaauggaugaaugugaugcgaagugucaaacaccucagggagcuauaaacagcagucuuccuuuccagaacguacacccagucacaauaggagaguguccaaaguaugucaggagugcaaaauuaaggaugguuacaggacuaaggaacaucccauccauucaauccagagguuuguuuggagccauugccgguuucauugaagggggguggacuggaaugguagaugggugguaugguuaucaucaucagaaugagcaaggaucuggcuaugccgcagaucaaaaaagcacacaaaaugccauuaacgggauuacaaacaaggugaauucuguaauugagaaaaugaacacucaauucacagcugugggcaaagaauucaacaaauuggaaagaaggauggaaaacuuaaauaaaaaaguugaugauggguuucuagacauuuggacauauaaugcagaauuguugguucuacuggaaaaugaaaggacuuuggauuuccaugacuccaaugugaagaaucuguaugagaaaguaaaaagccaauuaaagaauaaugccaaagaaauaggaaacggguguuuugaauucuaucacaaguguaacaaugaaugcauggagagugugaaaaauggaacuuaugacuauccaaaauauuccgaagaaucaaaguuaaacagggagaaaauugauggagugaaauuggaaucaaugggagucuaucagauucuggcgaucuacucaacugucgccaguucccugguucuuuuggucucccugggggcaaucagcuucuggauguguuccaaugggucuuugcaguguagaauaugcaucuga

SEQ ID NO: 32803 - RNA, 1698 nt, Artificial Sequence
  derived and/or modified CDS sequence (wt) from hemagglutinin__InfluenzaA__ABD77983
augaaaguaaaacuacugguccuguuauguacauuuacagcuacauaugcagacacaauauguauaggguaccaugccaacaacucaaccgacacuguugacacaguacuugagaagaaugugacagugacacacucugucaaccuacuugaggacagucacaauggaaaacuaugucuacuaaaaggaauagccccacuacaauuggguaauugcagcguugccggauggaucuuaggaaacccagaaugcgaauuacugauuuccaaggaaucaugguccuacauuguagaaacaccaaauccugagaauggaacauguuacccaggguauuucgccgacuaugaggaacugagggagcaauugaguucaguaucuucauuugagagauucgaaauauuccccaaagaaagcucauggcccaaccacaccguaaccggaguaucagcaucaugcucccauaaugggaaaagcaguuuuuacagaaauuugcuauggcugacggggaagaaugguuuguacccaaaccugagcaaguccuaugcaaacaacaaagagaaagaaguccuuguacuaugggguguucaucacccgccuaacauaggggaccaaagggcccucuaucauacagaaaaugcuuaugucucuguagugucuucacauuauagcagaagauucaccccagaaauagccaaaagacccaaaguaagagaucaggaaggaagaaucaacuacuacuggacucugcuggaaccuggggauacaauaauauuugaggcaaauggaaaucuaauagcgccacgguaugcuuucgcacugaguagaggcuuuggaucaggaaucaucaccucaaaugcaccaauggaugaaugugaugcgaagugucaaacaccucagggagcuauaaacagcagucuuccuuuccagaacguacacccagucacaauaggagaguguccaaaguaugucaggagugcaaaauuaaggaugguuacaggacuaaggaacaucccauccauucaauccagagguuuguuuggagccauugccgguuucauugaagggggguggacuggaaugguagaugggugguaugguuaucaucaucagaaugagcaaggaucuggcuaugccgcagaucaaaaaagcacacaaaaugccauuaacgggauuacaaacaaggugaauucuguaauugagaaaaugaacacucaauucacagcugugggcaaagaauucaacaaauuggaaagaaggauggaaaacuuaaauaaaaaaguugaugauggguuucuagacauuuggacauauaaugcagaauuguugguucuacuggaaaaugaaaggacuuuggauuuccaugacuccaaugugaagaaucuguaugagaaaguaaaaagccaauuaaagaauaaugccaaagaaauaggaaacggguguuuugaauucuaucacaaguguaacaaugaaugcauggagagugugaaaaauggaacuuaugacuauccaaaauauuccgaagaaucaaaguuaaacagggagaaaauugauggagugaaauuggaaucaaugggagucuaucagauucuggcgaucuacucaacugucgccaguucccugguucuuuuggucucccugggggcaaucagcuucuggauguguuccaaugggucuuugcaguguagaauaugcaucuga

SEQ ID NO: 32804 - RNA, 1698 nt, Artificial Sequence; identical to SEQ ID NO: 32754
  derived and/or modified CDS sequence (wt) from hemagglutinin__InfluenzaA__ABD77994

SEQ ID NO: 32805 - RNA, 1698 nt, Artificial Sequence; identical to SEQ ID NO: 32753
  derived and/or modified CDS sequence (wt) from hemagglutinin__InfluenzaA__ABD78005

SEQ ID NO: 32806 - RNA, 1698 nt, Artificial Sequence; identical to SEQ ID NO: 32753
  derived and/or modified CDS sequence (wt) from hemagglutinin__InfluenzaA__ABD78016

SEQ ID NO: 32807 - RNA, 1698 nt, Artificial Sequence; identical to SEQ ID NO: 32754
  derived and/or modified CDS sequence (wt) from hemagglutinin__InfluenzaA__ABD78027

SEQ ID NO: 32808 - RNA, 1698 nt, Artificial Sequence
  derived and/or modified CDS sequence (wt) from hemagglutinin__InfluenzaA__ABD78038
augaaaguaaaacuacugguccuguuauguacauuuacagcuacauaugcagacacaauauguauaggguaccaugccaacaacucaaccgacacuguugacacaguacuugagaagaaugugacagugacacacucugucaaccuacuugaggacagucacaauggaaaacuaugucuacuaaaaggaauagccccacuacaauuggguaauugcagcguugccggauggaucuuaggaaacccagaaugcgaauuacugauuuccaaggaaucaugguccuacauuguagaaacaccaaauccugagaauggaacauguuacccaggguauuucgccgacuaugaggaacugagggagcaauugaguucaguaucuucauuugagagauucgaaauauuccccaaagaaagcucauggcccaaccacaccguaaccggaguaucagcaucaugcucccauaaugggaaaagcaguuuuuacagaaauuugcuauggcugacggggaagaaugguuuguacccaaaccugagcaaguccuaugcaaacaacaaagagaaagaaguccuuguacuaugggguguucaucacccgccuaacauaggggaccaaagggcccucuaucauacagaaaaugcuuaugucucuguagugucaucacauuauagcagaagauucaccccagaaauagccaaaagacccaaaguaagagaucaggaaggaagaaucaacuacuacuggacucugcuggaacccggggauacaauaauauuugaggcaaauggaaaucuaauagcgccacgguaugcuuucgcacugaguagaggcuuuggaucaggaaucaucaccucaaaugcaccaauggaugaaugugaugcgaagugucaaacaccucagggagcuauaaacagcagucuuccuuuccagaacguacacccagucacaauaggagaguguccaaaguaugucaggagugcaaaauuaaggaugguuacaggacuaaggaacaucccauccauucaauccagagguuuguuuggagccauugccgguuucauugaagggggguggacuggaaugguagaugggugguaugguuaucaucaucagaaugagcaaggaucuggcuaugccgcagaucaaaaaagcacacaaaaugccauuaacgggauuacaaacaaggugaauucuguaauugagaaaaugaacacucaauucacagcugugggcaaagaauucaacaaauuggagagaaggauggaaaacuuaaauaaaaaaguugaugauggguuucuagacauuuggacauauaaugcagaauuguugguucuacuggaaaaugaaaggacuuuggauuuccaugacuccaaugugaagaaucuguaugagaaaguaaaaagccaauuaaagaauaaugccaaagaaauaggaaacggguguuuugaauucuaucacaaguguaacaaugaaugcauggagagugugaaaaauggaacuuaugacuauccaaaauauuccgaagaaucaaaguuaaacagggagaaaauugauggagugaaauuggaaucaaugggagucuaucagauucuggcgaucuacucaacugucgccaguucccugguucuuuuggucucccugggggcaaucagcuucuggauguguuccaaugggucuuugcaguguagaauaugcaucuga

SEQ ID NO: 32809 - RNA, 1701 nt, Artificial Sequence; identical to SEQ ID NO: 32790
  derived and/or modified CDS sequence (wt) from hemagglutinin__InfluenzaA__ABD78049

SEQ ID NO: 32810 - RNA, 1698 nt, Artificial Sequence
  derived and/or modified CDS sequence (wt) from hemagglutinin__InfluenzaA__ABD78060
augaaagcaaaacuacugguccuguuauguacauuuacagcuacauacgcagacacaauauguauaggcuaccaugccaacaacucaaccgacacuguugacacaguacuugagaagaaugugacagugacacacucugucaaccuacuugaggacagucacaauggaaaacuaugucuacuaaaaggaauagccccacuacaauuggguaauugcagcguugccggauggaucuuaggaaacccagaaugcgaauuacugauuuccaaggaaucaugguccuacauuguagaaacaccaaaucccgagaauggaacauguuacccaggguauuucgccgacuaugaggaacugagggagcaauugaguucaguaucuucauuugagagauucgaaauauuccccaaaggaagcucauggcccaaccacaccguaaccggaguaucagcaucaugcucccauaaugggaaaagcaguuuuuacagaaauuugcuauggcugacggggaagaaugguuuguacccaaaccugagcauguccuauguaaacaacaaagagaaagaaguccuugugcuaugggguguucaucacccaccuaacauaggggaccaaagggcccucuaccauacagaaaaugcuuaugucucuguagugucuucacauuauagcagaagauucaccccagaaauagccaaaagacccaaaguaagagaucaggaaggaagaaucaacuacuacuggacucugcuggaacccggggacacaauaauauuugaggcaaauggaaaucuaauagcgccaugguaugcuuucgcacugaguagaggcuuuggaucaggaaucaucaccucaaaugcaccaauggaugaaugugaugcgaagugucaaacaccucagggagcuauaaacaguagucuuccuuuccagaauguacacccaguuacaauaggagaguguccaaaguaugucaggagugcaaaauuaaggaugguuacaggacuaaggaacaucccauccauucaauccagagguuuguuuggagccauugccgguuucauugaagggggguggacuggaaugguagaugggugguaugguuaucaucaucagaaugagcaaggaucuggcuaugcugcagaucaaaaaagcacacaaaaugccauuaacgggauuacaaacaaggugaauucuguaauugagaaaaugaacacucaauucacagcugugggcaaagaauucaacaaauuagaaagaaggauggaaaacuuaaauaaaaaaguugaugauggguuucuagacauuuggacauauaaugcagaauuguugguucuacuggaaaaugaaaggacuuuggauuuccaugacuccaaugugaagaaucuguaugagaaaguaaaaagccaauuaaagaauaaugccaaagaaauaggaaacggguguuuugaauucuaucacaaguguaacaaugaaugcauggaaagugugaaaaauggaacuuaugacuauccaaaauauuccgaagaaucaaaguuaaacagggagaaaauugauggaguaaaauuggaaucaaugggaguauaucagauucuggcgaucuacucaacugucgccaguucccugguucuuuuggucucccugggggcaaucagcuucuggauguguuccaaugggucuuugcaguguagaauaugcaucuga

SEQ ID NO: 32811 - RNA, 1698 nt, Artificial Sequence
  derived and/or modified CDS sequence (wt) from hemagglutinin__InfluenzaA__ABD78071
augaaagcaaaacuacugguccuguuauguacauuuacagcuacauacgcagacacaauauguauaggcuaccaugccaacaacucaaccgacacuguugacacaguacuugagaagaaugugacagugacacacucugucaaccuacuugaggacagucacaauggaaaacuaugucuacuaaaaggaauagccccacuacaauuggguaauugcagcguugccggauggaucuuaggaaacccagaaugcgaauuacugauuuccaaggaaucaugguccuacauuguagaaacaccaaaucccgagaauggaacauguuacccaggguauuucgccgacuaugaggaacugagggagcaauugaguucaguaucuucauuugagagauucgaaauauuccccaaaggaagcucauggcccaaccacaccgugaccggaguaucagcaucaugcucccauaaugggaaaagcaguuuuuacagaaauuugcuauggcugacggggaagaaugguuuguacccaaaccugagcauguccuauguaaacaacaaagagaaagaaguccuugugcuaugggguguucaucacccaccuaacauaggggaccaaagggcccucuaccauacagaaaaugcuuaugucucuguagugucuucacauuauagcagaagauucaccccagaaauagccaaaagacccaaaguaagagaucaggaaggaagaaucaacuacuacuggacucugcuggaacccggggacacaauaauauuugaggcaaauggaaaucuaauagcgccaugguaugcuuucgcacugaguggaggcuuuggaucaggaaucaucaccucaaaugcaccaaugggugaaugugaugcgaagugucaaacaccucagggagcuauaaacaguagucuuccuuuccagaauguacacccaguuacaauaggagaguguccaaaguaugucaggagugcaaaauuaaggaugguuacaggacuaaggaacaucccauccauucaauccagagguuuguuuggagccauugccgguuucauugaagggggguggacuggaaugguagaugggugguaugguuaucaucaucagaaugagcaaggaucuggcuaugcugcagaucaaaaaagcacacaaaaugccauuaacgggauuacaaacaaggugaauucuguaauugagaaaaugaacacucaauucacagcugugggcaaagaauucaacaaauuagaaagaaggauggaaaacuuaaauaaaaaaguugaugauggguuucuagacauuuggacauauaaugcagaauuguugguucuacuggaaaaugaaaggacuuuggauuuccaugacuccaaugugaagaaucuguaugagaaaguaaaaagccaauuaaagaauaaugccaaagaaauaggaaacggguguuuugaauucuaucacaaguguaacaaugaaugcauggaaagugugaaaaauggaacuuaugacuauccaaaauauuccgaagaaucaaaguuaaacagggagaaaauugauggaguaaaauuggaaucaaugggagucuaucagauucuggcgaucuacucaacugucgccaguucccugguucuuuuggucucccugggggcaaucagcuucuggauguguuccaaugggucuuugcaguguagaauaugcaucuga

SEQ ID NO: 32812 - RNA, 1698 nt, Artificial Sequence
  derived and/or modified CDS sequence (wt) from hemagglutinin__InfluenzaA__ABD78093
augaaagcaaaacuacugguccuguuauguacauuuacagcuacauacgcagacacaauauguauaggcuaccaugccaacaacucaaccgacacuguugacacaguacuugagaagaaugugacagugacacacucugucaaccuacuugaggacagucacaauggaaaacuaugucuacuaaaaggaauagccccacuacaauuggguaauugcagcguugccggauggaucuuaggaaacccagaaugcgaauuacugauuuccaaggaaucaugguccuacauuguagaaacaccaaaucccgagaauggaacauguuacccaggguauuucgccgacuaugaggaacugagggagcaauugaguucaguaucuucauuugagagauucgaaauauuccccaaaggaagcucauggcccaaccacaccgugaccggaguaucagcaucaugcucccauaaugggaaaagcaguuuuuacagaaauuugcuauggcugacggggaagaaugguuuguacccaaaccugagcauguccuauguaaacaacaaagagaaagaaguccuugugcuaugggguguucaucacccaccuaacauaggggaccaaagggcccucuaccauacagaaaaugcuuaugucucuguagugucuucacauuauagcagaagauucaccccagaaauagccaaaagacccaaaguaagagaucaggaaggaagaaucaacuacuacuggacucugcuggaacccggggacacaauaauauuugaggcaaauggaaaucuaauagcgccaugguaugcuuucgcacugaguagaggcuuuggaucaggaaucaucaccucaaaugcaccaaugggugaaugugaugcgaagugucaaacaccucagggagcuauaaacaguagucuuccuuuccagaauguacacccaguuacaauaggagaguguccaaaguaugucaggagugcaaaauuaaggaugguuacaggacuaaggaacaucccauccauucaauccagagguuuguuuggagccauugccgguuucauugaagggggguggacuggaaugguagaugggugguaugguuaucaucaucagaaugagcaaggaucuggcuaugcugcagaucaaaaaagcacacaaaaugccauuaacgggauuacaaacaaggugaauucuguaauugagaaaaugaacacucaauucacagcugugggcaaagaauucaacaaauuagaaagaaggauggaaaacuuaaauaaaaaaguugaugauggguuucuagacauuuggacauauaaugcagaauuguugguucuacuggaaaaugaaaggacuuuggauuuccaugacuccaaugugaagaaucuguaugagaaaguaaaaagccaauuaaagaauaaugccaaagaaauaggaaacggguguuuugaauucuaucacaaguguaacaaugaaugcauggaaagugugaaaaauggaacuuaugacuauccaaaauauuccgaagaaucaaaguuaaacagggagaaaauugauggaguaaaauuggaaucaaugggagucuaucagauucuggcgaucuacucaacugucgccaguucccugguucuuuuggucucccugggggcaaucagcuucuggauguguuccaaugggucuuugcaguguagaauaugcaucuga

SEQ ID NO: 32813 - RNA, 1701 nt, Artificial Sequence
  derived and/or modified CDS sequence (wt) from hemagglutinin__InfluenzaA__ABD78115
augaagacuaucauugcuuugagcuacauuuuaugucugguuuucgcucaaaaacuucccggaaaugacaacagcacggcaacgcugugccugggacaccaugcagugccaaacggaacgcuagugaaaacaaucacgaaugaccaaauugaagugacuaaugcuacugagcugguucagaguuccucaacagguagaauaugcgacaguccucaccgaauccuugauggaaaaaacugcacacugauagaugcucuauugggagacccucauugugauggcuuccaaaauaaggaaugggaccuuuuuguugaacgcagcaaagcuuacagcgacuguuacccuuaugaugugccggauuaugcuucccuuaggucacuaguugccucauccggcacccuggaguuuaccaaugaaggcuucaauuggacuggagucgcucaggauggaacaagcuaugcuugcaaaaggggaucuguuaaaaguuucuuuaguagauugaauugguugcacaaauuagaauacaaauauccagcacugaacgugacuaugccaaacaaugacaaauuugacaaauuguacauuugggggguucaccacccgaguacggacagugaccaaaccagccuauauguucaagcaucagggagagucacagucucuaccaaaagaagccaacaaacuguaaucccgaauaucgggucuagacccuggguaaggggggucuccagcagaauaagcaucuauuggacaauaguaaaaccgggagacauacuuuugauuaauagcacagggaaucuaauugccccucgggguuacuucaaaauacgaagugggaaaagcucaauaaugaggucagaugcacccauuggcaacugcaauucugaaugcaucacuccaaauggaagcauucccaaugacaaaccuuuucagaauguaaacaggaucacauauggggccugucccagauauguuaagcaaaacacucugaaauuggcaacagggaugcggaauguaccagagaaacaaacuagaggcauauucggcgcaaucgcagguuucauagaaaaugguugggagggaaugguagacgguugguacgguuucaggcaucaaaauucugagggcacaggacaagcagcagaucuuaaaagcacucaagcagcaaucaaccaaaucaaugggaaacugaauagguuaaucgagaaaacgaacgagaaauuccaucaaaucgaaaaagaauucucagaaguagaagggagaauucaggaccucgagaaauauguugaagacacuaaaauagaucucuggucuuacaacgcagagcuucuuguugcccuggagaaccaacauacaauugaucuaacugacucagaaaugaacaaacuguuugaaagaacaaggaagcaacugagggaaaaugcugaggacaugggcaaugguugcuucaaaauauaccacaaaugugacaaugccugcauagggucaaucagaaauggaacuuaugaccaugauguauacagaaacgaagcauuaaacaaccgguuccagaucaaagguguugagcugaagucaggauacaaagauuggauccuauggauuuccuuugccauaucaugcuuuuugcuuuguguuguuuugcugggguucaucaugugggccugccaaaaaggcaacauuaggugcaacauuugcauuuga

SEQ ID NO: 32814 - RNA, 1701 nt, Artificial Sequence
  derived and/or modified CDS sequence (wt) from hemagglutinin__InfluenzaA__ABD78126
augaagacuaucauugcuuugagcuacauuuuaugucugguuuucgcucaaaaacuucccggaaaugacaacagcacggcaacgcugugccugggacaccaugcagugccaaacggaacgcuagugaaaacaaucacgaaugaccaaauugaagugacuaaugcuacugagcugguucagaguuccucaacagguagaauaugcgacaguccucaccgaauccuugauggaaaaaacugcacacugauagaugcucuauugggagacccucauugugauggcuuccaaaauaaggaaugggaccuuuuuguugaacgcagcaaagcuuacagcgacuguuacccuuaugaugugccggauuaugcuucccuuaggucacuaguugccucauccggcacccuggaguuuaccaaugaaggcuucaauuggacuggagucgcucaggauggaacaagcuaugcuugcaaaaggggaucuguuaaaaguuucuuuaguagauugaauugguugcacaaauuagaauacaaauauccagcacugaacgugacuaugccaaacaaugacaaauuugacaaauuguacauuugggggguucaccacccgaguacggacagugaccaaaccagccuauauguucaagcaucagggagagucacagucucuaccaaaagaagccaacaaacuguaaucccgaauaucgggucuagacccuggguaaggggggucuccagcauaauaagcaucuauuggacaauaguaaaaccgggagacauacuuuugauuaauagcacagggaaucuaauugccccucgggguuacuucaaaauacgaagugggaaaagcucaauaaugaggucagaugcacccauuggcaacugcaauucugaaugcaucacuccaaauggaagcauucccaaugacaaaccuuuucagaauguaaacaggaucacauauggggccugucccagauauguuaagcaaaacacucugaaauuggcaacagggaugcggaauguaccagagaaacaaacuagaggcauauucggcgcaaucgcagguuucauagaaaaugguugggagggaaugguagacgguugguacgguuucaggcaucaaaauucugagggcacaggacaagcagcagaucuuaaaagcacucaagcagcaaucaaccaaaucaaugggaaacugaauagguuaaucgagaaaacgaacgagaaauuccaucaaaucgaaaaagaauucucagaaguagaagggagaauucaggaccucgagaaauauguugaagacacuaaaauagaucucuggucuuacaacgcagagcuucuuguugcccuggagaaccaacauacaauugaucuaacugacucagaaaugaacaaacuguuugaaagaacaaggaagcaacugagggaaaaugcugaggacaugggcaaugguugcuucaaaauauaccacaaaugugacaaugccugcauagggucaaucagaaauggaacuuaugaccaugauguauacagagacgaagcauuaaacaaccgguuccagaucaaagguguugagcugaagucaggauacaaagauuggauccuauggauuuccuuugccauaucaugcuuuuugcuuuguguuguuuugcugggguucaucaugugggccugccaaaaaggcaacauuaggugcaacauuugcauuuga

SEQ ID NO: 32815 - RNA, 1701 nt, Artificial Sequence
  derived and/or modified CDS sequence (wt) from hemagglutinin__InfluenzaA__ABD79032
augaagacuaucauugcuuugagcuacauuuucugucugguucucggccaagacuuuccaggaaaugacaacagcacagcaacgcugugccugggacaucaugcggugccaaacggaacacuagugaaaacaaucacaaaugaucagauugaagugacuaaugcuacugagcugguucagaguuccucaacggggaaaauaugcaacaauccucaucgaauccuugauggaauagacugcacacugauagaugcucuauugggggacccucauugugauggcuuucaaaaugagacaugggaccuuuucguugaacgcagcaaagcuuucagcaacuguuacccuuaugaugugccagauuaugccucccuuaggucacuaguugccucgucaggcacucuggaguuuaucagugaaggcuucacuuggacuggggucacucagaaugggggaagcaaugcuugcaaaaggggaccugauaucgguuuuuucaguagacugaacugguuguacaaaucaggaagcacauauccagugcugaacgugacuaugccaaacaaugacaauuuugacaaacuauacauuugggggguucaccacccgagcacggaccaagaacaaaccagccuauauguucaagcaucagggagagucacagucucuaccaagagaagccagcaaacuauaaucccgaauaucgggucuagacccuggguaaggggucugucuaguagaauaagcaucuauuggacaauaguuaaaccgggagacauacugguaauuaauaguaaugggaaccuaauugcuccucgggguuauuuuaaaaugcgcacugggaaaagcucaauaaugaggucagaugcaccuauuggcaccugcauuucugaaugcaucacuccaaauggaagcauucccaaugacaagcccuuucaaaacguaaacaagaucacauauggggcaugucccaaguauguuaagcaaaacacccugaaguuggcaacagggaugcggaauguaccagagaaacaaacuagaggccuauucagcgcaauagcagguuucauagaaaaugguugggagggaaugauagacgguugguacgguuucaggcaucaaaauucugagggcacaggacaagcagcagaucuuaaaagcacucaagcagccaucgaccaaaucaaugggaaacugaauaggguaaucgagaagacgaacgagaaauuccaucaaaucgaaaaggaauucucagaaguagaagggagaauucaggaccucgagaaauacguugaagacacuaaaauagaucucuggucuuacaaugcggagcuucuugucgcucuggagaaccaacauacaauugaucugacugacucggaaaugaacaaacuguuugaaaaaacaaggaggcaacugagggaaaaugcugaggacaugggcaaugguugcuucaaaauauaccacaaaugugacaaugcuugcauagggucaaucagaaaugggacuuaugaccaugauguauacagagacgaagcauuaaacaaccgguuucagaucaaagguguugaacugaagucaggauacaaagacuggauccuguggauuuccuuugccauaucaugcuuuuugcuuuguguuguuuugcugggguucaucaugugggccugccagaaaggcaacauuaggugcaacauuugcauuuga

SEQ ID NO: 32816 - RNA, 1701 nt, Artificial Sequence
  derived and/or modified CDS sequence (wt) from hemagglutinin__InfluenzaA__ABD79112
augaaagcaaaacuacugauccuguuaugugcacuuucagccacagaugcagacacaauauguauaggcuaccaugcgaacaacucaaccgacacuguugauacaguacucgaaaagaaugugacagugacacacucuguaaaccuacucgaagacagccacaacgggaaauuaugcagauuaaaaggaauagccccacuacaauuggggaaauguaacauugccggauggaucuuaggaaacccagaaugcgaaucacugcuuucuaagagaucaugguccuacauugcagaaacaccaaacucugagaauggagcauguuauccaggagauuucgccgacuaugaggaacugagggagcaauugagcucaguaucaucauucgagagauucgaaauauuccccaagggaagaucauggcccgaacacaacauagacauaggaguaacagcagcaugcucccaugcggggaaaagcaguuuuuacaaaaauuugcucuggcuaacggagaaagauggcucauacccaaaucugaacaaguccuaugugaacaagaaagagaaagaaguccuuauacuaugggguguucaucacccgccuaacauagagaaucaaaagacccucuaucggaaagaaaaugcuuaugucucuguagugucuucaaauuauaacaggagauucaccccggaaauagcagaaagacccaaaguaagaggucaagcagggagaauaaacuauuacuggacuuugcuagaacccggagacacaauaauauuugaggcaaauggaaaucuaauagcgccaugguaugcuuucgcacuaaauagaggcauugggucaggaaucaucaccucaaacgcaucaauggaugaaugugacacaaagugucaaacaccccagggagcuauaaacaguagucucccuuuccagaauauacacccauucacaauaggagagugcccaaaauacgucaggaguaccaaauugaggaugguuacaggacuaaggaacaucccauccauucaauccagaggucuguuuggagccauugccgguuucauugaagggggaugggauggaaugauagauggaugguaugguuaccaucaucagaaugaacagggaucuggcuaugcugcggaucaaaaaagcacacaaaaugccauuaacgggauuacaaauaagguaaacucuguuaucgagaaaaugaacacucaauucacugcuguggguaaagaauucaacaaauuagaaaaaagaauggaaaacuuaaauaaaaaaguugaugauggauuucuggacauuuggacauauaaugcagaauuguugguucuacuggaaaacgaaaggacuuuggauuuccaugacucaaaugugaagaaucuguaugagaaaguaaaaaaccaauuaaggaauaaugccaaagaaauaggaaacggguguuuugaguucuaccacaaguguaacaaugaaugcauggaaaguguaaaaaauggaacuuaugauuacccaaaauuuucagaggaaucaaaguuaaacagggaaaaaauugauggagugaaauuggaaucaaugggggucuaucagauucuggcgaucuacucaacugucgccaguucacuggugcuucuggucucccugggggcaaucagcuucuggauguguucuaaugggucuuugcagugcagaauaugcaucuga

SEQ ID NO: 32817 - RNA, 1701 nt, Artificial Sequence
  derived and/or modified CDS sequence (wt) from hemagglutinin__InfluenzaA__ABD79123
augaagacuaucauugcuuugagcuacauuuuaugucugguuuucgcucaaaaacuucccggaaaugacaacagcacggcaacgcugugccugggacaccaugcagugccaaacggaacgcuagugaaaacaaucacgaaugaccaaauugaagugacuaaugcuacugagcugguucagaguuccucaacagguagaauaugcgacaguccucaccaaauccuugauggaaaaaacugcacacugauagaugcucuauugggagacccucauugugauggcuuccaaaauaaggaaugggaccuuuuuguugaacgcagcacagcuuacagcaacuguuacccuuaugaugugccggauuaugccucccuuaggucacuaguugccucauccggcacccuggaguuuaccaaagaaggcuucaauuggacuggagucgcucaggauggaacaagcuaugcuugcaaaaggggaucuguuaaaaguuucuuuaguagauugaauugguugcacaaauuagaauacaaauauccagcacugaacgugacuaugccaaacaaugacaaauuugacaaauuguacauuugggggguucaccacccgaguacggacagugaccaaaccagccuauauguucaagcaucagggagagucacagucucuaccaaaagaagccaacaaacuguaaucccgaauaucgggucuagacccuggguaaggggugucuccagcagaauaagcaucuauuggacaauaguaaaaccgggagacauacuuuugauuaacagcacagggaaucuaauugcuccucgggguuacuucaaaauacgaagugggaaaagcucaauaaugaggucggaugcacccauugacaacugcaauucugaaugcauuacuccaaauggaagcauuuccaaugacaaaccuuuucaaaauguaaacaggaucacauauggggccugucccagauauguuaagcaaaacacucugaaauuggcaacagggaugcggaauguaccagagaaacaaacuagaggcauauucggcgcaaucgcagguuucauagaaaaugguugggagggaaugguagacgguugguacgguuucaggcaucaaaauucugaaggcacaggacaagcagcagaucuuaaaagcacucaagcagcaaucaaccaaaucaacgggaaacugaauagguuaaucgagaaaacgaacgagaaauuccaucaaaucgaaaaagaauucucagaaguagaagggagaauucaggaccucgagaaauauguugaagacacuaaaauagaucucuggucuuacaacgcggagcuucuuguugcccuggagaaccaacauacaauugaucuaacugacucagaaaugaacaaacuguuugaaagaacaagaaagcaacugagggaaaaugcugaggacaugggcaaugguugcuucagaauauaccacaaaugugacaaugccugcauagggucaaucagaaauggaacuuaugaccaugauguauacagagacgaagcauuaaacaaccgguuccagaucaaagguguugagcugaagucaggauacaaagauuggauccuauggauuuccuuugccauaucaugcuuuuugcuuuguguuguuuugcugggguucauuaugugggccugccaaaaaggcaacauuaggugcaacauuugcauuuga

SEQ ID NO: 32818 - RNA, 1701 nt, Artificial Sequence
  derived and/or modified CDS sequence (wt) from hemagglutinin__InfluenzaA__ABD79134
augaagacuaucauugcuuugagcuacauuuuaugucugguuuucgcucaaaaacuucccggaaaugacaacagcacggcaacgcugugccugggacaccaugcagugccaaacggaacgcuagugaaaacaaucacgaaugaccaaauugaagugacuaaugcuacugagcugguucagaguuccucaacagguagaauaugcgacaguccucaccaaauccuugauggaaaaaacugcacacugauagaugcucuauugggagacccucauugugauggcuuccaaaauaagaaaugggaccuuuuuguugaacgcagcacagcuuacagcaacuguuacccuuaugaugugccggauuaugccucccuuaggucacuaguugccucauccggcacccuggaguuuaccaaagaaggcuucaauuggacuggagucgcucaggauggaacaagcuaugcuugcaaaaggggaucuguuaaaaguuucuuuaguagauugaauugguugcacaaauuagaauacaaauauccagcacugaacgugacuaugccaaacaaugacaaauuugacaaauuguacauuugggggguucaccacccgaguacggacagugaccaaaccagccuauauguucaagcaucagggagagucacagucucuaccaaaagaagccaacaaacuguaaucccgaauaucgggucuagacccuggguaaggggugucuccagcagaauaagcaucuauuggacaauaguaaaaccgggagacauacuuuugauuaacagcacagggaaucuaauugcuccucgggguuacuucaaaauacgaagugggaaaagcucaauaaugaggucggaugcacccauugacaacugcaauucugaaugcauuacuccaaauggaagcauuuccaaugacaaaccuuuucaaaauguaaacaggaucacauauggggccugucccagauauguuaagcaaaacacucugaaauuggcaacagggaugcggaauguaccagagaaacaaacuagaggcauauucggcgcaaucgcagguuucauagaaaaugguugggagggaaugguagacgguugguacgguuucaggcaucaaaauucugaaggcacaggacaagcagcagaucuuaaaagcacucaagcagcaaucaaccaaaucaacgggaaacugaacagguuaaucgagaaaacgaacgagaaauuccaucaaaucgaaaaagaauucucagaaguagaagggagaauucaggaccucgagaaauauguugaagacacuaaaauagaucucuggucuuacaacgcggagcuucuuguugcccuggagaaccaacauacaauugaucuaacugacucagaaaugaacaaacuguuugaaagaacaagaaagcaacugagggaaaaugcugaggacaugggcaaugguugcuucaaaauauaccacaaaugugacaaugccugcauagggucaaucagaaauggaacuuaugaccaugauguauacagagacgaagcauuaaacaaccgguuccagaucaaagguguugagcugaagucaggauacaaagauuggauccuauggauuuccuuugccauaucaugcuuuuugcuuuguguuguuuugcugggguucauuaugugggccugccaaaaaggcaacauuaggugcaacauuugcauuuga

SEQ ID NO: 32819 - RNA, 1701 nt, Artificial Sequence
  derived and/or modified CDS sequence (wt) from hemagglutinin__InfluenzaA__ABD79145
augaagacuaucauugcuuugagcuacauuuuaugucugguuuucgcucaaaaacuucccggaaaugacaacagcacggcaacgcugugccugggacaccaugcagugccaaacggaacgcuagugaaaacaaucacgaaugaccaaauugaagugacuaaugcuacugagcugguucagaguuccucaacagguagaauaugcgacaguccucaccaaauccuugauggaaaaaacugcacacugauagaugcucuauugggagacccucauugugauggcuuccaaaauaaggaaugggaccuuuuuguugaacgcagcacagcuuacagcaacuguuacccuuaugaugugccggauuaugccucccuuaggucacuaguugccucauccggcacccuggaguuuaccaaagaaggcuucaauuggaccggagucgcucaggauggaacaagcuaugcuugcaaaaggggaucuguuaaaaguuucuuuaguagauugaauugguugcacaaauuagaauacaaauauccagcacugaacgugacuaugccaaacaaugacaaauuugacaaauuguacauuugggggguucaccacccgaguacggacagugaccaaaccagccuauauguucaagcaucagggagagucacagucucuaccaaaagaagccaacaaacuguaaucccgaauaucgggucuagacccuggguaaggggugucuccagcagaauaagcaucuauuggacaauaguaaaaccgggagacauacuuuugauuaacagcacagggaaucuaauugcuccucgggguuacuucaaaauacgaagugggaaaagcucaauaaugaggucggaugcacccauugacaacugcaauucugaaugcauuacuccaaauggaagcauuuccaaugacaaaccuuuucaaaauguaaacaggaucacauauggggccugucccagauauguuaagcaaaacacucugaaauuggcaacagggaugcggaauguaccagagaaacaaacuagaggcauauucggcgcaaucgcagguuucauagaaaaugguugggagggaaugguagacgguugguacgguuucaggcaucaaaauucugaaggcacaggacaagcagcagaucuuaaaagcacucaagcagcaaucaaccaaaucaacgggaaacugaauagguuaaucgagaaaacgaacgagaaauuccaucaaaucgaaaaagaauucucagaaguagaagggagaauucaggaccucgagaaauauguugaagacacuaaaauagaucucuggucuuacaacgcggagcuucuuguugcccuggagaaccaacauacaauugaucuaacugacucagaaaugaacaaacuguuugaaagaacaagaaagcaacugagggaaaaugcugaggacaugggcaaugguugcuucaaaauauaccacaaaugugacaaugccugcauagggucaaucagaaauggaacuuaugaccaugauguauacagagacgaagcauuaaacaaccgguuccagaucaaagguguugagcugaagucaggauacaaagauuggauccuauggauuuccuuugccauaucaugcuuuuugcuuuguguuguuuugcugggguucauuaugugggccugccaaaaaggcaacauuaggugcaacauuugcauuuga

SEQ ID NO: 32820 - RNA, 1701 nt, Artificial Sequence
  derived and/or modified CDS sequence (wt) from hemagglutinin__InfluenzaA__ABD79156
augaagacuaucauugcuuugagcuacauuuuaugucugguuuucgcucaaaaacuucccggaaaugacaacagcacggcaacgcugugccugggacaccaugcagugccaaacggaacgcuagugaaaacaaucacgaaugaccaaauugaagugacuaaugcuacugagcugguucagaguuccucaacagguagaauaugcgacaguccucaccaaauccuugauggaaaaaacugcacacugauagaugcucuauugggagacccucauugugauggcuuccaaaauaaggaaugggaccuuuuuguugaacgcagcacagcuuacagcaacuguuacccuuaugaugugccggauuaugccucccuuaggucacuaguugccucauccggcacccuggaguuuaccaaagaaggcuucaauuggacuggagucgcucaggauggaacaagcuaugcuugcaaaaggggaucuguuaaaaguuucuuuaguagauugaauugguugcacaaauuagaauacaaauauccagcacugaacgugacuaugccaaacaaugacaaauuugacaaauuguacauuugggggguucaccacccgaguacggacagugaccaaaccagccuauauguucaagcaucagggagagucacagucucuaccaaaagaagccaacaaacuguaaucccgaauaucgggucuagacccuggguaaggggugucuccagcagaauaagcaucuauuggacaauaguaaaaccgggagacauacuuuugauuaacagcacagggaaucuaauugcuccucgggguuacuucaaaauacgaagugggaaaagcucaauaaugaggucggaugcacccauugacaacugcaauucugaaugcauuacuccaaauggaagcauuuccaaugacaaaccuuuucaaaauguaaacaggaucacauauggggccugucccagauauguuaagcaaaacacucugaaauuggcaacagggaugcggaauguaccagagaaacaaacuagaggcauauucggcgcaaucgcagguuucauagaaaaugguugggagggaaugguagacgguugguacgguuucaggcaucaaaauucugaaggcacaggacaagcagcagaucuuaaaagcacucaagcagcaaucaaccaaaucaacgggaaacugaauagguuaaucgagaaaacgaacgagaaauuccaucaaaucgaaaaagaauucucagaaguagaagggagaauucaggaccucgagaaauauguugaagacacuaaaauagaucucuggucuuacaacgcggagcuucuuguugcccuggagaaccaacauacaauugaucuaacugacucagaaaugaacaaacuguuugaaagaacaagaaagcaacugagggaaaaugcugaggacaugggcaaugguugcuucaaaauauaccacaaaugugacaaugccugcauagggucaaucagaaauggaacuuaugaccaugauguauacagagacgaagcauuaaacaaccgguuccagaucaaagguguugagcugaagucaggauacaaagauuggauccuauggauuuccuuugccauaucaugcuuuuugcuuuguguuguuuugcugggguucauuaugugggccugccaaaaaggcaacauuaggugcaacauuugcauuuga

SEQ ID NO: 32821 - RNA, 1701 nt, Artificial Sequence
  derived and/or modified CDS sequence (wt) from hemagglutinin__InfluenzaA__ABD79167
augaagacuaucauugcuuugagcuacauuuuaugucugguuuucgcucaaaaacuucccggaaaugacaacagcacggcaacgcugugccugggacaccaugcagugccaaacggaacgcuagugaaaacaaucacgaaugaccaaauugaagugacuaaugcuacugagcugguucagaguuccucaacagguagaauaugcgacaguccucaccaaauccuugauggaaaaaacugcacacugauagaugcucuauugggagacccucauugugauggcuuccaaaauaaggaaugggaccuuuuuguugaacgcagcacagcuuacagcaacuguuacccuuaugaugugccggauuaugccucccuuaggucacuaguugccucauccggcacccuggaauuuaccaaagaaggcuucaauuggacuggagucgcucaggauggaacaagcuaugcuugcaaaaggggaucuguuaaaaguuucuuuaguagauugaauugguugcacaaauuagaauacaaauauccagcacugaacgugacuaugccaaacaaugacaaauuugacaaauuguacauuugggggguucaccacccgaguacggacagugaccaaaccagccuauauguucaagcaucagggagagucacagucucuaccaaaagaagccaacaaacuguaaucccgaauaucgggucuagacccuggguaaggggugucuccagcagaauaagcaucuauuggacaauaguaaaaccgggagacauacuuuugauuaacagcacagggaaucuaauugcuccucgggguuacuucaaaauacgaagugggaaaagcucaauaaugaggucggaugcacccauugacaacugcaauucugaaugcauuacuccaaauggaagcauucccaaugacaaaccuuuucaaaauguaaacaggaucacauauggggccugucccagauauguuaagcaaaacacucugaaauuggcaacagggaugcggaauguaccagagaaacaaacuagaggcauauucggcgcaaucgcagguuucauagaaaaugguugggagggaaugguagacgguugguacgguuucaggcaucaaaauucugaaggcacaggacaagcagcagaucuuaaaagcacucaagcagcaaucaaccaaaucaacgggaaacugaauagguuaaucgagaaaacgaacgagaaauuccaucaaaucgaaaaagaauucucagaaguagaagggagaauucaggaccucgagaaauauguugaagacacuaaaauagaucucuggucuuacaacgcggagcuucuuguugcccuggagaaccaacauacaauugaucuaacugacucagaaaugaacaaacuguuugaaagaacaagaaagcaacugagggaaaaugcugaggacaugggcaaugguugcuucaaaauauaccacaaaugugacaaugccugcauagggucaaucagaaauggaacuuaugaccaugauguauacagagacgaagcauuaaacaaccgguuccagaucaaagguguugagcugaagucaggauacaaagauuggauccuauggauuuccuuugccauaucaugcuuuuugcuuuguguuguuuugcugggguucauuaugugggccugccaaaaaggcaacauuagaugcaacauuugcauuuga

SEQ ID NO: 32822 - RNA, 1701 nt, Artificial Sequence; identical to SEQ ID NO: 32820
  derived and/or modified CDS sequence (wt) from hemagglutinin__InfluenzaA__ABD79178

SEQ ID NO: 32823 - RNA, 1701 nt, Artificial Sequence
  derived and/or modified CDS sequence (wt) from hemagglutinin__InfluenzaA__ABD79189
augaagacuaucauugcuuugagcuacauuuuaugucugguuuucgcucaaaaacuucccggaaaugacaacagcacggcaacgcugugccugggacaccaugcagugccaaacggaacgcuagugaaaacaaucacgaaugaccaaauugaagugacuaaugcuacugagcugguucagaguuccucaacagguagaauaugcgacaguccucaccaaauccuugauggaaaaaacugcacacugauagaugcucuauugggagacccucauugugauggcuuccaaaauaaggaaugggaccuuuuuguugaacgcagcacagcuuacagcaacuguuacccuuaugaugugccggauuaugccucccuuaggucacuaguugccucauccggcacccuggaguuuaccaaagaaggcuucaauuggacuggagucgcucaggauggaacaagcuaugcuugcaaaaggggaucuguuaaaaguuucuuuaguagauugaauugguugcacaaauuagaauacaaauauccagcacugaacgugacuaugccaaacaaugacaaauuugacaaauuguacauuugggggguucaccacccgaguacggacagugaccaaaccagccuauauguucaagcaucagggagagucacagucucuaccaaaagaagccaacaaacuguaaucccgaauaucgggucuagacccuggguaaggggugucuccagcagaauaagcaucuauuggacaguaguaaaaccgggagacauacuuuugauuaacagcacagggaaucuaauugcuccucgggguuacuucaaaauacgaagugggaaaagcucaauaaugaggucggaugcacccauugacagcugcaauucugaaugcauuacuccaaauggaagcauuuccaaugacaaaccuuuucaaaauguaaacaggaucacauauggggccugucccagauauguuaagcaaaacacucugaaauuggcaacagggaugcggaauguaccagagaaacaaacuagaggcauauucggcgcaaucgcagguuucauagaaaaugguugggagggaaugguagacgguugguacgguuucaggcaucaaaauucugaaggcacaggacaagcagcagaucuuaaaagcacucaagcagcaaucaaccaaaucaacgggaaacugaauagguuaaucgagaaaacgaacgagaaauuccaucaaaucgaaaaagaauucucagaaguagaagggagaauucaggaccucgagaaauauguugaagacacuaaaauagaucucuggucuuacaacgcggagcuucuuguugcccuggagaaccaacauacaauugaucuaacugacucagaaaugaacaaacuguuugaaagaacaagaaagcaacugagggaaaaugcugaggacaugggcaaugguugcuucaaaauauaccacaaaugugacaaugccugcauagggucaaucagaaauggaacuuaugaccaugauguauacagagacgaagcauuaaacaaccgguuccagaucaaagguguugagcugaagucaggauacaaagauuggauccuauggauuuccuuugccauaucaugcuuuuugcuuuguguuguuuugcugggguucauuaugugggccugccaaaaaggcaacauuaggugcaacauuugcauuuga

SEQ ID NO: 32824 - RNA, 1701 nt, Artificial Sequence; identical to SEQ ID NO: 32820
  derived and/or modified CDS sequence (wt) from hemagglutinin__InfluenzaA__ABD79200

SEQ ID NO: 32825 - RNA, 1701 nt, Artificial Sequence
  derived and/or modified CDS sequence (wt) from hemagglutinin__InfluenzaA__ABD79211
augaagacuaucauugcuuugagcuacauuuuaugucugguuuucgcucaaaaacuucccggaaaugacaacagcacggcaacgcugugccugggacaccaugcagugccaaacggaacgcuagugaaaacaaucacgaaugaccaaauugaagugacuaaugcuacugagcugguucagaguuccucaacagguagaauaugcgacaguccucaccaaauccuugauggaaaaaacugcacacugauagaugcucuauugggagacccucauugugauggcuuccaaaauaaggaaugggaccuuuuuguugaacgcagcacagcuuacagcaacuguuacccuuaugaugugccggauuaugccucccuuaggucacuaguugccucauccggcacccuggaguuuaccaaagaaggcuucaauuggacuggagucgcucaggauggaacaagcuaugcuugcaaaaggggaucuguuaaaaguuucuuuaguagauugaauugguugcacaaauuagaauacaaauauccagcacugaacgugacuaugccaaacaaugacaaauuugacaaauuguacauuugggggguucaccacccgaguacggacagugaccaaaccagccuauauguucaagcaucagggagagucacagucucuaccaaaagaagccaacaaacuguaaucccgaauaucgggucuagacccuggauaaggggugucuccagcagaauaagcaucuauuggacaauaguaaaaccgggagacauacuuuugauuaacagcacagggaaucuaauugcuccucgggguuacuucaaaauacgaagugggaaaagcucaauaaugaggucggaugcacccauugacaacugcaauucugaaugcauuacuccaaauggaagcauuuccaaugacaaaccuuuucaaaauguaaacaggaucacauauggggccugucccagauauguuaagcaaaacacucugaaauuggcaacagggaugcggaauguaccagagaaacaaacuagaggcauauucggcgcaaucgcagguuucauagaaaaugguugggagggaaugguagacgguugguacgguuucaggcaucaaaauucugaaggcacaggacaagcagcagaucuuaaaagcacucaagcagcaaucaaccaaaucaacgggaaacugaauagguuaaucgagaaaacgaacgagaaauuccaucaaaucgaaaaagaauucucagaaguagaagggagaauucaggaccucgagaaauauguugaagacacuaaaauagaucucuggucuuacaacgcggagcuucuuguugcccuggagaaccaacauacaauugaucuaacugacucagaaaugaacaaacuguuugaaagaacaagaaagcaacugagggaaaaugcugaggacaugggcaaugguugcuucaaaauauaccacaaaugugacaaugccugcauagggucaaucagaaauggaacuuaugaccaugauguauacagagacgaagcauuaaacaaccgguuccagaucaaagguguugagcugaagucaggauacaaagauuggauccuauggauuuccuuugccauaucaugcuuuuugcuuuguguuguuuugcugggguucauuaugugggccugccaaaaaggcaacauuaggugcaacauuugcauuuga

SEQ ID NO: 32826 - RNA, 1701 nt, Artificial Sequence; identical to SEQ ID NO: 32821
  derived and/or modified CDS sequence (wt) from hemagglutinin__InfluenzaA__ABD79222

SEQ ID NO: 32827 - RNA, 1701 nt, Artificial Sequence; identical to SEQ ID NO: 32821
  derived and/or modified CDS sequence (wt) from hemagglutinin__InfluenzaA__ABD79233

SEQ ID NO: 32828 - RNA, 1701 nt, Artificial Sequence
  derived and/or modified CDS sequence (wt) from hemagglutinin__InfluenzaA__ABD79244
augaagacuaucauugcuuugagcuacauuuuaugucugguuuucgcucaaaaacuucccggaaaugacaacagcacggcaacgcugugccugggacaccaugcagugccaaacggaacgcuagugaaaacaaucacgaaugaccaaauugaagugacuaaugcuacugagcugguucagaguuccucaacagguagaauaugcgacaguccucaccaaauccuugauggaaaaaacugcacacugauagaugcucuauugggagacccucauugugauggcuucaaaaauaaggaaugggaccuuuuuguugaacgcagcacagcuuacagcaacuguuacccuuaugaugugccggauuaugccucccuuaggucacuaguugccucauccggcacccuggaguuuaccaaugaaggcuucaauuggacuggagucgcucaggauggaacaagcuaugcuugcaaaaggggaucuguuaaaaguuucuuuaguagauugaauugguugcacaaauuagaauacaaauauccagcacugaacgugacuaugccaaacaaugacaaauuugacaaauuguacauuugggggguucaccacccgaguacggacagugaccaaaccagccuauauguucaagcaucagggagagucacagucucuaccaaaagaagccaacaaacuguaaucccgaauaucgggucuagacccuggguaaggggugucuccagcagaauaagcaucuauuggacaauaguaaaaccgggagacauacuuuugauuaacagcacagggaaucuaauugcuccucgggguuacuucaaaauacgaagugggaaaagcucaauaaugaggucggaugcacccauugacaacugcaauucugaaugcaucacuccaaauggaagcauucccaaugacaaaccuuuucaaaauguaaacaggaucacauauggggccugucccagauauguuaagcaaaacacucugaaauuggcaacagggaugcggaauguaccagagaaacaaacuagaggcauauucggcgcaaucgcagguuucauagaaaaugguugggagggaaugguagacgguugguacgguuucaggcaucaaaauucugaaggcacaggacaagcagcagaucuuaaaagcacucaagcagcaaucaaccaaaucaacgggaaacugaauagguuaaucgagaaaacgaacgagaaauuccaucaaaucgaaaaagaauucucagaaguagaagggagaauucaggaccucgagaaauauguugaagacacuaaaauagaucucuggucuuacaacgcggagcuucuuguugcccuggagaaccaacauacaauugaucuaacugacucagaaaugaacaaacuguuugaaagaacaagaaagcaacugagggaaaaugcugaggacaugggcaaugguugcuucaaaauauaccacaaaugugacaaugccugcauagggucaaucagaaauggaacuuaugaccaugauguauacagagacgaagcauuaaacaauagguuccagaucaaagguguugagcugaagucaggauacaaagauuggauccuauggauuuccuuugccauaucaugcuuuuugcuuuguguuguuuugcugggguucaucaugugggccugccaaaaaggcaacauuaggugcaacauuugcauuuga

SEQ ID NO: 32829 - RNA, 1701 nt, Artificial Sequence; identical to SEQ ID NO: 32330
  derived and/or modified CDS sequence (wt) from hemagglutinin__InfluenzaA__ABD94734

SEQ ID NO: 32830 - RNA, 1701 nt, Artificial Sequence; identical to SEQ ID NO: 32647
  derived and/or modified CDS sequence (wt) from hemagglutinin__InfluenzaA__ABD94745

SEQ ID NO: 32831 - RNA, 1701 nt, Artificial Sequence
  derived and/or modified CDS sequence (wt) from hemagglutinin__InfluenzaA__ABD94767
augaagacuaucauugcuuugagcuacauuuuaugucugguuuucgcucaaaaacuucccguaaaugacaacagcacggcaacgcugugccugggacaccaugcagugccaaacggaacgcuagugaaaacaaucacgaaugacaacauugaagugacuaaugcuacugagcugguucagaguuccucaacagguagaauaugcgacaguccucaccaaauccuugauggagaaaacugcacacuaauagaugcucuauugggagacccucauugugauggcuuccaaaauaaggaaugggaccuuuuuguugaacgcagcacagccuacagcaacuguuacccuuaugaugugccggauuaugccucccuuaggucacuaguugccucauccggcacacuggaguuuaacaacgaaagcuucaauuggacuggagucgaucagaauggaacaagcucugcuugcaaaaggagaucuaauaaaaguuucuuuaguagauugaauugguugcaccaauuaaaauacaaauauccagcacugaacgugacuaugccaaacaaugaaaaauuugacaaauuguacauuugggggguucaccacccgaguacggacagugaccaaaucagccuauaugcucaagcaucagggagagucacagucucuaccaaaagaagccaacaaaauguaaucccgaauaucggaucuagacccuggguaaggggugucuccagcagaauaagcaucuauuggacaauaguaaaaccgggagacauacuuuugauuaacagcacagggaaucuaauugcuccucgggguuacuucaaaauacgaagugggaaaagcucaauaaugaggucaaaugcacccauuggaaaaugcaauucugaaugcaucacuccaaauggaagcauucccaaugacaaaccauuucaaaauguaaacaggaucacauauggggccugucccagauauguuaaacaaaacacucugaaauuggcaacagggaugcggaauguaccagagaaacaaacuagaggcauauucggcgcaaucgcagguuucauagaaaaugguugggagggaaugguggacgguugguacgguuucaggcaucaaaauucugagggcacaggacaagcagcagaucuuaaaagcacucaagcagcaaucaaccaaaucaacgggaaacugaauagguuaaucgagaaaacaaacgagaaauuccaucaaauugaaaaagaauucucagaaguagaaggaagaauccaggaccucgagaaauauguugaggacacuaaaauagaucucuggucguacaacgcggagcuucuuguugcccuggagaaccaacauacaauugaucuaacugacucagaaaugaacaaacuguucgaaagaacaaggaagcaacugagggaaaaugcugaggauaugggcaaugguuguuucaaaauauaccacaaaugugacaaugccugcauagggucaaucagaaauggaacuuaugaccaugauguauacagagacgaagcauuaaacaaccgguuccagaucaaagguguugagcugaagucaggauacaaagauuggauccuauggauuuccuuugccauaucauguuuuuugcuuuguguuguuuugcugggguucaucaugugggccugccaaaaaggcaacauuaggugcaacauuugcauuuaa

SEQ ID NO: 32832 - RNA, 1698 nt, Artificial Sequence
  derived and/or modified CDS sequence (wt) from hemagglutinin__InfluenzaA__ABD94778
augaaagcaaaacuacugguccuguuauguacauuuacagcuacauacgcagacacaauauguauaggcuaccaugccaacaacucaaccgacacuguugacacaguacuugagaagaaugugacagugacacacucugucaaccuacuugaggacagucacaauggaaaacuaugucuacuaaaaggaauagccccacuacaauuggguaauugcagcguugccggauggaucuuaggaaacccagaaugcgaauuacugauuuccaaggaaucaugguccuacauuguagaaacaccaaaucccgagaauggaacauguuacccaggguauuucgccgacuaugaggaacugagggagcaauugaguucaguaucuucauuugagagauucgaaauauuccccaaaggaagcucauggcccaaccacaccgugaccggaguaucagcaucaugcucccauaaugggaaaagcaguuuuuacagaaauuugcuauggcugacggggaagaaugguuuguacccaaaccugagcauguccuauguaaacaacaaagagaaagaaguccuugugcuaugggguguucaucacccaccuaacauaggggaccaaagggcccucuaccauacagaaaaugcuuaugucucuguagugucuucacauuauagcagaagauucaccccagaaauagccaaaagacccaaaguaagagaucaggaaggaagaaucaacuacuacuggacucugcuggaacccggggacacaauaauauuugaggcaaauggaaaucuaauagcgccaugguaugcuuucgcacugaguagaggcuuuggaucaggaaucaucaccucaaaugcaccaaugggugaaugugaugcgaagugucaaacaccucagggagcuauaaacaguagucuuccuuuccagaauguacacccaguuacaauaggagaguguccaaaguaugucaggagugcaaaauuaaggaugguuacaggacuaaggaacaucccauccauucaauccagagguuuguuuggagccauugccgguuucauugaagggggguggacuggaaugguagaugggugguaugguuaucaucaucagaaugagcaaggaucuggcuaugcugcagaucaaaaaagcacacaaaaugccauuaacgggauuacaaacaaggugaauucuguaauugagaaaaugaacacucaauucacagcugugggcaaagaauucaacaaauuagaaagaaggauggaaaacuuaaauaaaaaaguugaugauggguuucuagacauuuggacauauaaugcagaauuguugguucuacuggaaaaugaaaggacuuuggauuuccaugacuccaaugugaagaaucuguaugagaaaguaaaaagccaauuaaagaauaaugccaaagaaauaggaaacggguguuuugaauucuaucacaaguguaacaaugaaugcauggaaagugugaaaaauggaacuuaugacuauccaaaauauuccgaagaaucaaaguuaaacagggagaaaauugaugggguaaaauuggaaucaaugggagucuaucagauucuggcgaucuacucaacugucgccaguucccugguucuuuuggucucccugggggcaaucagcuucuggauguguuccaaugggucuuugcaguguagaauaugcaucuga

SEQ ID NO: 32833 - RNA, 1698 nt, Artificial Sequence; identical to SEQ ID NO: 32812
  derived and/or modified CDS sequence (wt) from hemagglutinin__InfluenzaA__ABD94789

SEQ ID NO: 32834 - RNA, 1701 nt, Artificial Sequence
  derived and/or modified CDS sequence (wt) from hemagglutinin__InfluenzaA__ABD94822
augaagacuaucauugcuuugagcuacauuuuaugucugguuuucgcucaaaaaauucccggaaaugacaacagcacggcaacgcugugccugggacaccaugcagugccaaacggaacgcuagugaaaacaaucacgaaugaccaaauugaagugacuaaugcuacugagcugguucagaguuccucaacagguagaauaugcgacaguccucaccgaauccuugauggagaaaacugcacacugauagaugcucuauugggagacccucauugugauggcuuccaaaauaaggaaugggaccuuuuuguugaacgcagcaaagccuacagcaacuguuacccuuaugaugugccggauuaugccucccuuaggucacuaguugccucauccggcacccuggaguuuaacaaugaaagcuucaauuggacuggagucgcucagaauggaacaagcuaugcuugcaaaaggaguucuauuaaaaguuucuuuaguagauugaauugguugcaccaauuaaaauacaaauauccagcacugaacgugacuaugccaaacaaugacaaauuugacaaauuguacauuugggggguucaccacccgaguacggacagugaccaaaccagccuauaugcucaagcaucagggagagucacagucucuaccaaaagaagccaacaaacuguaaucccaaauaucggaucuagacccuggguaaggggugucuccagcagaauaagcaucuauuggacaauaguaaaaccgggagacauacuuuugauuaauagcacagggaaucuaauugcuccucgggguuacuucaaaauacgaagugggaaaagcucaauaaugaggucagaugcacccauuggcaaaugcaauucugaaugcaucacuccaaauggaagcauucccaaugacaaaccauuucaaaauguaaacaggaucacauauggggccugucccagauauguuaagcaaaacacucugaaauuggcaacagggaugcggaauguaccagagaaacaaacuagaggcauauucggcgcaaucgcagguuucauagaaaaugguugggagggaaugguagacgguugguacgguuucaggcaucaaaauucugagggcacaggacaagcagcagaucuuaaaagcacucaagcagcaaucaaccaaaucaacgggaaacugaauagguuaaucgagaaaacgaacgagaaauuccaucaaauugaaaaagaauucucagaaguagaagggagaauucaggaccucgagaaauauguugaggacacuaaaauagaucucuggucguacaacgcggagcuucuuguugcccuggagaaccaacauacaauugaucuaacugacucagaaaugaacaaacuguuugaaagaacaaggaagcaacuaagggaaaaugcugaggauaugggcaaugguuguuucaaaauauaccacaaaugugacaaugccugcauagggucaaucagaaauggaacuuaugaccaugauguauacagagacgaagcauuaaacaaccgguuccagaucaaagguguugagcugaagucaggauacaaagauuggauccuauggauuuccuuugccauaucauguuuuuugcuuuguguuguuuugcugggguucaucaugugggccugccaaaaaggcaacauuaggugcaacauuugcauuuga

SEQ ID NO: 32835 - RNA, 1701 nt, Artificial Sequence
  derived and/or modified CDS sequence (wt) from hemagglutinin__InfluenzaA__ABD94833
augaagacuaucauugcuuugagcuacauuuuaugucugguuuucgcucaaaaacuucccggaaaugacaacagcacggcaacgcugugccugggacaccaugcagugccaaacggaacgcuagugaaaacaaucacgaaugaccaaauugaagugacuaaugcuacugagcugguucagaguuccucaacagguagaauaugcgacaguccucaccgaauccuugauggaaaaaacugcacacugauagaugcucuauugggagacccucauugugauggcuuccaaaauaaggaaugggaccuuuuuguugaacgcagcaaagcuuacagcgacuguuacccuuaugaugugccggauuaugcuucccuuaggucacuaguugccucauccggcacccuagaguuuaccaaugaaggcuucaauuggacuggagucgcucaggauggaacaagcuaugcuugcaaaaggggaucuguuaaaaguuucuuuaguagauugaauugguugcacaaauuagaauacaaauauccagcacugaacgugacuaugccaaacaaugacaaauuugacaaauuguacauuugggggguucaccacccgaguacggacagugaccaaaccagccuuuauguucaagcaucagggagagucacagucucuaccaaaagaagccaacaaacuguaaucccgaauaucgggucuagacccuggguaaggggggucuccagcagaauaagcaucuauuggacaauaguaaaaccgggagacauacuuuugauuaauagcacagggaaucuaauugccccucgggguuacuucaaaauacgaagugggaaaagcucaauaaugaggucagaugcacccauuggcaacugcaauucugaaugcaucacuccaaauggaagcauucccaaugacaaaccuuuucaaaauguaaacaggaucacauauggggccugucccagauauguuaagcaaaacacucugaaauuggcaacagggaugcggaauguaccagagaaacaaacuagaggcauauucggcgcaaucgcagguuucauagaaaaugguugggagggaaugguagacgguugguacgguuucaggcaucaaaauucugagggcacaggacaagcagcagaucuuaaaagcacucaagcagcaaucaaccaaaucaaugggaaacugaauagguuaaucgagaaaacgaacgagaaauuccaucaaaucgaaaaagaauucucagaaguagaagggagaauucaggaccucgaaaaauauguugaagacacuaaaauagaucucuggucuuacaacgcagagcuucuuguugcccuggagaaccaacauacaauugaucuaacugacucagaaaugaacaaacuguuugaaagaacaaggaagcaacugagggaaaaugcugaggacaugggcaaugguugcuucaaaauauaccacaaaugugacaaugccugcauagggucaaucagaaauggaacuuaugaccaugauguauacagagacgaagcauuaaacaaccgguuccagaucaaagguguugagcugaagucaggauacaaagauuggauccuauggauuuccuuugccauaucaugcuuuuugcuuuguguuguuuugcugggguucaucaugugggccugccaaaaaggcaacauuaggugcaacauuugcauuuga

SEQ ID NO: 32836 - RNA, 1701 nt, Artificial Sequence
  derived and/or modified CDS sequence (wt) from hemagglutinin__InfluenzaA__ABD94844
augaagacuaucauugcuuugagcuacauuuuauguaugguuuucgcucaaaaacuucccggaaaugacaacagcacggcaacgcugugccugggacaccaugcagugccaaacggaacgcuagugaaaacaaucacgaaugaccaaauugaagugacuaaugcuacugagcugguucagaguuccucaacagguagaauaugcgacaguccucaccgaauccuugauggaaaaaacugcacacugauagaugcucuauugggagacccucauugugauggcuuccaaaauaaggaaugggaccuuuuuguugaacgcagcaaagcuuacagcaacuguuacccuuaugaugugccggauuaugccucccuuaggucacuaguugccucauccggcacccuggaguuuaacaaugaaagcuucaauuggacuggagucgcucagaauggaacaagcuaugcuugcaaaaggagaucuguuaaaaguuucuucaguagauugaauugguugcacaaauuagaauacaaauauccagcacugaacgugacuaugccaaacaaugacaaauuugacaaauuguacauuugggggguucaccacccgaguacggacagugaccaaaccagccuauauguucaagcaucagggagagucacagucucuaccaaaagaagccaacaaacuguaaucccgaauaucggaucuagacccuggguaaggggugucuccagcauaauaagcaucuauuggacaauaguaaaaccgggagacauacuuuugauuaacagcacagggaaucuaauugcuccucgggguuacuucaaaauacgaagugggaaaagcucaauaaugaggucagaugcacccauuggcaacugcaauucugaaugcaucacuccaaauggaagcauucccaaugacaaaccauuucaaaauguaaacaggaucacauauggggccugucccagauauguuaagcaaaacacucugaaauuggcaacagggaugcggaauguaccagagaaacaaacuagaggcauauucggcgcaaucgcagguuucauagaaaaugguugggagggaaugguagacgguugguacgguuucaggcaucaaaauucugagggcacaggacaagcagcagaucuuaaaagcacucaagcagcaaucaaccaaaucaacgggaaacugaauagguuaaucgagaaaacgaacgagaaauuccaucaaaucgaaaaagaauucucagaaguagaagggagaauucaggaccucgagaaauauguugaagacacuaaaauagaucucuggucguacaacgcggagcuucuuguugcccuggagaaccaacauacaauugaucuaacugacucagaaaugaacaaacuguuugaaagaacaaggaagcaacugagggaaaaugcugaggacaugggcaaugguugcuucaaaauauaccacaaaugugacaaugccuguauagggucaaucagaaauggaacuuaugaccaugauguauacagagacgaagcauuaaacaaccgguuccagaucaaagguguugagcugaagucaggauacaaagauuggauccuauggauuuccuuugccauaucauguuuuuugcuuuguguuguuuugcugggguucaucaugugggccugccaaaaaggcaacauuaggugcaacauuugcauuuga

SEQ ID NO: 32837 - RNA, 1701 nt, Artificial Sequence
  derived and/or modified CDS sequence (wt) from hemagglutinin__InfluenzaA__ABD94855
augaagacuauuauugcuuugagcuacauuuuaugucugguuuucgcucaaaaacuucccggaaaugacaacagcacggcaacgcugugccugggacaccaugcagugccaaacggaacgcuagugaaaacaaucacgaaugaccaaauugaagugacuaaugcuacugagcugguucaggguuccucaacagguagaauaugcgacaguccucaccgaauccuugauggaaaaaacugcacacugauagaugcucuauugggagacccucauugugauggcuuccaaaauaaggaaugggaccuuuuuguugaacgcagcaaagcuuacagcaacuguuacccuuaugaugugccggauuaugccucccuuaggucacuaguugccucaucaggcacccuggaguuuaacaaugaaagcuucaauuggacuggagucgcccagaauggaacaagcuaugcuugcaaaaggggaucuguuaaaaguuucuuuaguagauugaauugguugcacaaauuagaauacaaauauccagcacugaacgugacuaugccaaacaaugacaaauuugacaaauuguacauuugggggguucaccacccgaguacggacagugaccaaaccagccuauauguucaagcaucagggagagucacagucucuaccaaaagaagccaacaaacuguaaucccgaauaucggaucuagacccuggguaaggggugucuccagcagaauaagcauauauuggacaauaguaaaaccgggagacauacuuuugauuaacagcacagggaaucuaauugcuccucgggguuacuucaaaauacgaagugggaaaagcucaauaaugaggucagaugcacccauugacaacugcaauucugaaugcaucacuccaaauggaagcauucccaaugacaaaccauuucaaaauguaaacaggaucacauauggggccugucccagauauguuaagcaaaacacucugaaauuggcaacagggaugcggaauguaccagagaaacaaacuagaggcauauucggcgcaaucgcagguuucauagaaaaugguugggagggaaugguagacgguugguacgguuucaggcaucaaaauucugagggcacaggacaagcagcagaucuuaaaagcacucaagcagcaaucaaccaaaucaacgggaaacugaauagguuaaucgagaaaacgaacgagaaauuccaucaaaucgaaaaagaauucucagaaguagaagggagaauucaggaccucgagaaauauguugaagacacuaaaauagaucucuggucguacaacgcggagcuucuuguugcccuggagaaccaacauacaauugaucuaacugacucagaaaugaacaaacuguuugaaagaacaaggaagcaacugagggaaaaugcugaggacaugggcaaugguugcuucaaaauauaccacaaaugugacaaugccugcauagggucaaucagaaauggaacuuaugaccaugauguauacagagacgaagcauuaaacaaccgguuccagaucaaagguguugagcugaagucaggauacaaagauuggauccuauggauuuccuuugccauaucauguuuuuugcuuuguguuguuuuguugggguucaucaugugggccugccaaaaaggcaacauuaggugcaacauuugcauuuga

SEQ ID NO: 32838 - RNA, 1701 nt, Artificial Sequence
  derived and/or modified CDS sequence (wt) from hemagglutinin__InfluenzaA__ABD94866
augaagacuaucauugcuuugagcuacauuucaugucugguuuucgcucaaaaacuucccggaaaugacaacagcacggcaacgcugugccugggacaccaugcagugccaaacggaacgcuagugaaaacaaucacgaaugaccaaauugaagugacuaaugcuacugagcugguucagaguuccucaacagguagaauaugcgacgguccucaccaaauccuugauggaaaaaacugcacacugauagaugcucuauuaggagacccucauugugauggcuuccaaaauaaggaaugggaccuuuuuguugaacgcagcaaagcuuacagcaacuguuacccuuaugaugugccggauuaugccucccuuaggucacuaguugccucuuccggcacccuggaguuuaccaaugaaagcuucaauuggacuggagucgcucagaauggaacaagcuaugcuugcaaaaggggaucuguuaaaaguuucuuuaguagauugaauugguugcacaaauuagaauacaaauauccagcacuaaacgugacuaugccaaacaaugacaaauuugacaaauuguacauuugggggguucaccacccgaguacggacagugaccaaaccagccuauauguucaaucaucagggagaaucacagucucuaccaaaagaagccaacaaacuguaaccccgaauaucgggucuagacccuggguaaggggugucuccagcagaauaagcaucuauuggacaauaguaaaaccgggagacauacuuuugauuaccagcacagggaaucuaauugcuccucgggguuacuucaaaauacgaagggggaaaagcucaauaaugaggucagaugcacccauugacaacugcaauucugaaugcaucacuccaaauggaagcauucccaaugacaaaccuuuucaaaauguaaacaggaucacauauggggccugucccagauauguuaagcaaaacacucugaaauuggcaacagggaugcggaauguaccagagaaacaaacuagaggcauauucggcgcaaucgcagguuucauagaaaaugguugggagggaaugguagacgguugguacgguuucaggcaucaaaauucugagggcacaggacaagcagcagaucuuaaaagcacucaagcagcaaucaaccaaaucaacgggaaacugaauagguuaaucgagaaaacgaacgagaaauuucaucaaaucgaaaaagaauucucagaaguagaagggagaauucaggaccucgagaaauauguugaagacacuaaaauagaucucuggucuuacaacgcggagcuucuuguugcccuggagaaucaacauacaauugaucuaacugacucagaaaugaacaaacuguuugaaagaacaaggaagcaacugagggaaaaugcugaggacaugggcaaugguugcuucaaaauauaccacaaaugugacaaugcaugcauagggucaaucagaaauggaacuuaugaccaugauguauacagagacgaagcauuaaacaaccgguuccagaucaaagguguugagcugaaaucaggauacaaagauuggauccuauggauuuccuuugccauaucaugcuuuuugcuuuguguuguuuugcugggguucaucaugugggccugccaaaaaggcaacauuaggugcaacauuugcauuuga

SEQ ID NO: 32839 - RNA, 1701 nt, Artificial Sequence
  derived and/or modified CDS sequence (wt) from hemagglutinin__InfluenzaA__ABD94877
augaagacuauuauugcuuugagcuacauuuuaugucugguuuucgcucaaaaacuucccggaaaugacaacagcacggcaacgcugugccugggacaccaugcagugccaaacggaacgcuagugaaaacaaucacgaaugaccaaauugaagugacuaaugcuacugagcugguucagaguuccucaacagguagaauaugcgacaguccucaccgaauccuugauggaaaaaacugcacacugauagaugcucuauugggagacccucauugugauggcuuccaaaauaaggaaugggaccuuuuuguugaacgcagcaaagcuuacagcaacuguuacccuuaugaugugccggauuaugccucccuuaggucacuaguugccucauccggcacccuggaguuuaacaaugaaagcuucaauuggacuggagucgcccagaauggaacaagcuaugcuugcaaaaggagaucuguuaaaaguuucuuuaguagauugaauugguugcacaaauuagaauacaaauauccagcacugaacgugacuaugccaaacaaugacaaauuugacaaauuguacauuugggggguucaccacccgaguacggacagugaccaaaccagccuauauguucaagcaucagggagagucacagucucuaccaaaagaagccaacaaacuguaaucccgaauaucggaucuagacccuggguaaggggugucuccagcaggauaagcauauauuggacaauaguaaaaccgggagacauacuuuugauuaacagcacagggaaucuaauugcuccucgggguuacuucaaaauacgaaguggaaaaagcucaauaaugaggucagaugcacccauugacaacugcaauucugaaugcaucacuccaaauggaagcauucccaaugacaaaccauuucaaaauguaaacaggaucacauauggggccugucccagauauguuaagcaaaacacucugaaauuggcaacagggaugcggaauguaccagagaaacaaacuagaggcauauucggcgcaaucgcagguuucauagaaaaugguugggagggaaugguagacgguugguacgguuucaggcaucaaaauucugagggcacaggacaagcagcagaucuuaaaagcacucaagcagcaaucaaccaaaucaacgggaaacugaauagguuaaucgagaaaacgaacgagaaauuccaucaaaucgaaaaagaauucucagaaguagaagggagaauucaggaccucgagaaauauguugaagacacuaaaauagaucucuggucguacaacgcggagcuucuuguugcccuggagaaccaacauacaauugaucuaacugacucagaaaugaacaaacuguuugaaagaacaaggaagcaacugagggaaaaugcugaggacaugggcaaugguugcuucaaaauauaccacaaaugugacaaugccugcauagggucaaucagaaauggaacuuaugaccaugauguauacagagacgaagcauuaaacaaccgguuccagaucaaagguguugagcugaagucaggauacaaagauuggauccuauggauuuccuuugccauaucauguuuuuugcuuuguguuguuuugcugggguucaucaugugggccugccaaaaaggcaacauuaggugcaacauuugcauuuga

SEQ ID NO: 32840 - RNA, 1701 nt, Artificial Sequence
  derived and/or modified CDS sequence (wt) from hemagglutinin__InfluenzaA__ABD94888
augaagacuaucauugcuuugagcuacauuuuaugucugguuuucgcucaaaaacuucccggaaaugacaacagcacggcaacgcugugccugggacaccaugcagugccaaacggaacgcuagugaaaacaaucacgaaugaccaaauugaagugacuaaugcuacugagcugguucagaguuccucaacagguagaauaugcgacaguccucaccgaauccuugauggaaaaaacugcacacugauagaugcucuauugggagacccucauugugauggcuucaaaaauaaggaaugggaccuuuuuguugaacgcagcacagcuuacagcaacuguuacccuuaugaugugccggauuaugccucccuuaggucacuaguugccucauccggcacccuggaguuuaccaaugaaggcuucaauuggacuggagucgcucaggauggaacaagcuaugcuugcaaaaggggaucuguuaaaaguuucuuuaguagauugaauugguugcacaaauuagaauacaaauauccagcacugaacgugacuaugccaaacaaugacaaauuugacaaauuguacauuugggggguucaccacccgaguacggacagugaccaaaccagccuauauguucaagcaucagggagagucacagucucuaccaaaagaagccaacaaacuguaaucccgaauaucgggucuagacccuggguaaggggugucuccagcagaauaagcaucuauuggacaauaguaaaaccgggagacauacuuuugauuaacagcacagggaaucuaauugcuccucgggguuacuucaaaauacgaagugggaaaagcucaauaaugaggucagaugcacccauugacaacugcaauucugaaugcaucacuccaaauggaagcauucccaaugacaaaccuuuucaaaauguaaacaggaucacauauggggccugucccagauauguuaagcaaaacacucuaaaauuggcaacagggaugcggaauguaccagagaaacaaacuagaggcauauucggcgcaaucgcagguuucauagaaaaugguugggagggaaugguagacgguugguacgguuucaggcaucaaaauucugagggcacaggacaagcagcagaucuuaaaagcacucaagcagcaaucaaccaaaucaacgggaaacugaauagguuaaucgagaaaacgaacgagaaauuccaucaaaucgaaaaagaauucucagaaguagaagggagaauucaggaccucgagaaauauguugaagacacuaaaauagaucucuggucuuacaacgcggagcuucuuguugcccuggagaaccaacauacaauugaucuaacugacucagaaaugaacaaacuguuugaaagaacaagaaagcaacugagggaaaaugcugaggacaugggcaaugguugcuucaaaauauaucacaaaugugacaaugccugcauagggucaaucagaaauggaacuuaugaccaugauguauacagagacgaagcauuaaacaaccgguuccagaucaaagguguugagcugaagucaggauacaaagauuggauccuauggauuuccuuugccauaucaugcuuuuugcuuuguguuguuuugcugggguucaucaugugggccugccaaaaaggcaacauuaggugcaacauuugcauuuga

SEQ ID NO: 32841 - RNA, 1701 nt, Artificial Sequence; identical to SEQ ID NO: 32820
  derived and/or modified CDS sequence (wt) from hemagglutinin__InfluenzaA__ABD94899

SEQ ID NO: 32842 - RNA, 1701 nt, Artificial Sequence
  derived and/or modified CDS sequence (wt) from hemagglutinin__InfluenzaA__ABD94910
augaagacuaucauugcuuugagcuacauucuaugucugguuuucgcucaaaaacuucccggaaaugacaacagcacggcaacgcugugccugggacaccaugcagugccaaacggaacgcuagugaaaacaaucacgaaugaccaaauugaagugacuaaugcuacugagcugguucagaauuccucaacagguaggauaugugacaguccucaccgaauccuugaugggaaaaacugcacacugauagaugcucuauugggagacccucauugugauggcuuccaaaauaaggaaugggaccuuuuuguugaacgcagcaaagcuuacagcaacuguuacccuuaugaugugccggauuaugccucccuuaggucacuaguugccucauccggcacccuggaguuuaacaaugaaagcuucaauuggacuggagucgcucagaauggaacaagcuaugcuugcaaaaggagaucuguuaaaaguuucuuuaguagauugaauugguugcacaaauuagaauacaaauauccagcacugaacgugacuaugccaaacaaugacaaauuugacaaauuguacauuugggggguucaccacccgaguacggacagugaccaaaccagccuauauguucaagcaucagggagagucacagucucuaccaaaagaagccaacaaacuguaaucccgaauaucggaucuagacccuggguaaggggugucuccagcagaauaagcaucuauuggacaauaguaaaaccgggagacauacuuuugauuaacagcacagggaaucuaauugcuccucgggguuacuucaaaauacgaagugggaaaagcucaauaaugaggucagaugcacccauuggcaacugcaauucugaaugcaucacuccaaauggaagcauucccaaugacaaaccauuucaaaauguaaacaggaucacauauggggccugucccagauauguuaagcaaaacacucugaaauuggcaacagggaugcggaauguaccagagaaacaaacuagaggcauauucggcgcaaucgcagguuucauagaaaaugguugggagggaaugguagacgguugguacgguuucaggcaucaaaauucugagggcacaggacaagcagcggaucuuaaaagcacucaagcagcaaucaaccaaaucaacgggaaacugaauagguuaaucgagaaaacgaacgagaaauuccaucaaaucgaaaaagaauucucagaaguagaagggagaauucaggaccucgagaaauauguugaagacacuaaaauagaucucuggucguacaacgcggagcuucuuguugcccuggagaaccaacauacaauugaucuaacugacucagaaaugaacaaacuguuugaaagaacaaggaagcaacugagggaaaaugcugaggacaugggcaaugguugcuucagaauauaccacaaaugugacaaugccugcauagggucaaucagaaauggaacuuaugaccaugauguauacagagacgaagcauuaaacaaccgguuccagaucaaagguguugagcugaagucaggauacaaagauuggauccuauggauuuccuuugccauaucauguuuuuugcuuuguguuguuuugcugggguucaucaugugggccugccaaaaaggcaacauuaggugcaacauuugcauuuga

SEQ ID NO: 32843 - RNA, 1701 nt, Artificial Sequence
  derived and/or modified CDS sequence (wt) from hemagglutinin__InfluenzaA__ABD94921
augaagacuaucauugcuuugagcuacauuuuaugucugguuuucgcucaaaaacuucccggaaaugacaacagcacggcaacgcugugccugggacaccaugcagugccaaacggaacgcuagugaaaacaaucacgaaugaccaaauugaagugacuaaugcuacugagcugguucagaguuccucaacagguagaauaugcgacgguccucaccaaauccuugauggaaaaaacugcacacugauagaugcucuauugggagacccucauugugauggcuuccaaaauaaggaaugggaccuuuuuguugaacgcagcaaagcuuacagcaacuguuacccuuaugaugugccggauuaugccucccuuaggucacuaguugccucauccggcacccuggaguuuaccaaugaaagcuucaauuggacuggagucgcucagaauggaacaagcuaugcuugcaaaaggggaucuguuaaaaguuucuuuaguagauugaauugguugcacaaauuagaauacaaauauccagcacuaaacgugacuaugccaaacaaugacaaauuugacaaauuguacauuugggggguucaccacccgaguacggacagugaccaaaccagccuauauguucaaucaucagggagagucacagucucuaccaaaagaagccaacaaacuguaaccccgaauaucgggucuagacccuggguaaggggugucuccagcagaauaagcaucuauuggacaauaguaaaaccgggagacauacuuuugauuaacagcacagggaaucuaauugcuccucgggguuacuucaaaauacgaagggggaaaagcucaauaaugaggucagaugcacccauugacaacugcaauucugaaugcaucacuccaaauggaagcauucccaaugacaaaccuuuucaaaauguaaacaggaucacauauggggccugucccagauauguuaagcaaaacacucugaaauuggcaacagggaugcggaauguaccagagaaacaaacuagaggcauauucggcgcaaucgcagguuucauagaaaaugguugggagggaaugguagacgguugguacgguuucaggcaucaaaauucugagggcacaggacaagcagcagaucuuaaaagcacucaagcagcaaucaaccaaaucaacgggaaacugaauagguuaaucgagaaaacgaacgagaaauuucaucaaaucgaaaaagaauucucagaaguagaagggagaauucaggaccucgagaaauauguugaagacacuaaaauagaucucuggucuuacaacgcggagcuucuuguugcccuggagaaucaacauacaauugaucuaacugacucagaaaugaacaaacuguuugaaagaacaaggaagcaacugagggaaaaugcugaggacaugggcaaugguugcuucaaaauauaccacaaaugugacaaugcaugcauagggucaaucagaaauggaacuuaugaccaugauguauacagagacgaagcauuaaacaaccgguuccagaucaaagguguugagcugaagucaggauacaaagauuggauccuauggauuuccuuugccauaucaugcuuuuugcuuuguguuguuuugcugggguucaucaugugggccugccaaaaaggcaacauuaggugcaacauuugcauuuga

SEQ ID NO: 32844 - RNA, 1701 nt, Artificial Sequence; identical to SEQ ID NO: 32820
  derived and/or modified CDS sequence (wt) from hemagglutinin__InfluenzaA__ABD94932

SEQ ID NO: 32845 - RNA, 1698 nt, Artificial Sequence
  derived and/or modified CDS sequence (wt) from hemagglutinin__InfluenzaA__ABD94943
augaaaguaaaacuacugauccuguuauguacauuuacagcuacauaugcagacacaauauguauaggcuaccaugccaacaacucaaccgacacuguugacacaguacuugagaagaaugugacagugacacacucugucaaccuacuugaggacagucacaauggaaaacugugccuacuaaaaggaauagccccccuacaauuggguaauugcagcguugccggauggaucuuaggaaacccagaaugcgaauuacugauuuccaaggaaucaugguccuacauuguagaaacaccaaauccugagaauggagcauguuacccaggguauuucgccgacuaugaggagcuaagggagcaauugaguucaguaucuucauuugagagauucgaaauauuccccaaagaaagcucauggcccaaccacaccguaaccggaguaucagcaucaugcucccauaaugggaaaagcaguuuuuacagaaauuugcuauggcugacggggaagaaugguuuguacccaaaccugagcaaguccuaugcaaacaacaaaaagaaagaaguccuuauacuaugggguguucaucacccgccuaacauaggggaccaaaggacccucuaucacacagaaaaugcuuaugucucuguagugucuucacauuauagcagaagauucaccccagaaauaaccaaaaggcccaaaguaagagaucaggaaggaagaaucaacuacuacuggacucugcuggaacccggggauacaauaauauuugaggcaaauggaaaucuaauagcgccaugguaugcuuucgcacugaguagaggcuuuggaucaggaaucaucaccucaaaugcaccaauggaugaaugugaugcgaagugucaaacaccucagggagcuauaaacagcagucuuccuuuccagaauguacacccagucacaauaggagaguguccaaaguaugucaggagugcaaaauuaaggaugguuacaggacuaaggaacaucccauccauucaauccagagguuuguuuggagccauugccgguuucauugaagggggguggacuggaaugguagaugggugguaugguuaucaucaucagaaugagcaaggaucuggcuaugcugcagaucaaaaaagcacacaaaaugccauuaacgggauuacaaacaaggugaauucuguaauugagaaaaugaacacucaauucacagcugugggcaaagaauucaacaaauuggaaagaaggauggaaaacuuaaauaaaaagguugaugauggguuucuagacauuuggacauauaaugcagaauuguugguucuacuggaaaaugaaaggacuuuggauuuccacgacuccaaugugaagaaucuguacgagaaaguaaaaagccaauuaaagaauaaugccaaagaaauaggaaauggguguuuugaauucuaucacaaguguaacaaugaaugcauggagagugugaaaaauggaacuuaugacuauccaaaauauuccgaagaaucaaaguuaaacagggaaaaaauugauggagugaaauuggacucaaugggggucuaucagauucuggcgaucuacucaacugucgccaguucccugguucuuuuggucucccugggggcaaucagcuucuggauguguuccaaugggucuuugcaguguagaauaugcaucuga

SEQ ID NO: 32846 - RNA, 1701 nt, Artificial Sequence; identical to SEQ ID NO: 32645
  derived and/or modified CDS sequence (wt) from hemagglutinin__InfluenzaA__ABD94954

SEQ ID NO: 32847 - RNA, 1698 nt, Artificial Sequence
  derived and/or modified CDS sequence (wt) from hemagglutinin__InfluenzaA__ABD94965
augaaaguaaaacuacugguccuguuauguacauuuacagcuacauaugcagacacaauauguauaggguaccaugccaacaacucaaccgacacuguugacacaguacuugagaagaaugugacagugacacacucugucaaccuacuugaggacagucacaauggaaaacuaugucuacuaaaaggaauagccccacuacaauuggguaauugcagcguugccggauggaucuuaggaaacccagaaugcgaauuacugauuuccaaggaaucaugguccuacauuguagaaacaccaaauccugagaauggaacauguuacccaggguauuucgccgacuaugaggaacugagggagcaauugaguucaguaucuucauuugagagauucgaaauauuccccaaagaaagcucauggcccaaccacaccguaaccggaguaucagcaucaugcucccauaaugggaaaagcaguuuuuacagaaauuugcuauggcugacggggaagaaugguuuguacccaaaccugagcaaguccuaugcaaacaacaaagagaaagaaguccuuguacuaugggguguucaucacccgccuaacauaggggaccaaagggcccucuaucauacagaaaaugcuuaugucucuguagugucaucacauuauagcagaagauucaccccagaaauagccaaaagacccaaaguaagagaucaggaaggaagaaucaacuacuacuggacucugcuggaacccggggauacaauaauauuugaggcaaauggaaaucuaauagcgccacgguaugcuuucgcacugaguagaggcuuuggaucaggaaucaucaccucaaaugcaccaauggaugaaugugaugcgaagugucaaacaccucagggagcuauaaacagcagucuuccuuuccagaacguacacccagucacaauaggagaguguccaaaguaugucaggagugcaaaauuaaggaugguuacaggacuaaggaacaucccauccauucaauccagagguuuguuuggagccauugccgguuucauugaagggggguggacuggaaugguagaugggugguaugguuaucaucaucagaaugagcaaggaucuggcuaugccgcagaucaaaaaagcacacaaaaugccauuaacgggauuacaaacaaggugaauucuguaauugagaaaaugaacacucaauucacagcugugggcaaagaauucaacaaauuggagagaaggauggaaaacuuaaauaaaaagguugaugauggguuucuagacauuuggacauauaaugcagaauuguugguucuacuggaaaaugaaaggacuuuggauuuccaugacuccaaugugaagaaucuguaugagaaaguaaaaagccaauuaaagaauaaugccaaagaaauaggaaacggguguuuugaauucuaucacaaguguaacaaugaaugcauggagagugugaaaaauggaacuuaugacuauccaaaauauuccgaagaaucaaaguuaaacagggagaaaauugauggagugaaauuggaaucaaugggagucuaucagauucuggcgaucuacucaacugucgccaguucccugguucuuuuggucucccugggggcaaucagcuucuggauguguuccaaugggucuuugcaguguagaauaugcaucuga

SEQ ID NO: 32848 - RNA, 1698 nt, Artificial Sequence; identical to SEQ ID NO: 32753
  derived and/or modified CDS sequence (wt) from hemagglutinin__InfluenzaA__ABD94987

SEQ ID NO: 32849 - RNA, 1698 nt, Artificial Sequence; identical to SEQ ID NO: 32753
  derived and/or modified CDS sequence (wt) from hemagglutinin__InfluenzaA__ABD94998

SEQ ID NO: 32850 - RNA, 1698 nt, Artificial Sequence
  derived and/or modified CDS sequence (wt) from hemagglutinin__InfluenzaA__ABD95009
augaaaguaaaacuacugguccuguuauguacauuuacagcuacauaugcagacacaauauguauaggguaccaugccaacaacucaaccgacacuguugacacaguacuugagaagaaugugacagugacacacucagucaaccuacuugaggacagucacaauggaaaacuaugucuacuaaaaggaauagccccacuacaauuggguaauugcagcguugccggauggaucuuaggaaacccagaaugcgaauuacugauuuccaaggaaucaugguccuacauuguagaaacaccaaauccugagaauggaacauguuacccaggguauuucgccgacuaugaggaacugagggagcaauugaguucaguaucuucauuugagagauucgaaauauuccccaaagaaagcucauggcccaaccacaccguaaccggaguaucagcaucaugcucccauaaugggaaaagcaguuuuuacagaaauuugcuauggcugacggggaagaaugguuuguacccaaaccugagcaaguccuaugcaaacaacaaagagaaagaaguccuuguacuaugggguguucaucacccgccuaacauaggggaccaaaaggcccucuaucauacagaaaaugcuuaugucucuguagugucuucacauuauagcagaagauucaccccagaaauagccaaaagacccaaaguaagagaucaggaaggaagaaucaacuacuacuggacucugcuggaacccggggauacaauaauauuugaggcaaauggaaaucuaauagcgccacgguaugcuuucgcacugaguagaggcuuuggaucaggaaucaucaccucaaaugcaccaauggaugaaugugaugcgaagugucaaacaccucagggagcuauaaacagcagucuuccuuuccagaacguacacccagucacaauaggagaguguccaaaguaugucaggagugcaaaauuaaggaugguuacaggacuaaggaacaucccauccauucaauccagagguuuguuuggagccauugccgguuucauugaagggggguggacuggaaugguagaugggugguaugguuaucaucaucagaaugagcaaggaucuggcuaugccgcagaucaaaaaagcacacaaaaugccauuaacgggauuacaaacaaggugaauucuguaauugagaaaaugaacacucaauucacagcugugggcaaagaauucaacaaauuggaaagaaggauggaaaacuuaaauaaaaaaguugaugauggguuucuagacauuuggacauauaaugcagaauuguugguucuacuggaaaaugaaaggacuuuggauuuccaugacuccaaugugaagaaucuguaugagaaaguaaaaagccaauuaaagaauaaugccaaagaaauaggaaacggguguuuugaauucuaucacaaguguaacaaugaaugcauggagagugugaaaaauggaacuuaugacuauccaaaauauuccgaagaaucaaaguuaaacagggagaaaauugauggagugaaauuggaaucaaugggagucuaucagauucuggcgaucuacucaacugucgccaguucccugguucuuuuggucucccugggggcaaucagcuucuggauguguuccaaugggucuuugcaguguagaauaugcaucuga

SEQ ID NO: 32851 - RNA, 1698 nt, Artificial Sequence; identical to SEQ ID NO: 32754
  derived and/or modified CDS sequence (wt) from hemagglutinin__InfluenzaA__ABD95020

SEQ ID NO: 32852 - RNA, 1698 nt, Artificial Sequence
  derived and/or modified CDS sequence (wt) from hemagglutinin__InfluenzaA__ABD95031
augaaaguaaaacuacugguccuguuauguacauuuacagcuacauaugcagacacaauauguauaggguaccaugccaacaacucaaccgacacuguugacacaguacuugagaagaaugugacagugacacacucugucaaccuacuugaggacagucacaauggaaaacuaugucuacuaaaaggaauagccccacuacaauuggguaauugcagcguugccggauggaucuuaggaaacccagaaugcgaauuacugauuuccaaggaaucaugguccuacauuguagaaacaccaaauccugagaauggaacauguuacccaggguauuucaccgacuaugaggaacugagggagcaauugaguucaguaucuucauuugagagauucgaaauauuccccaaagaaagcucauggcccaaccacaccguaaccggaguaucagcaucaugcucccauaaugggaaaaguaguuuuuacagaaauuugcuauggcugacggggaagaaugguuuguacccaaaccugagaagguccuaugcaaacaacaaagagaaagaaguccuuguacuaugggguguucaucacccgccuaacauaggggaccaaaaggcccucuaucauacagaaaaugcuuaugucucuguagugucuucacauuauagcagaagauucaccccagaaauagccaaaagacccaaaguaagaggucaggaaggaagaaucaacuacuacuggacucugcuggaacccggggauacaauaauauuugaggcaaauggaaaucuaauagcgccacgguaugcuuucgcacugaguagaggcuuuggaucaggaaucaucaccucaaaugcaccaauggaugaaugugaugcgaagugucaaacaccucagggagcuauaaacagcagucuuccuuuccagaacguacacccagucacaauaggagaguguccaaaguaugucaggagugcaaaauuaaggaugguuacaggacuaaggaacaucccauccauucaauccagagguuuguuuggagccauugccgguuucauugaagggggguggacuggaaugguagaugggugguaugguuaucaucaucagaaugagcaaggaucuggcuaugccgcagaucaaaaaagcacacaaaaugccauuaacgggauuacaaacaaggugaauucuauaauugagaaaaugaacacucaauucacagcugugggcaaagaauucaacaaauuggaaagaaggauggaaaacuuaaauaaaaaaguugaugauggguuucuagacauuuggacauauaaugcagaauuguugguucuacuggaaaaugaaaggacuuuggauuuccaugacuccaaugugaagaaucuguaugagaaaguaaaaagccaauuaaagaauaaugccaaagaaauaggaaacggguguuuugaauucuaucacaaguguaacaaugaaugcauggagagugugaaaaauggaacuuaugacuauccaaaauauuccgaagaaucaaaguuaaacagggagaaaauugauggagugaaauuggaaucaaugggagucuaucagauucuggcgaucuacucaacugucgccaguucccugguucuuuuggucucccugggggcaaucagcuucuggauguguuccaaugggucuuugcaguguagaauaugcaucuga

SEQ ID NO: 32853 - RNA, 1698 nt, Artificial Sequence
  derived and/or modified CDS sequence (wt) from hemagglutinin__InfluenzaA__ABD95042
augaaagcaaaacuacugguccuguuauguacauuuacagcuacauacgcagacacaauauguauaggcuaccaugccaacaacucaaccgacacuguugacacaguacuugagaagaaugugacagugacacacucugucaaccuacuugaggacagucacaauggaaaacuaugucuacuaaaaggaauagccccacuacaauuggguaauugcagcguugccggauggaucuuaggaaacccagaaugcgaauuacugauuuccaaggaaucaugguccuacauuguagaaacaccaaaucccgagaauggaacauguuacccaggguauuucgccgacuaugaggaacugagggagcaauugaguucaguaucuucauuugagagauuugaaauauuccccaaaggaagcucauggcccaaccacaccgugaccggaguaucagcaucaugcucccauaaugggaaaagcaguuuuuacagaaauuugcuauggcugacggggaagaaugguuuguacccaaaccugagcauguccuauguaaacaacaaagggaaagaaguccuugugcuaugggguguucaucacccaccuaacauaggggaccaaagggcccucuaccauacagaaaaugcuuaugucucuguagugucuucacauuauagcagaagauucaccccagaaauagccaaaagacccaaaguaagagaucaggaaggaagaaucaacuacuacuggacucugcuggaacccggggacacaauaauauuugaggcaaauggaaaucuaauagcgccaugguaugcuuucgcacugaguagaggcuuuggaucaggaaucaucaccucaaaugcaccaaugggugaaugugaugcgaagugucaaacaccucagggagcuauaaacaguagucuuccuuuccagaauguacacccaguuacaauaggagaguguccaaaguaugucaggagugcaaaauuaaggaugguuacaggacuaaggaacaucccauccauucaauccagagguuuguuuggagccauugccgguuucauugaagggggguggacuggaaugguagaugggugguaugguuaucaucaucagaaugagcaaggaucuggcuaugcugcagaucaaaaaagcacacaaaaugccauuaacgggauuacaaacaaggugaauucuguaauugagaaaaugaacacucaauucacagcugugggcaaagaauucaacaaauuagaaagaaggauggaaaacuuaaauaaaaaaguugaugauggguuucuagacauuuggacauauaaugcagaauuguugguucuacuggaaaaugaaaggacuuuggauuuccaugacuccaaugugaagaaucuguaugagaaaguaaaaagccaauuaaagaauaaugccaaagaaauaggaaacggguguuuugaauucuaucacaaguguaacaaugaaugcauggaaagugugaaaaauggaacuuaugacuauccaaaauauuccgaagaaucaaaguuaaacagggagaaaauugauggaguaaaauuggaaucaaugggagucuaucagauucuggcgaucuacucaacugucgccaguucccugguucuuuuggucucccugggggcaaucagcuucuggauguguuccaaugggucuuugcaguguagaauaugcaucuga

SEQ ID NO: 32854 - RNA, 1698 nt, Artificial Sequence
  derived and/or modified CDS sequence (wt) from hemagglutinin__InfluenzaA__ABD95053
augaaagcaaaacuacugguccuguuauguacauuuacagcuacauacgcagacacaauauguauaggcuaccaugccaacaacucaaccgacacuguugacacaguacuugagaagaaugugacagugacacacucugucaaccuacuugaggacagucacaauggaaaacuaugucuacuaaaaggaauagccccacuacaauuggguaauugcagcguugccggauggaucuuaggaaacccagaaugcgaauuacugauuuccaaggaaucaugguccuacauuguagaaacaccaaaucccgagaauggaacauguuacccaggguauuucgccgacuaugaggaacugagggagcaauugaguucaguaucuucauuugagagauucgaaauauuccccaaaggaagcucauggcccaaccacaccgugaccggaguaucagcaucaugcucccauaaugggaaaagcaguuuuuacagaaauuugcuauggcugacggggaagaaugguuuguacccaaaccugagcauguccuauguaaacaacaaagggaaagaaguccuugugcuaugggguguucaucacccaccuaacauaggggaccaaagggcccucuaccauacagaaaaugcuuaugucucuguagugucuucacauuauagcagaagauucaccccagaaauagccaaaagacccaaaguaagagaucaggaaggaagaaucaacuacuacuggacucugcuggaacccggggacacaauaauauuugaggcaaauggaaaucuaauagcgccaugguaugcuuucgcacugaguagaggcuuuggaucaggaaucaucaccucaaaugcaccaaugggugaaugugaugcgaagugucaaacaccucagggagcuauaaacaguagucuuccuuuccagaauguacacccaguuacaauaggagaguguccaaaguaugucaggagugcaaaauuaaggaugguuacaggacuaaggaacaucccauccauucaauccagagguuuguuuggagccauugccgguuucauugaagggggguggacuggaaugguagaugggugguaugguuaucaucaucagaaugagcaaggaucuggcuaugcugcagaucaaaaaagcacacaaaaugccauuaacgggauuacaaacaaggugaauucuguaauugagaaaaugaacacucaauucacagcugugggcaaagaauucaacaaauuagaaagaaggauggaaaacuuaaauaaaaaaguugaugauggguuucuagacauuuggacauauaaugcagaauuguugguucuacuggaaaaugaaaggacuuuggauuuccaugacuccaaugugaagaaucuguaugagaaaguaaaaagccaauuaaagaauaaugccaaagaaauaggaaacggguguuuugaauucuaucacaaguguaacaaugaaugcauggaaagugugaaaaauggaacuuaugacuauccaaaauauuccgaagaaucaaaguuaaacagggagaaaauugauggaguaaaauuggaaucaaugggagucuaucagauucuggcgaucuacucaacugucgccaguucccugguucuuuuggucucccugggggcaaucagcuucuggauguguuccaaugggucuuugcaguguagaauaugcaucuga

SEQ ID NO: 32855 - RNA, 1698 nt, Artificial Sequence; identical to SEQ ID NO: 32812
  derived and/or modified CDS sequence (wt) from hemagglutinin__InfluenzaA__ABD95064

SEQ ID NO: 32856 - RNA, 1698 nt, Artificial Sequence
  derived and/or modified CDS sequence (wt) from hemagglutinin__InfluenzaA__ABD95075
augaaagcaaaacuacugguccuguuauguacauuuacagcuacauacgcagacacaauauguauaggcuaccaugccaacaacucaaccgacacuguugacacaguacuugagaagaaugugacagugacacacucugucaaccuacuugaggacagucacaauggaaaacuaugucuacuaaaaggaauagccccacuacaauuggguaauugcagcguugccggauggaucuuaggaaacccagaaugcgaauuacugauuuccaaggaaucaugguccuacauuguagaaacaccaaaucccgagaauggaacauguuacccaggguauuucgccgacuaugaggaacugagggagcaauugaguucaguaucuucauuugagagauucgaaauauuccccaaaggaagcucauggcccaaccacaccgugaccggaguaucagcaucaugcucccauaaugggaaaagcaguuuuuacagaaauuugcuauggcugacggggaagaaugguuuguacccaaaccugagcauguccuauguaaacaacaaagagaaagaaguccuugugcuaugggguguucaucacccaccuaacauaggggaccaaagggcccucuaccauacagaaaaugcuuaugucucuguagugucuucacauuauagcagaagauucaccccagaaauagccaaaagacccaaaguaagagaucaggaaggaagaaucaacuacuacuggacucugcuggaacccggggacacaauaauauuugaggcaaauggaaaucuaauagcgccaugguaugcuuucgcacugaguaaaggcuuuggaucaggaaucaucaccucaaaugcaccaaugggugaaugugaugcgaagugucaaacaccucagggagcuauaaacaguagucuuccuuuccagaauguacacccaguuacaauaggagaguguccaaaguaugucaggagugcaaaauuaaggaugguuacaggacuaaggaacaucccauccauucaauccagagguuuguuuggagccauugccgguuucauugaagggggguggacuggaaugguagaugggugguaugguuaucaucaucagaaugagcaaggaucuggcuaugcugcagaucaaaaaagcacacaaaaugccauuaacgggauuacaaacaaggugaauucuguaauugagaaaaugaacacucaauucacagcugugggcaaagaauucaacaaauuagaaagaaggauggaaaacuuaaauaaaaaaguugaugauggguuucuagacauuuggacauauaaugcagaauuguugguucuacuggaaaaugaaaggacuuuggauuuccaugacuccaaugugaagaaucuguaugagaaaguaaaaagccaauuaaagaauaaugccaaagaaauaggaaacggguguuuugaauucuaucacaaguguaacaaugaaugcauggaaagugugaaaaauggaacuuaugacuauccaaaauauuccgaagaaucaaaguuaaacagggagaaaauugauggaguaaaauuggaaucaaugggagucuaucagauucuggcgaucuacucaacugucgccaguucccugguucuuuuggucucccugggggcaaucagcuucuggauguguuccaaugggucuuugcaguguagaauaugcaucuga

SEQ ID NO: 32857 - RNA, 1698 nt, Artificial Sequence; identical to SEQ ID NO: 32854
  derived and/or modified CDS sequence (wt) from hemagglutinin__InfluenzaA__ABD95086

SEQ ID NO: 32858 - RNA, 1698 nt, Artificial Sequence; identical to SEQ ID NO: 32812
  derived and/or modified CDS sequence (wt) from hemagglutinin__InfluenzaA__ABD95097

SEQ ID NO: 32859 - RNA, 1698 nt, Artificial Sequence
  derived and/or modified CDS sequence (wt) from hemagglutinin__InfluenzaA__ABD95119
augaaagcaaaacuacugauccuguuauguacauuuacagcuacauacgcagacacaauauguauaggcuaccaugccaacaacucaaccgacacuguugacacaguacuugagaagaaugugacagugacacacucugucaaccuacuugaggacagucacaauggaaaacuaugucuacuaaaaggaauagccccacuacaauuggguaauugcagcguugccggauggaucuuaggaaacccagaaugcgaauuacugauuuccaaggaaucaugguccuacauuguagaaacaccaaaucccgagaauggaacauguuacccaggguauuucgccgacuaugaggaacugagggagcaauugaguucaguaucuucauuugagagauucgaaauauuccccaaaggaagcucauggcccaaccacaccgugaccggaguaucagcaucaugcucccauaaugggaaaagcaguuuuuacagaaauuugcuauggcugacggggaagaaugguuuguacccaaaccugagcauguccuauguaaacaacaaagagaaagaaguccuugugcuaugggguguucaucacccaccuaacauaggggaccaaagggcccucuaccauacagaaaaugcuuaugucucuguagugucuucacauuauagcagaagauucaccccagaaauagccaaaagacccaaaguaagagaucaggaaggaagaaucaacuacuacuggacucugcuggaacccggggacacaauaauauuugaggcaaauggaaaucuaauagcgccaugguaugcuuucgcacugaguagaggcuuuggaucaggaaucaucaccucaaaugcaccaaugggugaaugugaugcgaagugucaaacaccucagggagcuauaaacaguagucuuccuuuccagaauguacacccaguuacaauaggagaguguccaaaguaugucaggagugcaaaauuaaggaugguuacaggacuaaggaacaucccauccauucaauccagagguuuguuuggagccauugccgguuucauugaagggggguggacuggaaugguagaugggugguaugguuaucaucaucagaaugagcaaggaucuggcuaugcugcagaucaaaaaagcacacaaaaugccauuaacgggauuacaaacaaggugaauucuguaauugagaaaaugaacacucaauucacagcugugggcaaagaauucaacaaauuagaaagaaggauggaaaacuuaaauaaaaaaguugaugauggguuucuagacauuuggacauauaaugcagaauuguugguucuacuggaaaaugaaaggacuuuggauuuccaugacuccaaugugaagaaucuguaugagaaaguaaaaagccaauuaaagaauaaugccaaagaaauaggaaacggguguuuugaauucuaucacaaguguaacaaugaaugcauggaaagugugaaaaauggaacuuaugacuauccaaaauauuccgaagaaucaaaguuaaacagggagaaaauugaugggguaaaauuggaaucaaugggagucuaucagauucuggcgaucuacucaacugucgccaguucccugguucuuuuggucucccugggggcaaucagcuucuggauguguuccaaugggucuuugcaguguagaauaugcaucuga

SEQ ID NO: 32860 - RNA, 1698 nt, Artificial Sequence
  derived and/or modified CDS sequence (wt) from hemagglutinin__InfluenzaA__ABD95130
augaaagcaaaacuacugguccuguuauguacauuuacagcuacauacgcagacacaauauguauaggcuaccaugccaacaacucaaccgacacuguugacacaguacuugagaagaacgugacagugacacacucugucaaccuacuugaggacagucacaauggaaaacuaugucuacuaaaaggaauagccccacuacaauuggguaauugcagcguugccggauggaucuuaggaaacccagaaugcgaauuacugauuuccaaggaaucaugguccuacauuguagaaacaccaaaucccgagaauggaacauguuacccaggguauuucgccgacuaugaggaacugagggagcaauugaguucaguaucuucauuugagagauucgaaauauuccccaaaggaagcucauggcccaaccacaccgugaccggaguaucagcaucaugcucccauaaugggaaaagcaguuuuuacagaaauuugcuauggcugacggggaagaaugguucguacccaaaccugagcauguccuauguaaacaacaaagagaaagaaguccuugugcuaugggguguucaucacccaccuaacauaggggaccaaagggcccucuaccauacagaaaaugcuuaugucucuguagugucuucacauuauagcagaagauucaccccagaaauagccaaaagacccaaaguaagagaucaggaaggaagaaucaacuacuacuggacucugcuggaacccggggacacaauaauauuugaggcaaauggaaaucuaauagcgccaugguaugcuuucgcacugaguagaggcuuuggaucaggaaucaucaccucaaaugcaccaaugggugaaugugaugcgaagugucaaacaccucagggagcuauaaacaguagucuuccuuuccagaauguacacccaguuacaauaggagaguguccaaaguaugucaggagugcaaaauuaaggaugguuacaggacuaaggaacaucccauccauucaauccagagguuuguuuggagccauugccgguuucauugaagggggguggacuggaaugguagaugggugguaugguuaucaucaucagaaugagcaaggaucuggcuaugcugcagaucaaaaaagcacacaaaaugccauuaacgggauuacaaacaaggugaauucuguaauugagaaaaugaacacccaauucacagcugugggcaaagaauucaacaaauuagaaagaaggauggaaaacuuaaauaaaaaaguugaugauggguuucuagacauuuggacauauaaugcagaauuguugguucuacuggaaaaugaaaggacuuuggauuuccaugacuccaaugugaagaaucuguaugagaaaguaaaaagccaauuaaagaauaaugccaaagaaauaggaaacggguguuuugaauucuaucacaaguguaacaaugaaugcauggaaagugugaaaaauggaacuuaugacuauccaaaauauuccgaagaaucaaaguuaaacagggagaaaauugauggaguaaaauuggaaucaaugggagucuaucagauucuggcgaucuacucaacugucgccaguucccugguucuuuuggucucccugggggcaaucagcuucuggauguguuccaaugggucuuugcaguguagaauaugcaucuga

SEQ ID NO: 32861 - RNA, 1698 nt, Artificial Sequence; identical to SEQ ID NO: 32812
  derived and/or modified CDS sequence (wt) from hemagglutinin__InfluenzaA__ABD95141

SEQ ID NO: 32862 - RNA, 1698 nt, Artificial Sequence; identical to SEQ ID NO: 32812
  derived and/or modified CDS sequence (wt) from hemagglutinin__InfluenzaA__ABD95152

SEQ ID NO: 32863 - RNA, 1698 nt, Artificial Sequence; identical to SEQ ID NO: 32859
  derived and/or modified CDS sequence (wt) from hemagglutinin__InfluenzaA__ABD95163

SEQ ID NO: 32864 - RNA, 1698 nt, Artificial Sequence; identical to SEQ ID NO: 32854
  derived and/or modified CDS sequence (wt) from hemagglutinin__InfluenzaA__ABD95174

SEQ ID NO: 32865 - RNA, 1698 nt, Artificial Sequence
  derived and/or modified CDS sequence (wt) from hemagglutinin__InfluenzaA__ABD95185
augaaagcaaaacuacugguccuguuauguacauuuacagcuacauacgcagacacaauauguauaggcuaccaugccaacaacucaaccgacacuguugacacaguacuugagaagaaugugacagugacacacucugucaaccuacuugaggacagucacaauggaaaacuaugucuacuaaaaggaauagccccacuacaauuggguaauugcagcguugccggauggaucuuaggaaacccagaaugcgaauuacugauuuccaaggaaucaugguccuacauuguagaaacaccaaaucccgagaauggaacauguuacccaggguauuucgccgacuaugaggaacugagggagcaauugaguucaguaucuucauuugagagauucgaaauauuccccaaaggaagcucauggcccaaccacaccgugaccggaguaucagcaucaugcucccauaauggggaaagcaguuuuuacagaaauuugcuauggcugacggggaagaaugguuuguacccaaaccugagcauguccuauguaaacaacaaagagaaagaaguccuugugcuaugggguguucaucacccaccuaacauaggggaccaaagggcccucuaccauacagaaaaugcuuaugucucuguagugucuucacauuauagcagaagauucaccccagaaauagccaaaagacccaaaguaagagaucaggaaggaagaaucaacuacuacuggacucugcuggaacccggggacacaauaauauuugaggcaaauggaaaucuaauagcgccaugguaugcuuucgcacugaguagaggcuuuggaucaggaaucaucaccucaaaugcaccaaugggugaaugugaugcgaagugucaaacaccucagggagcuauaaacaguagucuuccuuuccagaauguacacccaguuacaauaggagaguguccaaaguaugucaggagugcaaaauuaaggaugguuacaggacuaaggaacaucccauccauucaauccagagguuuguuuggagccauugccgguuucauugaagggggguggacuggaaugguagaugggugguaugguuaucaucaucagaaugagcaaggaucuggcuaugcugcagaucaaaaaagcacacaaaaugccauuaacgggauuacaaacaaggugaauucuguaauugagaaaaugaacacccaauucacagcugugggcaaagaauucaacaaauuagaaagaaggauggaaaacuuaaauaaaaaaguugaugauggguuucuagacauuuggacauauaaugcagaauuguugguucuacuggaaaaugaaaggacuuuggauuuccaugacuccaaugugaagaaucuguaugagaaaguaaaaagccaauuaaagaauaaugccaaagaaauaggaaacggguguuuugaauucuaucacaaguguaacaaugaaugcauggaaagugugaaaaauggaacuuaugacuauccaaaauauuccgaagaaucaaaguuaaacagggagaaaauugauggaguaaaauuggaaucaaugggagucuaucagauucuggcgaucuacucaacugucgccaguucccugguucuuuuggucucccugggggcaaucagcuucuggauguguuccaaugggucuuugcaguguagaauaugcaucuga

SEQ ID NO: 32866 - RNA, 1698 nt, Artificial Sequence
  derived and/or modified CDS sequence (wt) from hemagglutinin__InfluenzaA__ABD95196
augaaagcaaaacuacugguccuguuauguacauuuacagcuacauacgcagacacaauauguauaggcuaccaugccaacaacucaaccgacacuguugacacaguacuugagaagaaugugacagugacacacucugucaaccuacuugaggacagucacaauggaaaacuaugucuacuaaaaggaauagccccacuacaauuggguaauugcagcguugccggauggaucuuaggaaacccagaaugcgaauuacugauuuccaaggaaucaugguccuacauuguagaaacaccaaaucccgagaauggaacauguuacccaggguauuucgccgacuaugaggaacugagggagcaauugaguucaguaucuucauuugagagauucgaaauauucccuaaaggaagcucauggcccaaccacaccgugaccggaguaucagcaucaugcucccauaaugggaaaagcaguuuuuacagaaauuugcuauggcugacggggaagaaugguuuguacccaaaccugagcauguccuauguaaacaacaaagggaaagaaguccuugugcuaugggguguucaucacccaccuaacauaggggaccaaagggcccucuaccauacagaaaaugcuuaugucucuguagugucuucacauuauagcagaagauucaccccagaaauagccaaaagacccaaaguaagagaucaggaaggaagaaucaacuacuacuggacucugcuggaacccggggacacaauaauauuugaggcaaauggaaaucuaauagcgccaugguaugcuuucgcacugaguagaggcuuuggaucaggaaucaucaccucaaaugcaccaaugggugaaugugaugcgaagugucaaacaccucagggagcuauaaacaguagucuuccuuuccagaauguacacccaguuacaauaggagaguguccaaaguaugucaggagugcaaaauuaaggaugguuacaggacuaaggaacaucccauccauucaauccagagguuuguuuggagccauugccgguuucauugaagggggguggacuggaaugguagaugggugguaugguuaucaucaucagaaugagcaaggaucuggcuaugcugcagaucaaaaaagcacacaaaaugccauuaacgggauuacaaacaaggugaauucuguaauugagaaaaugaacacucaauucacagcugugggcaaagaauucaacaaauuagaaagaaggauggaaaacuuaaauaaaaaaguugaugauggguuucuagacauuuggacauauaaugcagaauuguugguucuacuggaaaaugaaaggacuuuggauuuccaugacuccaaugugaagaaucuguaugagaaaguaaaaagccaauuaaagaauaaugccaaagaaauaggaaacggguguuuugaauucuaucacaaguguaacaaugaaugcauggaaagugugaaaaauggaacuuaugacuauccaaaauauuccgaagaaucaaaguuaaacagggagaaaauugauggaguaaaauuggaaucaaugggagucuaucagauucuggcgaucuacucaacugucgccaguucccugguucuuuuggucucccugggggcaaucagcuucuggauguguuccaaugggucuuugcaguguagaauaugcaucuga

SEQ ID NO: 32867 - RNA, 1698 nt, Artificial Sequence
  derived and/or modified CDS sequence (wt) from hemagglutinin__InfluenzaA__ABD95207
augaaaguaaaacuacugguccuguuauguacauuuacagcuacauaugcagacacaauauguauaggcuaccaugccaacaacucaaccgacacuguugacacaguacuugagaagaaugugacagugacacacucugucaaccuacuugaggacagucacaauggaaaacuaugucuacuaaaaggaauagccccacuacaauuggguaauugcagcguugccggauggaucuuaggaaacccagaaugcgaauuacugauuuccaaggaaucaugguccuacauuguagaaacaccaaauccugagaauggaacauguuacccaggguauuucgccgacuaugaggaacugagggagcaauugaguucaguaucuucauuugagagguucgaaauauuccccaaagaaagcucauggcccaaccacaccguaaccggaguaucagcaucaugcucccauaaugggaaaagcaguuuuuacagaaauuugcuauggcugacggggaagaaugguuuguacccaaaccugagcaaguccuaugcaaacaacaaagagaaagaaguccuuguacuaugggguguucaucacccgccuaacauaggggaccaaagggcccucuaucauacagaaaaugcuuaugucucuguagugucuucacauuauagcagaagauucaccccagaaauagccaaaagacccaaaguaagagaucaggaaggaagaaucaacuacuacuggacucugcuggaacccggggauacaauaauauuugaggcaaauggaaaucuaauagcgccaagguaugcuuucgcacugaguagaggcuuuggaucaggaaucaucaccucaaaugcaccaauggaugaaugugaugcgaagugucaaacaccucagggagcuauaaacagcagucuuccuuuccagaauguacacccagucacaauaggagaguguccaaaguaugucaggagugcaaaauuaaggaugguuacaggacuaaggaacaucccauccauucaauccagagguuuguuuggagccauugccgguuucauugaagggggguggacuggaaugguagaugguugguaugguuaucaucaucagaaugagcaaggaucuggcuaugcugcagaucaaaaaagcacacaaaaugccauuaacgggauuacaaacaaggugaauucuguaauugagaaaaugaacacucaauucacagcugugggcaaagaauucaacaaauuggaaagaaggauggaaaacuuaaauaaaaaaguugaugauggguuucuagacauuuggacauauaaugcagaauuguugguucuacuggaaaaugaaaggacuuuggauuuccaugacuccaaugugaagaaucuguaugagaaaguaaaaagccaauuaaagaauaaugccaaagaaauaggaaacggguguuuugaauucuaucacaaguguaacgaugaaugcauggagagugugaaaaauggaacuuaugacuauccaaaauauuccgaagaaucaaaguuaaacagggagaaaauugauggagugaaauuggaaucaaugggagucuaucagauucuggcgaucuacucaacagucgccaguucccugguucuuuuggucucccugggggcaaucagcuucuggauguguuccaaugggucuuugcaguguagaauaugcaucuaa

SEQ ID NO: 32868 - RNA, 1698 nt, Artificial Sequence; identical to SEQ ID NO: 32812
  derived and/or modified CDS sequence (wt) from hemagglutinin__InfluenzaA__ABD95218

SEQ ID NO: 32869 - RNA, 1698 nt, Artificial Sequence
  derived and/or modified CDS sequence (wt) from hemagglutinin__InfluenzaA__ABD95229
augaaagcaaaacuacugauccuguuauguacauuuacagcuacauacgcagacacaauauguauaggcuaccaugccaacaacucaaccgacacuguugacacaguacuugagaagaaugugacagugacacacucugucaaccuacuugaggacagucacaauggaaaacuaugucuacuaaaaggaauagccccacuacaauuggguaauugcagcguugccggauggaucuuaggaaacccagaaugcgaauuacugauuuccaaggaaucaugguccuacauuguagaaacaccaaaucccgagaauggaacauguuacccaggguauuucgccgacuaugaggaacugagggagcaauugaguucaguaucuucauuugagagauucgaaauauuccccaaaggaagcucauggcccaaccacaccgugaccggaguaucagcaucaugcucccauaaugggaaaagcaguuuuuacagaaauuugcuauggcugacggggaagaaugguuuguacccaaaccugagcauguccuauguaaacaacaaagagaaagaaguccuugugcuaugggguguucaucacccaccuaacauaggggaccaaagggcccucuaccauacagaaaaugcuuaugucucuguagugucuucacauuauagcagaagauucaccccagaaauagccaaaagacccaaaguaagagaucaggaaggaagaaucaacuacuacuggacucugcuggaacccggggacacaauaauauuugaggcaaauggaaaucuaauagcgccaugguaugcuuucgcacugaguagaggcuuuggaucaggaaucaucaccucaaaugcaccaaugggugaaugugaugcgaagugucaaacaccucagggagcuauaaacaguagucuuccuuuccagaauguacacccaguuacaauaggagaguguccaaaguaugucaggagugcaaaauuaaggaugguuacaggacuaaggaacaucccauccauucaauccagagguuuguuuggagccauugccgguuucauugaagggggguggacuggaaugguagaugggugguaugguuaucaucaucagaaugagcaaggaucuggcuaugcugcagaucaaaagagcacacaaaaugccauuaacgggauuacaaacaaggugaauucuguaauugagaaaaugaacacucaauucacagcugugggcaaagaauucaacaaauuagaaagaaggauggaaaacuuaaauaaaaaaguugaugauggguuucuagacauuuggacauauaaugcagaauuguugguucuacuggaaaaugaaaggacuuuggauuuccaugacuccaaugugaagaaucuguaugagaaaguaaaaagccaauuaaagaauaaugccaaagaaauaggaaacggguguuuugaauucuaucacaaguguaacaaugaaugcauggaaagugugaaaaauggaacuuaugacuauccaaaauauuccgaagaaucaaaguuaaacagggagaaaauugaugggguaaaauuggaaucaaugggagucuaucagauucuggcgaucuacucaacugucgccaguucccugguucuuuuggucucccugggggcaaucagcuucuggauguguuccaaugggucuuugcaguguagaauaugcaucuga

SEQ ID NO: 32870 - RNA, 1698 nt, Artificial Sequence
  derived and/or modified CDS sequence (wt) from hemagglutinin__InfluenzaA__ABD95240
augaaagcaaaacugcugguccuguuauguacauuuacagcuacauacgcagacacaauauguauaggcuaccaugccaacaacucaaccgacacuguugacacaguacuugagaagaaugugacagugacacacucugucaaccuacuugaggacagucacaauggaaaacuaugucuacuaaaaggaauagccccacuacaauuggguaauugcagcguugccggauggaucuuaggaaacccagaaugcgaauuacugauuuccaaggaaucaugguccuacauuguagaaacaccaaaucccgagaauggaacauguuacccaggguauuucgccgacuaugaggaacugagggagcaauugaguucaguaucuucauuugagagauucgaaauauuccccaaaggaagcucauggcccaaccacaccgugaccggaguaucagcaucaugcucccauaaugggaaaagcaguuuuuacagaaauuugcuauggcugacggggaagaaugguuuguacccaaaccugagcauguccuauguaaacaacaaagagaaagaaguccuugugcuaugggguguucaucacccaccuaacauaggggaccaaagggcccucuaccauacagaaaaugcuuaugucucuguagugucuucacauuauagcagaagauucaccccagaaauagccaaaagacccaaaguaagagaucaggaaggaagaaucaacuacuacuggacucugcuggaacccggggacacaauaauauuugaggcaaauggaaaucuaauagcgccaugguaugcuuucgcacugaguagaggcuuuggaucaggaaucaucaccucaaaugcaccaaugggugaaugugaugcgaagugucaaacaccucagggagcuauaaacaguagucuuccuuuccagaauguacacccaguuacaauaggagaguguccaaaguaugucaggagugcaaaauuaaggaugguuacaggacuaaggaacaucccauccauucaauccagagguuuguuuggagccauugccgguuucauugaagggggguggacuggaaugguagaugggugguaugguuaucaucaucagaaugagcaaggaucuggcuaugcugcagaucaaaaaagcacacaaaaugccauuaacgggauuacaaacaaggugaauucuguaauugagaaaaugaacacucaauucacagcugugggcaaagaauucaacaaauuagaaagaaggauggaaaacuuaaauaaaaaaguugaugauggguuucuagacauuuggacauauaaugcagaauuguugguucuacuggaaaaugaaaggacuuuggauuuccaugacuccaaugugaagaaucuguaugagaaaguaaaaagccaauuaaagaauaaugccaaagaaauaggaaacggguguuuugaauucuaucacaaguguaacaaugaaugcauggaaagugugaaaaauggaacuuaugacuauccaaaauauuccgaagaaucaaaguuaaacagggagaaaauugauggaguaaaauuggaaucaaugggagucuaucagauucuggcgaucuacucaacugucgccaguucccugguucuuuuggucucccugggggcaaucagcuucuggauguguuccaaugggucuuugcaguguagaauaugcaucuga

SEQ ID NO: 32871 - RNA, 1698 nt, Artificial Sequence
  derived and/or modified CDS sequence (wt) from hemagglutinin__InfluenzaA__ABD95251
augaaagcaaaacuacugguccuguuauguacauuuacagcuacauacgcagacacaauauguauaggcuaccaugccaacaacucaaccgacacuguugacacaguacuugagaagaaugugacagugacacacucugucaaccuacuugaggacagucacaauggaaaacuaugucuacuaaaaggaauagccccacuacaauuggguaauugcagcguugccggauggaucuuaggaaacccagaaugcgaauuacugauuuccaaggaaucaugguccuacauuguagaaacaccaaaucccgagaauggaacauguuacccaggguauuucgccgacuaugaggaacugagggagcaauugaguucaguaucuucauuugagagauucgaaauauuccccaaaggaagcucauggcccaaccacaccgugaccggaguaucagcaucaugcucccauaaugggaaaagcaguuuuuacagaaauuugcuauggcugacggggaagaaugguuuguacccaaaccugagcauguccuauguaaacaacaaagggaaagaaguccuugugcuaugggguguucaucacccaccuaacauaggggaccaaagggcccucuaccauacagaaaaugcuuaugucucuguagugucuucacauuauagcagaagauucaccccagaaauagccaaaagacccaaaguaagagaucaggaaggaagaaucaacuacuacuggacucugcuggaacccggggacacaauaauauuugaggcaaauggaaaucuaauagcgccaugguaugcuuucgcacugaguagaggcuuuggaucaggaaucaucaccucaaaugcaccaaugggugaaugugaugcgaagugucaaacaccucagggagcuauaaacaguagucuuccuuuccagaauguacacccaguuacaauaggagaguguccaaaguaugucaggagugcaaaauugaggaugguuacaggacuaaggaacaucccauccauucaauccagagguuuguuuggagccauugccgguuucauugaagggggguggacuggaaugguagaugggugguaugguuaucaucaucagaaugagcaaggaucuggcuaugcugcagaucaaaaaagcacacaaaaugccauuaacgggauuacaaacaaggugaauucuguaauugagaaaaugaacacucaauucacagcugugggcaaagaauucaacaaauuagaaagaaggauggaaaacuuaaauaaaaaaguugaugauggguuucuagacauuuggacauauaaugcagaauuguugguucuacuggaaaaugaaaggacuuuggauuuccaugacuccaaugugaagaaucuguaugagaaaguaaaaagccaauuaaagaauaaugccaaagaaauaggaaacggguguuuugaauucuaucacaaguguaacaaugaaugcauggaaagugugaaaaauggaacuuaugacuauccaaaauauuccgaagaaucaaaguuaaacagggagaaaauugauggaguaaaauuggaaucaaugggagucuaucagauucuggcgaucuacucaacugucgccaguucccugguucuuuuggucucccugggggcaaucagcuucuggauguguuccaaugggucuuugcaguguagaauaugcaucuga

SEQ ID NO: 32872 - RNA, 1698 nt, Artificial Sequence
  derived and/or modified CDS sequence (wt) from hemagglutinin__InfluenzaA__ABD95262
augaaaguaaaacuacugguccuguuauguacauuuacagcuacauaugcagacacaauauguauaggcuaccaugccaacaacucaaccgacacuguugacacaguacuugagaagaaugugacagugacacacucugucaaccuacuugaggacagucacaauggaaaacuaugucuacuaaaaggaauagccccacuacaauuggguaauugcagcguugccggauggaucuuaggaaacccagaaugcgaauuacugauuuccaaggaaucaugguccuacauuguagaaacaccaaauccugagaauggaacauguuacccaggguauuucgccgacuaugaggaacugagggagcaauugaguucaguaucuucauuugagagguucgaaauauuccccaaagaaagcucauggcccaaccacaccguaaccggaguaucagcaucaugcucccacaaugggaaaagcaguuuuuacagaaaucugcuauggcugacggggaagaaugguuuguacccaaaccugagcaaguccuaugcaaacaacaaagagaaagaaguccuuguacuaugggguguucaucacccgccuaacauaggggaccaaagggcccucuaucauacagaaaaugcuuaugucucuguagugucuucacauuauagcagaagauucaccccagaaauagccaaaagacccaaaguaagagaucaggaaggaagaaucaacuacuacuggacucugcuggaacccggggauacaauaauauuugaggcaaauggaaaucuaauagcgccaagguaugcuuucgcacugaguagaggcuuuggaucaggaaucaucaccucaaaugcaccaauggaugaaugugaugcgaagugucaaacaccucagggagcuauaaacagcagucuuccuuuccagaauguacacccagucacaauaggagaguguccaaaguaugucaggagugcaaaauuaaggaugguuacaggacuaaggaacaucccauccauucaauccagagguuuguuuggagccauugccgguuucauugaagggggguggacuggaaugguagaugguugguaugguuaucaucaucagaaugagcaaggaucuggcuaugcugcagaucaaaaaagcacacaaaaugccauuaacgggaucacaaacaaggugaauucuguaauugagaaaaugaacacucaauucacagcugugggcaaagaauucaacaaauuggaaagaaggauggaaaacuuaaauaaaaaaguugaugauggguuucuagacauuuggacauauaaugcagaauuguugguucuacuggaaaaugaaaggacuuuggauuuccaugacuccaaugugaagaaucuguaugagaaaguaaaaagccaauuaaagaauaaugccaaagaaauaggaaacggguguuuugaauucuaucacaaguguaacgaugaaugcauggagagugugaaaaauggaacuuaugacuauccaaaauauuccgaagaaucaaaguuaaacagggagaaaauugauggagugaaauuggaaucaaugggagucuaucagauucuggcgaucuacucaacagucgccaguucccugguucuuuuggucucccugggggcaaucagcuucuggauguguuccaaugggucuuugcaguguagaauaugcaucuaa

SEQ ID NO: 32873 - RNA, 1698 nt, Artificial Sequence; identical to SEQ ID NO: 32812
  derived and/or modified CDS sequence (wt) from hemagglutinin__InfluenzaA__ABD95273

SEQ ID NO: 32874 - RNA, 1698 nt, Artificial Sequence; identical to SEQ ID NO: 32810
  derived and/or modified CDS sequence (wt) from hemagglutinin__InfluenzaA__ABD95284

SEQ ID NO: 32875 - RNA, 1698 nt, Artificial Sequence
  derived and/or modified CDS sequence (wt) from hemagglutinin__InfluenzaA__ABD95295
augaaagcaaaacugcugguccuguuauguacauuuacagcuacauacgcagacacaauaugcauaggcuaccaugccaacaacucaaccgacacuguugacacaguacuugagaagaaugugacagugacacacucugucaaccuacuugaggacagucacaauggaaaacuaugucuacuaaaaggaauagccccacuacaauuggguaauugcagcguugccggauggaucuuaggaaacccagaaugcgaauuacugauuuccaaggaaucaugguccuacauuguagaaacaccaaaucccgagaauggaacauguuacccaggguauuucgccgacuaugaggaacugagggagcaauugaguucaguaucuucauuugagagauucgaaauauuccccaaaggaagcucauggcccaaccacaccgugaccggaguaucagcaucaugcucccauaaugggaaaagcaguuuuuacagaaauuugcuauggcugacggggaagaaugguuuguacccaaaccugagcauguccuauguaaacaacaaagagaaagaaguccuugugcuaugggguguucaucacccaccuaacauaggggaccaaagggcccucuaccauacagaaaaugcuuaugucucuguagugucuucacauuauagcagaagauucaccccagaaauagccaaaagacccaaaguaagagaucaggaaggaagaaucaacuacuacuggacucugcuggaacccggggacacaauaauauuugaggcaaauggaaaucuaauagcgccaugguaugcuuucgcacugaguagaggcuuuggaucaggaaucaucaccucaaaugcaccaaugggugaaugugaugcgaagugucaaacaccucagggagcuauaaacaguagucuuccuuuccagaauguacacccaguuacaauaggagaguguccaaaguaugucaggagugcaaaauuaaggaugguuacaggacuaaggaacaucccauccauucaauccagagguuuguuuggagccauugccgguuucauugaagggggguggacuggaaugguagaugggugguaugguuaucaucaucagaaugagcaaggaucuggcuaugcugcagaucaaaaaagcacacaaaaugccauuaacgggauuacaaacaaggugaauucuguaauugagaaaaugaacacucaauucacagcugugggcaaagaauucaacaaauuagaaagaaggauggaaaacuuaaauaaaaaaguugaugauggguuucuagacauuuggacauauaaugcagaauuguugguucuacuggaaaaugaaaggacuuuggauuuccaugacuccaaugugaagaaucuguaugagaaaguaaaaagccaauuaaagaauaaugccaaagaaauaggaaacggguguuuugaauucuaucacaaguguaacaaugaaugcauggaaagugugaaaaauggaacuuaugacuauccaaaauauuccgaagaaucaaaguuaaacagggagaaaauugauggaguaaaauuggaaucaaugggagucuaucagauucuggcgaucuacucaacugucgccaguucccugguucuuuuggucucccugggggcaaucagcuucuggauguguuccaaugggucuuugcaguguagaauaugcaucuga

SEQ ID NO: 32876 - RNA, 1698 nt, Artificial Sequence
  derived and/or modified CDS sequence (wt) from hemagglutinin__InfluenzaA__ABD95306
augaaagcaaaacuacugguccuguuauguacauuuacagcuacauacgcagacacaauauguauaggcuaccaugccaacaacucaaccgacacuguugacacaguacuugagaagaaugugacagugacacacucugucaaccuacuugaggacagucacaauggaaaacuaugucuacuaaaaggaauagccccacuacaauuggguaauugcagcguugccggauggaucuuaggaaacccagaaugcgaauuacugauuuccaaggaaucaugguccuacauuguagaaacaccaaaucccgagaauggaacauguuacccaggguauuucgccgacuaugaggaacugagggagcaauugaguucaguaucuucauuugagagauucgaaauauuccccaaaggaagcucauggcccaaccacaccgugaccggaguaucagcaucaugcucccauaaugggaaaagcaguuuuuacagaaauuugcuauggcugacggggaagaaugguuuguacccaaaccugagcauguccuauguaaacaacaaagagaaagaaauccuugugcuaugggguguucaucacccaccuaacauaggggaccaaagggcccucuaccauacagaaaaugcuuaugucucuguagugucuucacauuauagcagaagauucaccccagaaauagccaaaagacccaaaguaagagaucaggaaggaagaaucaacuacuacuggacucugcuggaacccggggacacaauaauauuugaggcaaauggaaaucuaauagcgccaugguaugcuuucgcacugaguagaggcuuuggaucaggaaucaucaccucaaaugcaccaaugggugaaugugaugcgaagugucaaacaccucagggagcuauaaacaguagucuuccuuuccagaauguacacccaguuacaauaggagaguguccaaaguaugucaggagugcaaaauuaaggaugguuacaggacuaaggaacaucccauccauucaauccagagguuuguuuggagccauugccgguuucauugaagggggguggacuggaaugguagaugggugguaugguuaucaucaucagaaugagcaaggaucuggcuaugcugcagaucaaaaaagcacacaaaaugccauuaacgggauuacaaacaaggugaauucuguaauugagaaaaugaacacucaauucacagcugugggcaaagaauucaacaaauuagaaagaaggauggaaaacuuaaauaaaaaaguugaugauggguuucuagacauuuggacauauaaugcagaauuguugguucuacuggaaaaugaaaggacuuuggauuuccaugacuccaaugugaagaaucuguaugagaaaguaaaaagccaauuaaagaauaaugccaaagaaauaggaaacggguguuuugaauucuaucacaaguguaacaaugaaugcauggaaagugugaaaaauggaacuuaugacuauccaaaauauuccgaagaaucaaaguuaaacagggagaaaauugaugggguaaaauuggaaucaaugggagucuaucagauucuggcgaucuacucaacugucgccaguucccugguucuuuuggucucccugggggcaaucagcuucuggauguguuccaaugggucuuugcaguguagaauaugcaucuga

SEQ ID NO: 32877 - RNA, 1698 nt, Artificial Sequence; identical to SEQ ID NO: 32854
  derived and/or modified CDS sequence (wt) from hemagglutinin__InfluenzaA__ABD95328

SEQ ID NO: 32878 - RNA, 1701 nt, Artificial Sequence
  derived and/or modified CDS sequence (wt) from hemagglutinin__InfluenzaA__ABD95339
augaaagcaaaacugcugguccuguuaugugcacuuucagcuacagaugcagacacaauauguauaggcuaccaugcgaacaacucaaccgauacuguugacacaguacucgaaaagaacgugacagugacacacucugucaaccuacuugaggacagucacaacggaaaacuaugcagacuaaaaggaauagccccacuacaauuggggaaaugcagcauugccggauggaucuuaggaaacccagaaugugaaucacuguuuucuaagaaaucaugguccuacauugcagaaacaccaaacucugagaaugggacauguuacccaggguauuucgccgacuaugaggaacugagggagcaauugaguucaguaucaucauucgagagauucgaaauauuccccaaggaaaguucauggcccaaacacagcguaaccagaggaguaacggcaucaugcucccauaaggggaaaagcaguuuuuacagaaauuugcuauggcugacggagaaaaauggcucguacccaaaucugagcaaguccuaugugaacgacaaagagaaagaaguccuuguacuaugggguguucaucacccgucuaacauagaggaccaaaagaccaucuaucguaaagaaaaugcuuaugucucuguagugucuucacauuauaacagaagauucaccccagaaauagcaaaacgacccaaaguaagagaucaagaagggagaauuaacuacuacuggacucugcuggaaccaggggacacaauaauauuugaggcaaauggaaaucuaauagcgccaugguaugcuuucgcacugaguagaggcuuugggucaggaaucaucaccucaaacguaucaauggaugaaugugacgcgaagugucaaacaccccagggagcuauaaacaguagucuuccuuuccagaauguacacccagucacaauaggagagugcccaaaauacgucaggaguacaaaauuaaggauggucacaggacuaaggaacauuccauccauucaauccagagguuuguuuggagccauugccgguuucauugaagggggauggacuggaaugauagauggaugguaugguuaucaucaucagaaugaacagggauccggcuaugcugcagaucaaaaaagcacacaaaaugccauuaacgggauuacaaacaaggugaacucuguuaucgagaaaaugaacacucaauucacagcuguagguaaagaauucaacaaauuagaaaaaaggauggaaaacuuaaauaaaaaaguugaugauggguuucuggacauuuggacauauaaugcagaauuguugguucuacuggaaaaugaaaggacuuuggauuuucaugacucaaaugugaagaaccuguaugagaagguaaaaagccaauuaaagaauaaugccaaagaaauaggaaacggguguuuugaauucuaccacaaguguaacaaugaaugcauggaaaguguaaaaaauggaacuuaugacuauccaaaauauucagaggaaucaaaguuaaacagggaaaaaauugauggagugaaauuggaaucaaugggagucuaucagauucuggcgaucuacucaacugucgccaguucacuggugcuuuuggucucccugggggcaaucagcuucuggauguguucuaaugggucuuugcagugcagaauaugcaucuga

SEQ ID NO: 32879 - RNA, 1698 nt, Artificial Sequence; identical to SEQ ID NO: 32808
  derived and/or modified CDS sequence (wt) from hemagglutinin__InfluenzaA__ABE11657

SEQ ID NO: 32880 - RNA, 1698 nt, Artificial Sequence
  derived and/or modified CDS sequence (wt) from hemagglutinin__InfluenzaA__ABE11668
augaaagcaaaacuacugguccuguuauguacauuuacagcuacauacgcagacacaauauguauaggcuaccaugccaacaacucaaccgacacuguugacacaguacuugagaagaaugugacagugacacacucugucaaccuacuugaggacagucacaauggaaaacuaugucuacuaaaagggauagccccacuacaauuggguaauugcagcguugccggauggaucuuaggaaacccagaaugcgaauuacugauuuccaaggaaucaugguccuacauuguagaaacaccaaauccugagaauggaacauguuacccaggguauuucgccgacuaugaggaacugagggagcaauugaguucaguaucuucauuugagagauucgaaauauuccccaaagaaagcucauggcccaaccacaccguaaccggaguaucagcaucaugcucccauaaugggaaaagcaguuuuuacagaaauuugcuauggcugacggggaagaaugguuuguacccaaaccugagcauguccuauguaaacaacaaagagaaagaaguccuugugcuaugggguguucaucacccaccuaacauaggggaccaaagggcccucuaucauacagaaaaugcuuaugucucuguagugucuucacauuauagcagaagauucaccccagaaauagccaaaagacccaaaguaagagaucaggaaggaagaaucaacuacuacuggacucugcuggaacccggggacacaauaauauuugaggcaaauggaaaucuaauagcgccaugguaugcuuucgcacugaguagaggcuuuggaucaggaaucaucaccucaaaugcaccaauggaugaaugugaugcgaagugucaaacaccucaaggagcuauaaacaguagucuuccuuuccagaauguacacccaguuacaauaggagaguguccaaaguaugucaggagugcaaaauuaaggaugguuacaggacuaaggaacaucccauccauucaauccagagguuuguuuggagccauugccgguuucauugaagggggguggacuggaaugguagaugggugguaugguuaucaucaucagaaugagcaaggaucuggcuaugcugcagaucaaaaaagcacacaaaaugccauuaacgggauuacaaacaaggugaauucuguaauugagaaaaugaacacucaauucacagcugugggcaaagaauucaacaaauuagaaagaaggauggaaaacuuaaauaaaaaaguugaugauggguuucuagacauuuggacauauaaugcagaauuguugguucuacuggaaaaugaaaggacuuuggauuuccaugacuccaaugugaagaaucuguaugagaaaguaaaaagccaauuaaagaauaaugccaaagaaauaggaaacggguguuuugaauucuaucacaaguguaacaaugaaugcauggaaagugugaaaaauggaacuuaugacuauccaaaauauucugaagaaucaaaguuaaacagggagaaaauugauggaguaaaauuggaaucgaugggagucuaucagauucuggcgaucuacucaacugucgccaguucccugguucuuuuggucucccugggggcaaucagcuucuggauguguuccaaugggucuuugcaguguagaauaugcaucuga

SEQ ID NO: 32881 - RNA, 1698 nt, Artificial Sequence
  derived and/or modified CDS sequence (wt) from hemagglutinin__InfluenzaA__ABE11679
augaaaguaaaacuacugguccuguuauguacauuuacagcuacauaugcagacacaauauguauaggcuaccaugccaacaacucaaccgacacuguugacacaguacuugagaagaaugugacagugacacacucugucaaccuacuugaggacagucacaauggaaaacuaugucuacuaaaaggaauagccccacuacaauuggguaauugcagcguugccggauggaucuuaggaaacccagaaugcgaauuacugauuuccaaggaaucaugguccuacauuguagaaacaccaaauccugagaauggaacauguuacccaggguauuucgccgacuaugaggaacugagggagcaauugaguucaguaucuucauuugagagguucgaaauauuccccaaagaaagcucauggcccaaccacaccguaaccggaguaucagcaucaugcucccauaaugggaaaagcaguuuuuacagaaauuugcuauggcugacggggaggaaugguuuguacccaaaccugagcaaguccuaugcaaacaacaaagagaaagaaguccuuguacuaugggguguucaucacccgccuaacauaggggaccaaagggcccucuaucauacagaaaaugcuuaugucucuguagugucuucacauuauagcagaagauucaccccagaaauagccaaaagacccaaaguaagagaucaggaaggaagaaucaacuacuacuggacucugcuggaacccggggauacaauaauauuugaggcaaauggaaaucuaauagcgccaagguaugcuuucgcacugaguagaggcuuuggaucaggaaucaucaccucaaaugcaccaauggaugaaugugaugcgaagugucaaacaccucagggagcuauaaacagcagucuuccuuuccagaauguacacccagucacaauaggagaguguccaaaguaugucaggagugcaaaauuaaggaugguuacaggacuaaggaacaucccauccauucaauccagagguuuguuuggagccauugccgguuucauugaagggggguggacuggaaugguagaugguugguaugguuaucaucaucagaaugagcaaggaucuggcuaugcugcagaucaaaaaagcacacaaaaugccauuaacgggauuacaaacaaggugaauucuguaauugagaaaaugaacacucaauucacagcugugggcaaagaauucaacaaauuggaaagaaggauggaaaacuuaaauaaaaaaguugaugauggguuucuagacauuuggacauauaaugcagaauuguugguucuacuggaaaaugaaaggacuuuggauuuccaugacuccaaugugaagaaucuguaugagaaaguaaaaagccaauuaaagaauaaugccaaagaaauaggaaacggguguuuugaauucuaucacaaguguaacgaugaaugcauggagagugugaaaaauggaacuuaugacuauccaaaauauuccgaagaaucaaaguuaaacagggagaaaauugauggagugaaauuggaaucaaugggagucuaucagauucuggcgaucuacucaacagucgccaguucccugguucuuuuggucucccugggggcaaucagcuucuggauguguuccaaugggucuuugcaguguagaauaugcaucuga

SEQ ID NO: 32882 - RNA, 1698 nt, Artificial Sequence
  derived and/or modified CDS sequence (wt) from hemagglutinin__InfluenzaA__ABE11690
augaaagcaaaacuacugguccuguuauguacauuuacagcuacauacgcagacacaauauguauaggcuaccaugccaacaacucaaccgacacuguugacacaguacuugagaagaaugugacagugacacacucugucaaccuacuugaggacagucacaauggaaaacuaugucuacuaaaaggaauagccccacuacaauuggguaauugcagcguugccggauggaucuuaggaaacccagaaugcgaauuacugauuuccaaggaaucaugguccuacauuguagaaacaccaaaucccgagaauggaacauguuacccaggguauuucgccgacuaugaggaacugagggagcaauugaguucaguaucuucauuugagagauucgaaauauuccccaaaggaagcucauggcccaaccacaccgugaccggaguaucagcaucaugcucccauaaugggaaaagcaguuuuuacagaaauuugcuauggcugacggggaagaaugguuuguacccaaaccugagcauguccuauguaaacaacaaagagaaagaaguccuugugcuaugggguguucaucacccaccuaacauagggaaccaaagggcccucuaccauacagaaaaugcuuaugucucuguagugucuucacauuauagcagaagauucaccccagaaauagccaaaagacccaaaguaagagaucaggaaggaagaaucaacuacuacuggacucugcuggaacccggggacacaauaauauuugaggcaaauggaaaucuaauagcgccaugguaugcuuucgcacugaguagaggcuuuggaucaggaaucaucaccucaaaugcaccaaugggugaaugugaugcgaagugucaaacaccucagggagcuauaaacaguagucuuccuuuccagaauguacacccaguuacaauaggagaguguccaaaguaugucaggagugcaaaauuaaggaugguuacaggacuaaggaacaucccauccauucaauccagagguuuguuuggagccauugccgguuucauugaagggggguggacuggaaugguagaugggugguaugguuaucaucaucagaaugagcaaggaucuggcuaugcugcagaucaaaaaagcacacaaaaugccauuaacgggauuacaaacaaggugaauucuguaauugagaaaaugaacacucaauucacagcugugggcaaagaauucaacaaauuagaaagaaggauggaaaacuuaaauaaaaaaguugaugauggguuucuagacauuuggacauauaaugcagaauuguugguucuacuggaaaaugaaaggacuuuggauuuccaugacuccaaugugaagaaucuguaugagaaaguaaaaagccaauuaaagaauaaugccaaagaaauaggaaacggguguuuugaauucuaucacaaguguaacaaugaaugcauggaaagugugaaaaauggaacuuaugacuauccaaaauauuccgaagaaucaaaguuaaacagggagaaaauugauggaguaaaauuggaaucaaugggagucuaucagauucuggcgaucuacucaacugucgccaguucccugguucuuuuggucucccugggggcaaucagcuucuggauguguuccaaugggucuuugcaguguagaauaugcaucuga

SEQ ID NO: 32883 - RNA, 1698 nt, Artificial Sequence
  derived and/or modified CDS sequence (wt) from hemagglutinin__InfluenzaA__ABE11701
augaaagcaaaacuacugguccuguuauguacauuuacagcuacauacgcagacacaauauguauaggcuaccaugccaacaacucaaccgacacuguugacacaguacuugagaagaaugugacagugacacacucugucaaccuacuugaggacagucacaauggaaaacuaugucuacuaaaaggaauagccccacuacaauuggguaauugcagcguugccggauggaucuuaggaaacccagaaugcgaauuacugauuuccaaggaaucaugguccuacauuguagaaacaccaaaucccgagaauggaacauguuacccaggguauuucgccgacuaugaggaacugagggagcaauugaguucaguaucuucauuugagagauucgaaauauuccccaaaggaagcucauggcccaaccacaccgugaccggaguaucagcaucaugcucccauaaugggaaaagcaguuuuuacagaaauuugcuauggcugacggggaagaaugguuuguacccaaaccugagcauguccuauguaaacaacaaagagaaagaaguccuugugcuaugggguguucaucacccaccuaacauaggggaccaaaaggcccucuaccauacagaaaaugcuuaugucucuguagugucuucacauuauagcagaagauucaccccagaaauagccaaaagacccaaaguaagagaucaggaaggaagaaucaacuacuacuggacucugcuggaacccggggacacaauaauauuugaggcaaauggaaaucuaauagcgccaugguaugcuuucgcacugaguagaggcuuuggaucaggaaucaucaccucaaaugcaccaaugggugaaugugaugcgaagugucaaacaccucagggagcuauaaacaguagucuuccuuuccagaauguacacccaguuacaauaggagaguguccaaaguaugucaggagugcaaaauuaaggaugguuacaggacuaaggaacaucccauccauccaauccagagguuuguuuggagccauugccgguuucauugaagggggguggacuggaaugguagaugggugguaugguuaucaucaucagaaugagcaaggaucuggcuaugcugcagaucaaaaaagcacacaaaaugccauuaacgggauuacaaacaaggugaauucuauaauugagaaaaugaacacucaauucacagcugugggcaaagaauucaacaaauuagaaagaaggauggaaaacuuaaauaaaaaaguugaugauggguuucuagacauuuggacauauaaugcagaauuguugguucuacuggaaaaugaaaggacuuuggauuuccaugacuccaaugugaagaaucuguaugagaaaguaaaaagccaauuaaagaauaaugccaaagaaauaggaaacggguguuuugaauucuaucacaaguguaacaaugaaugcauggaaagugugaaaaauggaacuuaugacuauccaaaauauuccgaagaaucaaaguuaaacagggagaaaauugauggaguaaaauuggaaucaaugggagucuaucagauucuggcgaucuacucaacugucgccaguucccugguucuuuuggucucccugggggcaaucagcuucuggauguguuccaaugggucuuugcaguguagaauaugcaucuga

SEQ ID NO: 32884 - RNA, 1698 nt, Artificial Sequence; identical to SEQ ID NO: 32812
  derived and/or modified CDS sequence (wt) from hemagglutinin__InfluenzaA__ABE11712

SEQ ID NO: 32885 - RNA, 1698 nt, Artificial Sequence; identical to SEQ ID NO: 32866
  derived and/or modified CDS sequence (wt) from hemagglutinin__InfluenzaA__ABE11723

SEQ ID NO: 32886 - RNA, 1698 nt, Artificial Sequence
  derived and/or modified CDS sequence (wt) from hemagglutinin__InfluenzaA__ABE11734
augaaagcaaaacuacugauccuguuauguacauuuacagcuacauacgcagacacaauauguauaggcuaccaugccaacaacucaaccgacacuguugacacaguacuugagaagaaugugacagugacacacucugucaaccuacuugaggacagucacaauggaaaacuaugucuacuaaaaggaauagccccacuacaauuggguaauugcagcguugccggauggaucuuaggaaacccagaaugcgaauuacugauuuccaaggaaucaugguccuacauuguagaaacaccaaaucccgagaauggaacauguuacccaggguauuucgccgacuaugaggaacugagggagcaauugaguucaguaucuucauuugagagauucgaaauauuccccaaaggaagcucauggcccaaccacaccgugaccggaguaucagcaucaugcucccauaaugggaaaagcaguuuuuacagaaauuugcuauggcugacggggaagaaugguuuguacccaaaccugagcauguccuauguaaacaacaaagagaaagaaguccuugugcuaugggguguucaucacccaccuaacauaggggaccaaagggcccucuaccauacagaaaaugcuuaugucucuguagugucuucacauuauagcagaagauucaccccagaaauagccaaaagacccaaaguaagagaucaggaaggaagaaucaacuacuacuggacucugcuggaacccggggacacaauaauauuugaggcaaauggaaaucuaauagcgccaugguaugcuuucgcacugaguagaggcuuuggaucaggaaucaucaccucaaaugcaccaaugggugaaugugaugcuaagugucaaacaccucagggagcuauaaacaguagucuuccuuuccagaauguacacccaguuacaauaggagaguguccaaaguaugucaggagugcaaaauuaaggaugguuacaggacuaaggaacaucccauccauucaauccagagguuuguuuggagccauugccgguuucauugaagggggguggacuggaaugguagaugggugguaugguuaucaucaucagaaugagcaaggaucuggcuaugcugcagaucaaaaaagcacacaaaaugccauuaacgggauuacaaacaaggugaauucuguaauugagaaaaugaacacucaauucacagcugugggcaaagaauucaacaaauuagaaagaaggauggaaaacuuaaauaaaaaaguugaugauggguuucuagacauuuggacauauaaugcagaauuguugguucuacuggaaaaugaaaggacuuuggauuuccaugacuccaaugugaagaaucuguaugagaaaguaaaaagccaauuaaagaauaaugccaaagaaauaggaaacggguguuuugaauucuaucacaaguguaacaaugaaugcauggaaagugugaaaaauggaacuuaugacuauccaaaauauuccgaagaaucaaaguuaaacagggagaaaauugaugggguaaaauuggaaucaaugggagucuaucagauucuggcgaucuacucaacugucgccaguucccugguucuuuuggucucccugggggcaaucagcuucuggauguguuccaaugggucuuugcaguguagaauaugcaucuga

SEQ ID NO: 32887 - RNA, 1698 nt, Artificial Sequence
  derived and/or modified CDS sequence (wt) from hemagglutinin__InfluenzaA__ABE11812
augaaagcaaaacuacugguccuguuauguacauuuacagcuacauacgcagacacaauauguauaggcuaccaugccaacaacucaaccgacacuguugacacaguacuugagaagaaugugacagugacacacucugucaaccuacuugaggacagucacaauggaaaacuaugucuacuaaaaggaauagccccacuacaauuggguaauugcagcguugccggauggaucuuaggaaacccagaaugcgaauuacugauuuccaaggaaucaugguccuacauuguagaaacaccaaaucccgagaauggaacauguuacccaggguauuucgccgacuaugaggaacugagggagcaauugaguucaguaucuucauuugagagauucgaaauauuccccaaaggaagcucauggcccaaccacaccgugaccggaguaucagcaucaugcucccauaaugggaaaagcaguuuuuacagaaauuugcuauggcugacggggaagaaugguuuguacccaaaccugagcauguccuauguaaacaacaaagagaaagaaguccuugugcuaugggguguucaucacccaccuaacauaggggaccaaagggcccucuaccauacagaaaaugcuuaugucucuguagugucuucacauuauagcagaagauucaccccagaaauagccaaaagacccaaaguaagagaucaggaaggacgaaucaacuacuacuggacucugcuggaacccggggacacaauaauauuugaggcaaauggaaaucuaauagcgccaugguaugcuuucgcacugaguagaggcuuuggaucaggaaucaucaccucaaaugcaccaaugggugaaugugaugcgaagugucaaacaccucagggagcuauaaacaguagucuuccuuuccagaauguacacccaguuacaauaggagaguguccaaaguaugucaggagugcaaaauuaaggaugguuacaggacuaaggaacaucccauccauucaauccagagguuuguuuggagccauugccgguuucauugaagggggguggacuggaaugguagaugggugguaugguuaucaucaucagaaugagcaaggaucuggcuaugcugcagaucaaaaaagcacacaaaaugccauuaacgggauuacaaacaaggugaauucuguaauugagaaaaugaacacucaauucacagcugugggcaaagaauucaacaaauuagaaagaaggauggaaaacuuaaauaaaaaaguugaugauggguuucuagacauuuggacauauaaugcagaauuguugguucuacuggaaaaugaaaggacuuuggauuuccaugacuccaaugugaagaaucuguaugagaaaguaaaaagccaauuaaagaauaaugccaaagaaauaggaaacggguguuuugaauucuaucacaaguguaacaaugaaugcauggaaagugugaaaaauggaacuuaugacuauccaaaauauuccgaagaaucaaaguuaaacagggagaaaauugauggaguaaaauuggaaucaaugggagucuaucagauucuggcgaucuacucaacugucgccaguucccugguucuuuuggucucccugggggcaaucagcuucuggauguguuccaaugggucuuugcaguguagaauaugcaucuga

SEQ ID NO: 32888 - RNA, 1698 nt, Artificial Sequence
  derived and/or modified CDS sequence (wt) from hemagglutinin__InfluenzaA__ABE11823
augaaagcaaaacuacugguucuguuauguacauuuacagcuacauacgcagacacaauauguauaggcuaccaugccaacaacucaaccgacacuguugacacaguacuugagaagaaugugacagugacacacucugucaaccuacuugaggacagucacaauggaaaacuaugucuacuaaaaggaauagccccacuacaauuggguaauugcagcguugccggauggaucuuaggaaacccagaaugcgaauuacugauuuccaaggaaucaugguccuacauuguagaaacaccaaaucccgagaauggaacauguuacccaggguauuucgccgacuaugaggaacugagggagcaauugaguucaguaucuucauuugagagauucgaaauauuccccaaaggaagcucauggcccaaccacaccgugaccggaguaucagcaucaugcucccauaaugggaaaagcaguuuuuacagaaauuugcuauggcugacggggaagaaugguuuguacccaaaccugagcauguccuauguaaacaacaaagggaaagaaguccuugugcuaugggguguucaucacccaccuaacauaggggaccaaagggcccucuaccauacagaaaaugcuuaugucucuguagugucuucacauuauagcagaagauucaccccagaaauagccaaaagacccaaaguaagagaucaggaaggaagaaucaacuacuacuggacucugcuggaacccggggacacaauaauauuugaggcaaauggaaaucuaauagcgccaugguaugcuuucgcacugaguagaggcuuuggaucaggaaucaucaccucaaaugcaccaaugggugaaugugaugcgaagugucaaacaccucagggagcuauaaacaguagucuuccuuuccagaauguacacccaguuacaauaggagaguguccaaaguaugucaggagugcaaaauuaaggaugguuacaggacuaaggaacaucccauccauucaauccagagguuuguuuggagccauugccgguuucauugaagggggguggacuggaaugguagaugggugguaugguuaucaucaucagaaugagcaaggaucuggcuaugcugcagaucaaaaaagcacacaaaaugccauuaacgggauuacaaacaaggugaauucuguaauugagaaaaugaacacucaauucacagcugugggcaaagaauucaacaaauuagaaagaaggauggaaaacuuaaauaaaaaaguugaugauggguuucuagacauuuggacauauaaugcagaauuguugguucuacuggaaaaugaaaggacuuuggauuuccaugacuccaaugugaagaaucuguaugagaaaguaaaaagccaauuaaagaauaaugccaaagaaauaggaaacggguguuuugaauucuaucacaaguguaacaaugaaugcauggaaagugugaaaaauggaacuuaugacuauccaaaauauuccgaagaaucaaaguuaaacagggagaaaauugauggaguaaaauuggaaucaaugggagucuaucagauucuggcgaucuacucaacugucgccaguucccugguucuuuuggucucccugggggcaaucagcuucuggauguguuccaaugggucuuugcaguguagaauaugcaucuga

SEQ ID NO: 32889 - RNA, 1698 nt, Artificial Sequence; identical to SEQ ID NO: 32854
  derived and/or modified CDS sequence (wt) from hemagglutinin__InfluenzaA__ABE11834

SEQ ID NO: 32890 - RNA, 1698 nt, Artificial Sequence; identical to SEQ ID NO: 32866
  derived and/or modified CDS sequence (wt) from hemagglutinin__InfluenzaA__ABE11845

SEQ ID NO: 32891 - RNA, 1698 nt, Artificial Sequence; identical to SEQ ID NO: 32859
  derived and/or modified CDS sequence (wt) from hemagglutinin__InfluenzaA__ABE11856

SEQ ID NO: 32892 - RNA, 1701 nt, Artificial Sequence
  derived and/or modified CDS sequence (wt) from hemagglutinin__InfluenzaA__ABE11900
augaaagcaaaacuacuaguccuguugugugcauuuacagcuacauaugcagacacgauauguauaggcuaccaugcgaacaacucaacugacacuguugacacaguacuugagaagaacgugacagugacacacucugucaaccuacuugaggacagucacaacggaaaacuaugccgacuaaaaggaacagccccacuacaauuggguaauugcagcguugccggauggaucuuaggaaacccagaaugcgaaucacuguuuucuaaggaaucaugguccuacauugcagaaacaccaaacccugagaaugggacauguuacccaggguauuucgccgacuaugaggaacugagggagcaauugagcucaguaucaucauucgagagauucgaaauauuccccaaggaaagcucauggcccaaccacaccguaaccaaaggaguaacggcaucaugcucccauaaugggaaaagcaguuuuuacaaaaauuugcuauggcugacggagaagaauggcuuguacccaaaucugagcaaguccuauguaaacaacaaggagaaagaaguccuuguacuaugggguguucaucacccgucuaacauaggggaccaaagggccaucuaccauacagaaaaugcuuaugucucuguagugucuucacauuauagcagaagauucaccccagaaauagcaaaaagacccaaaguaagagaccaagaagggagaauuaacuacuacuggacucugcuggaacccggggacacaauaauauuugaggcaaauggaaaucuaauagcgccaugguacgcuuucgcacugaguagaggcuuugggucaggaaucaucaccucaaacgcaucaaugggugaaugugacgcuaagugucaaacaccccaaggagcuauaaacaguagucuuccuuuccagaauguacacccagucacaauaggagaguguccaaaguaugucaggaguacaaaauuaaggaugguuacaggacuaaggaacaucccauccauucaauccagagguuuguuuggagccauugccgguuucauugaaggaggguggacuggaaugauagauggaugguaugguuaucaucaucagaaugaacaaggaucuggcuaugcugcggaccaaaaaagcacacaaaaugccauuaaugggauuacaaacaaggugaauucuguaaucgagaaaaugaacacucaauucacagcuguaggcaaagaauucaacaaauuagaaagaaggauggaaaacuuaaauaagaaaguugaugauggauuucuggacauuuggacauauaaugcagaauuguugguucuccuggaaaaugaaaggacuuuggauuuucaugacucaaaugugaagaaucuguaugagaaaguaaaaacccaauugaagaauaaugccaaagaaauagggaacggguguuuugaauucuaucacaaguguaacaaugaaugcauggaaagugugaaaaaugggacuuaugacuauccaaaauacuccgaagaaucaaaguuaaacagggaaaaaauugauggagugaaauuggaaucaaugggagucuaucagauucuggcgaucuacucaacugucgccaguucacuggugcuuuugaucucccugggggcaaucaguuucuggauguguucuaaugggucuuugcaguguagaauaugcaucuga

SEQ ID NO: 32893 - RNA, 1701 nt, Artificial Sequence
  derived and/or modified CDS sequence (wt) from hemagglutinin__InfluenzaA__ABE11942
augaaagcaaaacuacuaguccuguugugugcauuuacagcuacauacgcagacacaauauguauaggcuaccaugcgaacaacucaacugacacuguugacacaguacuugagaagaacgugacagugacacacucugucaaccuacuugaggacagucacaacggaaaacuaugccgacuaaaaggaacagccccacuacaauuggguaauugcagcguugccggauggaucuuaggaaacccagaaugcgaaucacuguuuucuaaggaaucaugguccuacauugcagaaacaccaaauccugagaauggaacauguuacccaggguauuucgccgacuaugaggaacugagggagcaauugagcucaguaucaucauucgagagauucgaaauauuccccaaggaaagcucauggcccaaccacaccguaaccaaaggaguaacggcaucaugcucccauaaugggaaaagcaguuuuuacaaaaauuugcuauggcugacggagaagaauggcuuguacccaagucugagcaaguccuauguaaacaacaaggagaaagaaguccuuguacuaugggguguucaucacccgucuaacauaggggaccaaagggccaucuaucauacagaaaaugcuuaugucucuguagugucuucacauuauagcagaagauucaccccagaaauagcaaaaagacccaaaguaagagaccaagaagggagaauuaacuacuacuggacucugcuggaacccggggacacaauaauauuugaggcaaauggaaaucuaauagcgccaugguacgcuuucgcacugaguagaggcuuugggucaggaaucaucaccucaaacgcaucaaugggugaaugugacgcuaagugucaaacaccccaaggagcuauaaacaguagucuuccuuuccagaauguacacccagucacaauaggagaguguccaaaguaugucaggaguacaaaauuaaggaugguuacaggacuaaggaacaucccauccauucaauccagagguuuguuuggagccauugccgguuucauugaaggaggguggacuggaaugauagauggaugguaugguuaucaucaucagaaugaacaaggaucuggcuaugcugcggaccaaaaaagcacacaaaaugccauuaaugggauuacaaacaaggugaauucuguaaucgagaaaaugaacacucaauucacagcuguaggcaaagaauucaacaaauuagaaagaaggauggaaaacuuaaauaagaaaguugaugauggauuucuggacauuuggacauauaaugcagaauuguugguucuccuggaaaaugaaaggacuuuggauuuucaugacucaaaugugaagaaucuguaugagaaaguaaaaacccaauugaagaauaaugccaaagaaauagggaacggguguuuugaauucuaucacaaguguaacaaugaaugcauggaaagugugaaaaaugggacuuaugacuauccaaaauauuccgaagaaucaaaguuaaacagggaaaaaauugauggagugaaauuggaaucaaugggagucuaucagauucuggcgaucuacucaacugucgccaguucacuggugcuuuuggucucccugggggcaaucaguuucuggauguguucuaaugggucuuugcaguguagaauaugcaucuga

SEQ ID NO: 32894 - RNA, 1701 nt, Artificial Sequence
  derived and/or modified CDS sequence (wt) from hemagglutinin__InfluenzaA__ABE12078
augaagacuaucauugcuuugagcuacauuuuaugucugguuuucgcucaaaaacuucccggaaaugacaacagcacggcaacgcugugccuggggcaccaugcagugccaaacggaacgcuagugaaaacaaucacgaaugaccaaauugaagugacuaaugcuacugagcugguucagaguuccucaacagguggaauaugcgacaguccucaccaaauccuugauggagaaaacugcacacuaauagaugcucuauugggagacccucauugugauggcuuccaaaauaaggaaugggaccuuuuuguugaacgcagcaaagccuacagcaacuguuacccuuaugaugugccggauuaugccucccuuaggucacuaguugccucauccggcacacuggaguuuaacaaugaaagcuucaauuggacuggagucgcucagaauggaacaagcucugcuugcaaaaggagaucuaauaaaaguuucuuuaguagauugaauugguugcaccaauuaaaauacaaauacccagcacugaacgugacuaugccaaacaaugaaaaauuugacaaauuguacauuugggggguucaccacccgaguacggacagugaccaaaucagccuauaugcucaagcaccagggagagucacagucucuaccaaaagaagccaacaaacuguaaucccgaauaucggaucuagacccuggguaaggggugucuccagcagaauaagcaucuauuggacaauaguaaaaccgggagacauacuuuugauuaacugcacagggaaucuaauugcuccucgggguuacuucaaaauacgaagugggaaaagcucaauaaugaggucagaugcauccauuggcaaaugcaauucugaaugcaucacuccaaauggaagcauucccaaugacaaaccauuucaaaauguaaacaggaucacauauggggccugucccagauauguuaagcaaaacacucugaaauuggcaacagggaugcggaauguaccagagaaacaaacuagaggcauauucggcgcaaucgcggguuucauagaaaaugguugggagggaaugguggacgguugguacgguuucaggcaucaaaauucugagggcacaggacaagcagcagaucucaaaagcacucaagcagcaaucaaccaaaucaacgggaaacugaauagguuaaucgagaaaacgaacgagaaauuccaucaaauugaaaaagaauucucagaaguggaagggagaauucaggaccucgagaaauauguugaggacacuaaaauagaucucuggucguacaacgcggagcuucuuguugcccuggagaaccagcauacaauugaucuaacugacucagaaaugaacaaacuguuugaaaaaacaaagaagcaacugagggaaaaugcugaggauaugggcaaugguuguuucaaaauauaccacaaaugugacaaugccugcauagggucaaucagaaaugggacuuaugaccaugauguauacagagacgaagcauuaaacaaccgguuccagaucaaagguguugagcugaagucaggauacaaagauuggauccuauggauuuccuuugccauaucauguuuuuugcuuuguguugucuugcugggguucaucaugugggccugccaaaaaggcaacauuaggugcagcauuugcauuuga

SEQ ID NO: 32895 - RNA, 1701 nt, Artificial Sequence; identical to SEQ ID NO: 32790
  derived and/or modified CDS sequence (wt) from hemagglutinin__InfluenzaA__ABE12123

SEQ ID NO: 32896 - RNA, 1698 nt, Artificial Sequence; identical to SEQ ID NO: 32812
  derived and/or modified CDS sequence (wt) from hemagglutinin__InfluenzaA__ABE12248

SEQ ID NO: 32897 - RNA, 1701 nt, Artificial Sequence
  derived and/or modified CDS sequence (wt) from hemagglutinin__InfluenzaA__ABE12623
augaagacuaucauugcuuugagcuacauuuucugucugguucucggccaagaucuuccaggaaaugacaacagcacagcaacgcugugccugggacaucaugcggugccaaacggaacacuagugaaaacaaucacaaaugaucagauugaagugacuaaugcuacugagcugguucagagcuccucaacggggaaaauaugcaacaauccucaucgaauccuugauggaauagacugcacacugauagaugcucuauugggggacccucauugugauggcuuucaaaaugagacaugggaccuuuucguugaacgcagcaaagcuuucagcaacuguuacccuuaugaugugccagauuaugccucccuuaggucacuaguugccucgucaggcacucuggaguuuaucaaugaggguuucacuuggacuggggucacucagaaugggggaagcaaugcuugcaaaaggggaccugauagcgguuuuuucaguagacugaacugguuguacaaaucaggaagcacauauccagugcugaacgugacuaugccaaacaaugacaauuuugacaaacuauacauuugggggguucaccacccgagcacgaaccaagaacaaaccagccuauauguucaagcaucagggagagucacagucucuaccaagagaagccagcaaacuauaaucccgaauaucgggucuagacccuggguaaggggucugucuaguagaauaagcaucuauuggacaauaguuaaaccgggagacauacugguaauuaauaguaaugggaaccuaauugcuccucgggguuauuucaaaaugcgcacugggaaaagcucaauaaugaggucagaugcaccuauugguaccuguauuucugaaugcaucacuccaaauggaagcauucccaaugacaaacccuuucaaaacguaaacaagaucacauauggggcaugucccaaguauguuaagcaaaacacccugaaguuggcaacagggaugcggaauguaccagagaaacaaacuagaggccuauucggcgcaauagcagguuucauagaaaaugguugggagggaaugauagacgguugguacgguuucaggcaucaaaauucugagggcacaggacaagcagcagaucuuaaaagcacucaagcagccaucgaccaaaucaaugggaaacugaauaggguaaucgagaagacgaacgagaaauuccaucaaaucgaaaaggaauucucagaaguagaagggagaauucaggaccucgagaaauacguugaagacacuaaaauagaucucuggucuuacaaugcggagcuucuugucgcucuggagaaccaacauacaauugaucugacugacucggaaaugaacaagcuguuugaaaaaacaaggaggcaacugagggaaaaugcugaggacaugggcaaugguugcuucagaauauaccacaaaugugacaaugcuugcauagggucaaucagaaaugggacuuaugaccaugauguauacagagacgaagcauuaaacaaccgguuucagaucaaagguguugaacugaaaucaggauacaaagacuggauccuguggauuuccuuugccauaucaugcuuuuugcuuuguguuguuuugcugggguucaucaugugggccugccaaaaaggcaacauuaggugcaacauuugcauuuga

SEQ ID NO: 32898 - RNA, 1701 nt, Artificial Sequence; identical to SEQ ID NO: 32842
  derived and/or modified CDS sequence (wt) from hemagglutinin__InfluenzaA__ABE12645

SEQ ID NO: 32899 - RNA, 1701 nt, Artificial Sequence; identical to SEQ ID NO: 32820
  derived and/or modified CDS sequence (wt) from hemagglutinin__InfluenzaA__ABE13076

SEQ ID NO: 32900 - RNA, 1701 nt, Artificial Sequence
  derived and/or modified CDS sequence (wt) from hemagglutinin__InfluenzaA__ABE13323
augaagacuauuauugcuuugagcuacauuuuaugucugguuuucgcucaaaaacuucccggaaaugacaacagcacggcaacgcugugccugggacaccaugcagugccaaacggaacgcuagugaaaacaaucacgaaugaccaaauugaagugacuaaugcuacugagcuuguucaggguuccucaacagguagaauaugcgacaguccucaccgaauccuugauggaaaaaacugcacacugauagaugcucuauugggagacccucauugugauggcuuccaaaauaaggaaugggaccuuuuuguugaacgcagcaaagcuuacagcaacuguuacccuuaugaugugccggauuaugccucccuuaggucacuaguugccucauccggcacccuggaguuuaacaaugaaagcuucaauuggacuggagucgcccagaauggaacaagcuaugcuugcaaaaggagaucuguuaaaaguuucuuuaguagauugaauugguugcacaaauuagaauacaaauauccagcacugaacgugacuaugccaaacaaugacaaauuugacaaauuguacauuugggggguucaccacccgaguacggacagugaccaaaccagccuauauguucaagcaucagggagagucacagucucuaccaaaagaagccaacaaacuguaaucccgaauaucggaucuagacccuggguaaggggugucuccagcagaauaagcauauauuggacaauaguaaaaccgggagacauacuuuugauuaacagcacagggaaucuaauugcuccucgggguuacuucaaaauacgaagugggaaaagcucaauaaugaggucagaugcacccauugacaacugcaauucugaaugcaucacuccaaauggaagcauucccaaugacaaaccauuucaaaauguaaacaggaucacauauggggccugucccagauauguuaagcaaaacacucugaaauuggcaacagggaugcggaauguaccagagaaacaaacuagaggcauauucggcgcaaucgcagguuucauagaaaaugguugggagggaaugguagacgguugguacgguuucaggcaucaaaauucugagggcacaggacaagcagcagaucuuaaaagcacucaagcagcaaucaaccaaaucaacgggaaacugaauagguuaaucgagaaaacgaacgagaaauuccaucaaauugaaaaagaauucucagaaguagaagggagaauucaggaccucgagaaauauguugaagacacuaaaauagaucucuggucguacaacgcggagcuucuuguugcccuggagaaccaacauacaauugaucuaacugacucagaaaugaacaaacuguuugaaagaacaaggaagcaacugagggaaaaugcugaggacaugggcaaugguugcuucaaaauauaccacaaaugugacaaugccugcauagggucaaucagaaauggaacuuaugaccaugauguauacagagacgaagcauuaaacaaccgguuccagaucaaagguguugagcugaagucaggauacaaagauuggauccuauggauuuccuuugccauaucauguuuuuugcuuuguguuguuuugcugggguucaucaugugggccugccaaaaaggcaacauuaggugcaacauuugcauuuga

SEQ ID NO: 32901 - RNA, 1701 nt, Artificial Sequence
  derived and/or modified CDS sequence (wt) from hemagglutinin__InfluenzaA__ABE13471
augaagacuaucauugcuuugagcuacauuuuaugucugguuuucgcucaaaaacuucccggaaaugacaacagcacggcaacgcugugccugggacaccaugcagugccaaacggaacgcuagugaaaacaaucacgaaugaccaaauugaagugacuaaugcuacugagcugguucagaauuccucaacagguaggauaugugacaguccucaccgaauccuugaugggaaaaacugcacacugauagaugcucuauugggagacccucauugugauggcuuccaaaauaaggaaugggaccuuuuuguugaacgcagcaaagcuuacagcaacuguuacccuuaugaugugccggauuaugccucccuuaggucacuaguugccucauccggcacccuggaguuuuacaaugaaagcuucaauuggacuggagucgcucagaauggaacaagcuaugcuugcaaaaggagaucuguuaaaaguuucuuuaguagauugaauugguugcacaaauuagaauacaaauauccagcacugaacgugacuaugccaaacaaugacaaauuugacaaauuguacauuugggggguucaccacccgaguacggacagugaccaaaccagccuauauguucaagcaucagggagagucacagucucuaccaaaagaagccaacaaacuguaaucccgaauaucggaucuagacccuggguaaggggugucuccagcagaauaagcaucuauuggacaauaguaaaaccgggagacauacuuuugauuaacagcacagggaaucuaauugcuccucgggguuacuucaaaauacgaagugggaaaagcucaauaaugaggucagaugcacccauuggcaacugcaauucugaaugcaucacuccaaauggaagcauucccaaugacaaaccauuucaaaauguaaacaggaucacauauggggccugucccagauauguuaagcaaaacacucugaaauuggcaacagggaugcggaauguaccagagaaacaaacuagaggcauauucggcgcaaucgcagguuucauagaaaaugguugggagggaaugguagacgguugguacgguuucaggcaucaaaauucugagggcacaggacaagcagcggaucuuaaaagcacucaagcagcaaucaaccaaaucaacgggaaacugaauagguuaaucgagaaaacgaacgagaaauuccaucaaaucgaaaaagaauucucagaaguagaagggagaauucaggaccucgagaaauauguugaagacacuaaaauagaucucuggucguacaacgcggagcuucuuguugcccuggagaaccaacauacaauugaucuaacugacucagaaaugaacaaacuguuugaaagaacaaggaagcaacugagggaaaaugcugaggacaugggcaaugguugcuucagaauauaccacaaaugugacaaugccugcauagggucaaucagaaauggaacuuaugaccaugauguauacagagacgaagcauuaaacaaccgguuccagaucaaagguguugagcugaagucaggauacaaagauuggauccuauggauuuccuuugccauaucauguuuuuugcuuuguguuguuuugcugggguucaucaugugggccugccaaaaaggcaacauuaggugcaacauuugcauuuga

SEQ ID NO: 32902 - RNA, 1701 nt, Artificial Sequence
  derived and/or modified CDS sequence (wt) from hemagglutinin__InfluenzaA__ABE13555
augaagacuauuauugcuuugagcuacauuuuaugucugguuuucgcucaaaaacuucccggaaaugacaacagcacggcaacgcugugccugggacaccaugcagugccaaacggaacgcuagugaaaacaaucacgaaugaccaaauugaagugacuaaugcuacugagcugguucaggguuccucaacagguagaauaugcgacaguccucaccgaauccuugauggaaaaaacugcacacugauagaugcucuauugggagacccucauugugauggcuuccaaaauaaggaaugggaccuuuuuguugaacgcagcaaagcuuacagcaacuguuacccuuaugaugugccggauuaugccucccuuaggucacuaguugccucaucaggcacccuggaguuuaacaaugaaagcuucaauuggacuggagucgcccagaauggaacaagcuaugcuugcaaaaggagaucuguuaaaaguuucuuuaguagauugaauugguugcacaaauuagaauacaaauauccagcacugaacgugacuaugccaaacaaugacaaauuugacaaauuguacaucugggggguucaccacccgaguacggacagugaccaaaccagccuauauguucaagcaucagggagagucacagucucuaccaaaagaagccaacaaacuguaaucccgaacaucggaucuagacccuggguaaggggugucuccagcagaauaagcauauauuggacaauaguaaaaccgggagacauacuuuugauuagcagcacagggaaucuaauugcuccucgggguuacuucaaaauacgaagugggaaaagcucaauaaugaggucagaugcacccauugacaacugcaauucugaaugcaucacuccaaauggaagcauucccaaugacaaaccauuucaaaauguaaacaggaucacauauggggccugucccagauauguuaagcaaaacacucugaaauuggcaacagggaugcggaauguaccagagaaacaaacuaaaggcauauucggcgcaaucgcagguuucauagaaaaugguugggagggaaugguagacgguugguacgguuucaggcaucaaaauucugagggcacaggacaagcagcagaucuuaaaagcacucaagcagcaaucaaccaaaucaacgggaaacugaauagguuaaucgagaaaacgaacgagaaauuccaucaaaucgaaaaagaauucucagaaguagaagggagaauucaggaccucgagaaauauguugaagacacuaaaauagaucucuggucguacaacgcggagcuucuuguugcccuggagaaccaacauacaauugaucuaacugacucagaaaugaacaaacuguuugaaagaacaaggaagcaacugagggaaaaugcugaggacaugggcaaugguugcuucaaaauauaccacaaaugugacaaugccugcauagggucaaucagaaauggaacuuaugaccaugauguauacagagacgaagcauuaaacaaccgguuccagaucaaagguguugagcugaagucaggauacaaagauuggauccuauggauuuccuuugccaugucauguuuuuugcuuuguguuguuuuguugggguucaucaugugggccugccaaaaaggcaacauuaggugcaacauuugcauuuga

SEQ ID NO: 32903 - RNA, 1701 nt, Artificial Sequence
  derived and/or modified CDS sequence (wt) from hemagglutinin__InfluenzaA__ABE13606
augaagacuaucauugcuuugagcuacauuuuaugucugguuuucgcucaaaaacuucccggaaaugacaacagcacggcaacgcugugccugggacaccaugcagugccaaacggaacgcuagugaaaacaaucacgaaugaccaaauugaagugacuaaugcuacugagaugguucagaguuccucaacagguagaauaugcgacaguccucaccgaauccuugauggaaaaaacugcacacugauagaugcucuauugggagacccucauugugauggcuuccaaaauaaggaaugggaccuuuuuguugaacgcagcaaagcuuacagcaacuguuacccuuaugaugugccggauuaugccucccuuaggucacuaguugccucauccggcacccuggaguuuaccaaugaaggcuucaauuggacuggagucgcucaggauggaacaagcuaugcuugcaaaaggggaucuguuaaaaguuucuuuaguagauugaauugguugcacaaauuagaauacaaauauccagcacugaacgugacuaugccaaacaaugacaaauuugacaaauuguacauuugggggguucaccacccgaguacggacagugaccaaaccagccuauauguucaagcaucagggagagucacagucucuaccaaaagaagccaacaaacuguaaucccgaauaucgggucuagacccuggguaaggggugucuccagcagaauaagcaucuauuggacaauaguaaaaccgggagacauacuuuugauuaacagcacagggaaucuaauugcuccucgggguuacuucaaaauacgaagugggaaaagcucaauaaugaggucagaugcacccauuggcaacugcaauucugaaugcaucacuccaaauggaagcauucccaaugacaaaccuuuucaaaauguaaacaggaucacauauggggccugucccagauauguuaagcaaaacacucugaaauuggcaacagggaugcggaauguaccagagaaacaaacuagaggcauauucggcgcaaucgcagguuucauagaaaaugguugggagggaaugguagacgguugguacgguuucaggcaucaaaauucugagggcacaggacaagcagcagaucuuaaaagcacucaagcagcaaucaaccaaaucaacgggaaacugaauagguuaaucgagaaaacgaacgagaaauuccaucaaaucgaaaaagaauucucagaaguagaagggagaauucaggaccucgagaaauauguugaagacacuaaaauagaucucuggucuuacaacgcggagcuucuuauugcccuggagaaccaacauacaauugaucuaacugacucagaaaugaacaaacuguuugaaagaacaaggaagcaacugagggaaaaugcugaggacaugggcaaugguugcuucaaaauauaccacaaaugugacaaugccugcauagggucaaucagaaauggaacuuaugaccaugauguauacagagacgaagcauuaaacaaccgguuccagaucaaagguguugagcugaagucaggauacaaagauuggauccuauggauuuccuuugccauaucaugcuuuuugcuuuguguuguuuugcugggguucaucaugugggccugccaaaaaggcaacauuaggugcaacauuugcauuuga

SEQ ID NO: 32904 - RNA, 1701 nt, Artificial Sequence
  derived and/or modified CDS sequence (wt) from hemagglutinin__InfluenzaA__ABE13628
augaagacuaucauugcuuugagcuacauuuuaugucugguuuucgcucaaaaacuucccggaaaugacaacagcacagcaacgcugugccugggacaucaugcagugccaaacggaacgcuagugaaaacaaucacgaaugaucaaauugaagugacuaaugcuacugagcugguucagaguuccucaacagguagaauaugcgacaguccucaccgaauccuugauggaaaaaacugcacacugauagaugcucuauugggagacccucauugugauggcuuccaaaauaaggaaugggaccuuuuuguugaacgcagcaaagcuuacagcaacuguuacccuuaugaugugccggauuaugccucccuuaggucacuaguugccucaucaggcacccuggaguuuaccaaugaaggcuucaauuggacuggagucgcucaggaugggaaaagcuaugcuugcaaaaggggaucuguuaacaguuucuuuaguagauugaauugguugcacaaauuagaauacaaauauccagcacugaacgugacuaugccaaacaaugacaaauuugacaaacuguacauuugggggguucaccacccgagcacggacagugaccaaaccagccuauauguucaagcaucagggagagucacagucucuaccaaaagaagccaacaaacuguaaucccgaauaucggguccagacccugggugaggggcaucuccaguagaauaagcaucuauuggacaauaguaaaaccgggagacauacuuuugauuaacagcacagggaaucuaauugcuccucgggguuacuucaaaauacgaaaugggaaaagcucaauaaugaggucagaugcacccauugacaacugcaauucugaaugcaucacuccaaauggaagcauucccaaugacaaaccuuuucaaaauguaaacaggaucacauauggggccugucccagauauguuaagcaaaacacucugaaauuggcaacagggaugcggaauguaccagagaaacaaacuagaggcauauucggcgcaaucgcagguuucauagaaaaugguugggagggaaugguagacgguugguacgguuucaggcaucaaaauucugagggcacaggacaagcagcagaucuuaaaagcacucaagcagcaaucgaucaaaucaacgggaaacugaauagguuaaucgagaaaacgaacgagaaauuccaucaaaucgaaaaagaauucucagaaguggaagggagaauucaggaccucgagaaauauguugaagacacuaaaauagaucucuggucuuacaacgcggagcuucuuguugcccuggagaaucaacauacaauugaucuaacugacucagaaaugaacaaacuguuugaaagaacaaggaagcaacugagggaaaaugcugaggacaugggcaaugguugcuucaaaauauaccacaaaugugacaaugccugcauagggucaaucagaaauggaacuuaugaccaugauguauacagagacgaagcauuaaacaaccgguuccagaucaaagguguugagcugaagucaggauacaaagauuggauccuauggauuuccuuugccauaucaugcuuuuugcuuuguguuguuuugcugggguucaucaugugggccugccaaaaaggcaacauuaggugcaacauuugcauuuga

SEQ ID NO: 32905 - RNA, 1701 nt, Artificial Sequence
  derived and/or modified CDS sequence (wt) from hemagglutinin__InfluenzaA__ABE13824
augaagacuaucauugcuuugagcuacauuuuaugucagguuuucgcucaaaaacuucccggaaaugacaacagcacagcaacgcugugccugggacaccaugcagugccaaacggaacgcuagugaaaacaaucacgaaugaucaaauugaagugacuaaugcuacugagcugguucagaguuccucaacagguagaauaugcgacaguccucaccgaauccuugauggaaaaaacugcacacugauagaugcucuauugggagacccucauugugauggcuuccaaaauaaggaaugggaccuuuuuguugaacgcagcaaagcuuacagcaacuguuacccuuaugaugugccggauuaugccucccuuaggucacuaguugccucaucaggcacccuggaguuuaccaaugaaggcuucaauuggacuggagucgcucaggaugggaaaagcuaugcuugcaaaaggggaucuguuaacaguuucuuuaguagauugaauugguugcacaaauuagaauacaaauauccagcacugaacgugacuaugccaaacaaugacaaauuugauaaauuguacauuugggggguucaccacccgagcacggacagugaccaaaccagccuauauguucaagcaucagggagagucacagucucuaccaaaagaagccaacaaacuguaaucccgaauaucggguccagacccugggugaggggcaucuccaguagaauaagcaucuauuggacaauaguaaaaccgggagacauacuuuugauuaacagcacagggaaucuaauugcuccucgggguuacuucaaaauacgaaaugggaaaagcucaauaaugaggucagaugcacccauugacaacugcaauucugaaugcaucacuccaaauggaagcauucccaaugacaaaccuuuucaaaauguaaacaggaucacauauggggccugucccagauauguuaagcaaaacacucugaaauuggcaacagggaugcggaauguaccagagaaacaaacuagaggcauauucggcgcaaucgcagguuucauagaaaaugguugggagggaaugguagacgguugguacgguuucaggcaucaaaauucugagggcacaggacaagcagcagaucuuaaaagcacucaagcagcaaucgaucaaaucaacgggaaacugaauagguuaaucgagaaaacgaacgagaaauuccaucaaaucgaaaaagaauucucagaaguagaagggaggauucaggaccucgagaaauauguugaagacacuaaaauagaucucuggucuuacaacgcggagcuucuuguugcccuggagaaucaacauacaauugaucuaacugacucagaaaugaacaaacuguuugaaagaacaaggaagcaacugagggaaaaugcugaggacaugggcaaugguugcuucaaaauauaccacaaaugugacaaugccugcauagggucaaucagaaauggaacuuaugaccaugauguauacagagacgaagcauuaaacaaccgguuccagaucaaagguguugagcugaagucgggauacaaagauuggauccuauggauuucuuuugccauaucaugcuuuuugcuuuguguuguuuugcugggguucaucaugugggccugccaaaaaggcaacauuaggugcaacauuugcauuuga

SEQ ID NO: 32906 - RNA, 1701 nt, Artificial Sequence
  derived and/or modified CDS sequence (wt) from hemagglutinin__InfluenzaA__ABE14019
augaagacuaucauugcuuugagcuacauuuuaugucagguuuucgcucaaaaacuucccggaaaugacaacagcacagcaacgcugugccugggacaccaugcagugccaaacggaacgcuagugaaaacaaucacgaaugaucaaauugaagugacuaaugcuacugagcugguucagaguuccucaacagguagaauaugcgacaguccucaccgaauccuugauggaaaaaacugcacacugauagaugcucuauugggagacccucauugugauggcuuccaaaauaaggaaugggaccuuuuuguugaacgcagcaaagcuuacagcaacuguuacccuuaugaugugccggauuaugccucccuuaggucacuaguugccucaucaggcacccuggaguuuaccaaugaaggcuucaauuggacuggagucgcucaggaugggaaaagcuaugcuugcaaaaggggaucuguuaacaguuucuuuaguagauugaauugguugcacaaauuagaauacaaauauccagcacugaacgugacuaugccaaacaaugacaaauuugauaaauuguacauuugggggguucaccacccgagcacggacagugaccaaaccagccuauauguucaagcaucagggagagucacagucucuaccaaaagaagccaacaaacuguaaucccgaauaucggguccagacccugggugaggggcaucuccaguagaauaagcaucuauuggacaauaguaaaaccgggagacauacuuuugauuaacagcacagggaaucuaauugcuccucgggguuacuucaaaauacgaaaugggaaaagcucaauaaugaggucagaugcacccauugacaacugcaauucugaaugcaucacuccaaauggaagcauucccaaugacaaaccuuuucaaaauguaaacaggaucacauauggggccugucccagauauguuaagcaaaacacucugaaauuggcaacagggaugcggaauguaccagagaaacaaacuagaggcauauucggcgcaaucgcagguuucauagaaaaugguugggagggaaugguagacgguugguacgguuucaggcaucaaaauucugagggcacaggacaagcagcagaucuuaaaagcacucaagcagcaaucgaucaaaucaacgggaaacugaauagguuaaucgagaaaacgaacgagaaauuccaucaaaucgaaaaagaauucucagaaguagaagggagaauucaggaccucgagaaauauguugaagacacuaaaauagaucucuggucuuacaacgcggagcuucuuguugcccuggagaaucaacauacaauugaucuaacugacucagaaaugaacaaacuguuugaaagaacaaggaagcaacugagggaaaaugcugaggacaugggcaaugguugcuucaaaauauaccacaaaugugacaaugccugcauagggucaaucagaaauggaacuuaugaccaugauguauacagagacgaagcauuaaacaaccgguuccagaucaaagguguugagcugaagucgggauacaaagauuggauccuauggauuucuuuugccauaucaugcuuuuugcuuuguguuguuuugcugggguucaucaugugggccugccaaaaaggcaacauuaggugcaacauuugcauuuga

SEQ ID NO: 32907 - RNA, 1701 nt, Artificial Sequence
  derived and/or modified CDS sequence (wt) from hemagglutinin__InfluenzaA__ABE14030
augaagacuaucauugcuuugagcuacauuuuaugucugguuuucgcucaaaaacuucccggaaaugacaacagcacagcaacgcugugccugggacaccaugcagugccaaacggaacgcuagugaaaacaaucacgaaugaucaaauugaagugacuaaugcuacugagcugguucagaguuccucaauagguagaauaugcgacaguccucaccgaauccuugauggaaaaaacugcacacugauagaugcucuguugggagacccucauugugauggcuuccaaaauaaggaaugggaccuuuuuguugaacgcagcaaagcuuacagcaacuguuacccuuaugaugugccggauuaugccucccuuaggucacuaguugccucaucaggcacccuggaguuuaccaaugaaggcuucaauuggacuggagucgcucaggaugggaaaagcuaugcuugcaaaaggggaucuguuaacaguuucuuuaguagauugaauugguugcacaaauuagaauacaaauauccagcacugaacgugacuaugccaaacaaugacaaauuugacaaacuguacauuugggggguucaccacccgagcacggacagugaccaaaccagccuauauguucaagcaucagggagagucacagucucuaccaaaagaagccaacaaacuguaaucccgaauaucggguccagacccugggugaggggcaucuccaguagaauaagcaucuauuggacaauaguaaaaccgggagacauacuuuugauuaacagcacagggaaucuaauugcuccucgggguuacuucaaaauacgaaaugggaaaagcucaauaaugaggucagaugcacccauugacaacugcaauucugaaugcaucacuccaaauggaagcauucccaaugacaaaccuuuucaaaauguaaacaggaucacauauggggccugucccagauauguuaagcaaaacacucugaaauuggcaacagggaugcggaauguaccagagaaacaaacuagaggcauauucggcgcaaucgcagguuucauagaaaaugguugggagggaaugguagacgguugguacgguuucaggcaucaaaauucugagggcacaggacaagcagcagaucuuaaaagcacucaagcagcaaucgaucaaaucaaugggaaacugaauagguuaaucgagaaaacgaacgagaaauuccaucaaaucgaaaaagaauucucagaaguggaagggagaauucaggaccucgagaaauauguugaagacacuaaaauagaucucuggucuuacaacgcggagcuucuuguugcccuggagaaucaacauacaauugaucuaacugacucagaaaugaacaaacuguuugaaagaacaaggaagcaacugagggaaaaugcugaggacaugggcaaugguugcuucaaaauauaccacaaaugugacaaugccugcauagggucaaucagaaauggaacuuaugaccaugauguauacagagacgaagcauuaaacaaccgguuccagaucaaagguguugagcugaagucaggauacaaagauuggauccuauggauuuccuuugccauaucaugcuuucugcuuuguguuguuuugcugggguucaucaugugggccugccaaaaaggcaacauuaggugcaacauuugcauuuga

SEQ ID NO: 32908 - RNA, 1701 nt, Artificial Sequence; identical to SEQ ID NO: 32904
  derived and/or modified CDS sequence (wt) from hemagglutinin__InfluenzaA__ABE14041

SEQ ID NO: 32909 - RNA, 1701 nt, Artificial Sequence; identical to SEQ ID NO: 32906
  derived and/or modified CDS sequence (wt) from hemagglutinin__InfluenzaA__ABE14063

SEQ ID NO: 32910 - RNA, 1701 nt, Artificial Sequence
  derived and/or modified CDS sequence (wt) from hemagglutinin__InfluenzaA__ABE14124
augaagacuaucauugcuuugagcuacauuuuaugucugguuuucgcucaaaaacuucccggaaaugacaacagcacggcaacgcugugccugggacaccaugcagugccaaacggaacgcuagugaaaacaaucacgaaugaccaaauugaagugacuaaugcuacugagcugguucagaguuccucaacagguagaauaugcgacaguccucaccgaauccuugaugggaaaaacugcacacugauagaugcucuauugggagacccucauugugauggcuuccaaaauaaggaaugggaccuuuuuguugaacgcagcaaagcuuacagcaacuguuacccuuaugaugugccggauuaugccucccuuaggucacuaguugccucauccggcacccuugaguuuaccaaugaaggcuucaauuggacuggagucgcucaggauggaacaagcuaugcuugcaaaaggggaucuguuaaaaguuucuuuaguagauugaauugguugcacaaauuagaauacaaauauccagcacugaacgugacuaugccaaacaaugacaaauuugacaaauuguacauuugggggguucaccacccgaguacggacagugaccaaaccagccuauauguucaagcaucagggagagucacagucucuaccaaaagaagccaacaaacuguaaucccgaauaucgggucuagacccuggguaaggggugucuccagcagaauaagcaucuauuggacaauuguaaaaccgggagacauacuuuugauuaacagcacagggaaucuaauugcuccucgggguuacuucaaaauacgaagugggaaaagcucaauaaugaggucagaugcacccauuggcaacugcaauucugaaugcaucacuccaaauggaagcauucccaaugacaaaccuuuucaaaauguaaacaggaucacauauggggccugucccagauauguuaagcaaaacacucugaaauuggcaacagggaugcggaauguaccagagaaacaaacuagaggcauauucggcgcaaucgcagguuucauagaaaaugguugggagggaaugguagacgguugguacgguuucaggcaucaaaauucugagggcacaggacaagcagcagaucuuaaaagcacucaagcagcaaucaaccaaaucaacgggaaacugaauagguuaaucgagaaaacgaacgagaaauuccaucaaaucgaaaaagaauuuucagaaguagaagggagaauucaggaccucgagaaauauguugaagacacuaaaauagaucucuggucuuacaacgcggagcuucuuauugcccuggagaaccaacauacaauugaucuaacugacucagaaaugaacaaacuguuugaaagaacaaggaagcaacugagggaaaaugcugaggacaugggcaaugguugcuucaaaauauaccacaaaugugacaaugccugcauagggucaaucagaaauggaacuuaugaccaugauguauacagagacgaagcauuaaacaaccgguuccagaucaaagguguugagcugaagucaggauacaaagauuggauccuauggauuuccuuugccauaucaugcuuuuugcuuuguguuguuuugcugggguucaucaugugggccugccaaaaaggcaacauuaggugcaacauuugcauuuga

SEQ ID NO: 32911 - RNA, 1701 nt, Artificial Sequence
  derived and/or modified CDS sequence (wt) from hemagglutinin__InfluenzaA__ABE14464
augaagacuaucauugcuuugagcuacauuuuaugucagguuuucgcucaaaaacuucccggaaaugacaacagcacagcaacgcugugccugggacaccaugcagugccaaacggaacgcuagugaaaacaaucacgaaugaucaaauugaagugacuaaugcuacugagcugguucagaguuccucaacagguagaauaugcgacaguccucaccgaauccuugauggaaaaaacugcacacuaauagaugcucuauugggagacccucauugugauggcuuccaaaauaaggaaugggaccuuuuuguugaacgcagcaaagcuuacagcaacuguuacccuuaugaugugccggauuaugccucccuuaggucacuaguugccucaucaggcacccuggaguuuaccaaugaaggcuucaauuggacuggagucgcucaggaugggaaaagcuaugcuugcaaaaggggaucuguuaacaguuucuuuaguagauugaauugguugcacaaauuagaauacaaauauccagcacugaacgugacuaugccaaacaaugacaaauuugacaaauuguacauuugggggguucaccacccgagcacggauagugaccaaaccagccuauauguucaagcaucagggagagucacagucucuaccaaaagaagccaacaaacuguaaucccgaauaucggguccagacccugggugaggggcaucuccaguagaauaagcaucuauuggacaauaguaaaaccgggagacauacuuuugauuaacagcacagggaaucuaauugcuccucgggguuacuucaaaauacgaaaugggaaaagcucaauaaugaggucagaugcacccauugacaacugcaauucugaaugcaucacuccaaauggaagcauucccaaugacaaaccuuuucaaaauguaaacaggaucacauauggggccugucccagauauguuaagcaaaacacucugaaauuggcaacagggaugcggaauguaccagagaaacaaacuagaggcauauucggcgcaaucgcagguuucauagaaaaugguugggagggaaugauagacgguugguacgguuucaggcaucaaaauucugagggcacaggacaagcagcagaucuuaaaagcacucaagcagcaaucgaucaaaucaacgggaaacugaauagguuaaucgagaaaacgaacgagaaauuccaucaaaucgaaaaagaauucucagaaguagaagggagaauucaggaccucgagaaauauguugaagacacuaaaauagaucucuggucuuacaacgcggagcuucuuguugcccuggagaaucaacauacaauugaucuaacugacucagaaaugaacaaacuguuugaaagaacaaggaagcaacugagggaaaaugcugaggacaugggcaaugguugcuucaaaauauaccacaaaugugacaaugccugcauagggucaaucagaaauggaacuuaugaccaugauguauacagagacgaagcauuaaacaaccgguuccagaucaaagguguugagcugaagucgggauacaaagauuggauccuauggauuucuuuugccauaucaugcuuuuugcuuuguguuguuuugcugggguucaucaugugggccugccaaaaaggcaacauuaggugcaacauuugcauuuga

SEQ ID NO: 32912 - RNA, 1701 nt, Artificial Sequence
  derived and/or modified CDS sequence (wt) from hemagglutinin__InfluenzaA__ABE14840
augaagacuaucauugcuuugagcuacauuuuaugucugguuuucgcucaaaaacuucccagaaaugacaacagcacagcaacgcugugccugggacaucaugcagugccaaacggaacgcuagugaaaacaaucacgaaugaucaaauugaagugacuaaugcuacugagcugguucagaguuccucaacagguagaauaugcgacaguccucaccgaauccuugauggaaaaaacugcacacugauagaugcucuauugggagacccucauugugauggcuuccaaaauaaggaaugggaccuuuuuguugaacgcagcaaagcuuacagcaacuguuacccuuaugaugugccggauuaugccucccuuaggucacuaguugccucaucaggcacccuggaguuuaccaaugaaggcuucaauuggacuggagucgcucaggaugggaaaagcuaugcuugcaaaaggggaucuguuaacaguuucuuuaguagauugaauugguugcacaaauuagaauacaaauauccagcacugaacgugacuaugccaaacaaugacaaauuugacaaacuguacauuugggggguucaccacccgagcacggacagugaccaaaccagccuauauguucaagcaucagggagagucacagucucuaccaaaagaagccaacaaacuguaaucccgaauaucggguccagacccugggugaggggcaucuccaguagaauaagcaucuauuggacaauaguaaaaccgggagacauacuuuugauuagcagcacagggaaucuaauugcuccucgggguuacuucaaaauacgaaaugggaaaagcucaauaaugaggucagaugcacccauugacaacugcaauucugaaugcaucacuccaaauggaagcauucccaaugacaaaccuuuucaaaauguaaacaggaucacauauggggccugucccagauauguuaagcaaaacacucugaaauuggcaacagggaugcggaauguaccagagaaacaaacuagaggcauauucggcgcaaucgcagguuucauagaaaaugguugggagggaaugguagacgguugguacgguuucaggcaucaaaauucugagggcacaggacaagcagcagaucuuaaaagcacucaagcagcaaucgaucaaaucaacgggaaacugaauagguuaaucgagaaaacgaacgagaaauuccaucaaaucgaaaaagaauucucagaaguggaagggagaauucaggaccucgagaaauauguugaagacacuaaaauagaucucuggucuuacaacgcggagcuucuuguugcccuggagaaucaacauacaauugaucuaacugacucagaaaugaacaaacuguuugaaagaacaaggaagcaacugagggaaaaugcugaggauaugggcaaugguugcuucaaaauauaccacaaaugugacaaugccugcauagggucaaucagaaauggaacuuaugaccaugauguauacagagacgaagcauuaaacaaccgguuccagaucaaagguguugagcugaagucaggauacaaagauuggauccuauggauuuccuuugccauaucaugcuuuuugcuuuguguuguuuugcugggguucaucaugugggccugccaaaaaggcaacauuaggugcagcauuugcauuuga

SEQ ID NO: 32913 - RNA, 1701 nt, Artificial Sequence
  derived and/or modified CDS sequence (wt) from hemagglutinin__InfluenzaA__ABE15578
augaagacuaucauugcuuugagcuacauuuuaugucugguuuucgcucaaaaacuucccggaaaugacaacagcacagcaacgcugugccugggacaucaugcagugccaaacggaacgcuagugaaaacaaucacgaaugaucaaauugaagugacuaaugcuacugagcugguucagaguuccucaacagguagaauaugcgacaguccucaccgaauccuugauggaaaaaacugcacacugauagaugcucuauugggagacccucauugugauggcuuccaaaauaaggaaugggaccuuuuuguugaacgcagcaaagcuuacagcaacuguuacccuuaugaugugccggauuaugccucccuuaggucacuaguugccucaucaggcacccuggaguuuaccaaugaaggcuucaauuggacuggagucgcucaggaugggaaaagcuaugcuugcaaaaggggaucuguuaacaguuucuuuaguagauugaauugguugcacaaauuagaauacaaauauccagcacugaacgugacuaugccaaacaaugacaaauuugacaaacuguacauuugggggguucaccacccgagcacggacagugaccaaaccagccuauauguucaagcaucagggagagucacagucucuaccaaaagaagccaacaaacuguaaucccgaauaucggguccagacccugggugaggggcaucuccaguagaauaagcaucuauuggacaauaguaaaaccgggagacauacuuuugauuaacagcacagggaaucuaauugcuccucgggguuacuucaaaauacgaaaugggaaaagcucaauaaugaggucagaugcacccauugacaacugcaauucugaaugcaucacuccaaauggaagcauucccaaugacaaaccuuuucaaaauguaaacaggaucacauauggggccugucccagauauguuaagcaaaacacucugaaauuggcaacagggaugcggaauguaccagagaaacaaacuagaggcauauucggcgcaaucgcagguuucauagaaaaugguugggagggaaugguagacgguugguacgguuucaggcaucaaaauucugagggcacaggacaagcagcagaucuuaaaagcacucaagcagcaaucgaucaaaucaacgggaaacugaauagguuaaucgagaaaacgaacgagaaauuccaucaaaucgaaaaagaauucucagaaguggaagggagaauucaggaccucgagaaauauguugaagacacuaaaauagaucucuggucuuacaacgcggagcuucuuguugcccuggagaaucaacauacaauugaucuaacugacucagaaaugaacaaacuguuugaaagaacaaggaagcaacugagggaaaaugcugaggacaugggcaaugguugcuucaaaauauaccacaaaugugacaaugccugcauagggucaaucagaaauggaacuuaugaccaugauguauacagagacgaagcauuaaacaaccgguuccagaucaaagguguugagcugaagucaggauacaaagauuggauccuauggauuuccuuugccauaucaugcuuuuugcuuuguguuguuuugcugggguucaucaugugggccugccaaaaaggcaacauuaggugcagcauuugcauuuga

SEQ ID NO: 32914 - RNA, 1701 nt, Artificial Sequence
  derived and/or modified CDS sequence (wt) from hemagglutinin__InfluenzaA__ABE26991
augaaagcaaaacuacuaguccuguugugugcauuuacagcuacauaugcagacacaauauguauaggcuaccaugcgaacaacucaaccgacacuguugacacaguacuugagaagaacgugacagugacacacucugucaaccuacuugaggacagucacaacggaaaacuaugccgacuaaaaggaacagccccacuacaauuggguaauugcagcguugccggauggaucuuaggaaacccagaaugcgaaucacuguuuucuaaggaaucaugguccuacauugcagaaacaccaaacccugagaauggaacauguuacccaggguauuucgccgacuaugaggaacugagggagcaauugagcucaguaucaucauucgagagauucgaaauauuccccaaggaaagcucauggcccaaccacacaguaaccaaaggagugacggcaucaugcucccauaaugggaaaagcaguuuuuacaaaaauuugcuauggcugacggaaaagaauggcuuguacccaaaucugagcaaguccuauguaaacaacaaggagaaagaaguccuuguacuaugggguguucaucacccgucuaacauaggggaccaaagggccaucuaucauacagaaaaugcuuaugucucuguggugucuucacauuauagcagaagauucaccccagaaauagcaaaaagacccaaaguaagagaucaagaagggagaauuaacuacuacuggacucugcuggaacccggggacacaauaauauuugaggcaaauggaaaucuaauagcgccaugguacgcuuucgcauugaguagaggcuuugggucaggaaucaucaccucaaacgcaucaaugggugacugugacgcuaagugucaaacaccccaaggagcuauaaacaguagucuuccuuuccagaauguacacccagucacaauaggagagugucccaaguaugucaggaguacaaaauuaaggaugguuacaggacuaagaaacaucccauccauucaaucuagagguuuguuuggagccauugccgguuucauugaagggggguggacuggaaugauagauggaugguaugguuaucaucaucagaaugaacaaggaucuggcuaugcugcagacaaaaaaagcacacaaaaugccauugaugggauuacaaacaaggugaauucuguaaucgagaaaaugaacacucaauucacagcuguaggcaaagaauucaacaaauuagagagaaggauggaaaacuuaaauaagaaaguugaugauggauuucuggacauuuggacauauaaugcagaguuguugguucuccuggaaaaugaaaggacuuuggauuuucaugacucaaaugugaagaaucuguaugagaaaguaaaaaaccaauugaagaauaaugccaaagaaaucgggaacggguguuuugaauucuaucacaaguguaacaaugaaugcauggaaagugugaaaaauggaacuuaugacuauccaaaauauuccgaagaaucaacguuaaaaagggaaaaaauugauggagugaaauuggaaucaaugggagucuaucagauucuggcgaucuacucaacugucgccaguucacuggugcuuuuggucucccugggggcaaucaguuucuggauguguucuaaugggucuuugcaguguagaauaugcaucuga

SEQ ID NO: 32915 - RNA, 1701 nt, Artificial Sequence
  derived and/or modified CDS sequence (wt) from hemagglutinin__InfluenzaA__ABF47550
augaagacuaucauugcuuugagcuacauuuucugucugguuuucgcccaaaaacuucccggaaaugacaacagcacagcaacgcugugccugggacaucaugcagugccaaacggaacgcuagugaaaacaaucacgaaugaucagauugaagugacuaaugcuacugagcugguucagaguuccucaacagguagaauaugcgacaguccucaccgaauccuugauggaaaaaacugcacacugauagaugcucuauugggagacccucauugugauggcuuccaaaaugagaaaugggaccuuuuuguugaacgcagcaaagcuuacagcaacuguuacccuuaugaugugccggauuaugccucccuuaggucacuaguugccucaucaggcacccuggaguuuaucaaugaagacuucaauuggacuggagucacucagagugggggaagcuaugcuugcaaaaggggaucuguuaacaguuucuucaguagauugaauugguugcacgaaucagaauacaaauauccagcgcugaacgugacuaugccaaacaauggcaaauuugacaaauuguacauuugggggguucaccacccgagcacggacagagaacaaaccaaccuauauguucgagcaucagggagagucacagucucuaccaagagaagccagcaaacuguaaucccgaauaucgggucuagacccuggguaaggggucuguccaguagaauaagcaucuauuggacaauaguaaaaccgggagacauacuguugauuaauagcaccgggaaccuaauugcuccucgggguuacuucaaaauacgcacugggaaaagcucaauaaugaggucagaugcaccuauuggcaccugcagcucugaaugcaucacuccaaauggaagcauucccaaugacaaacccuuucaaaauguaaacaagaucacauauggggcaugucccagguauguuaagcaaaacacucugaaauuggcaacagggaugcggaauguaccagagaaacaaacuagaggcauauucggcgcaauagcagguuucauagaaaaugguugggagggaaugguagacgguugguacgguuucaggcaucaaaauucugagggcacaggacaagcagcagaucuuaaaagcacucaagcagcaaucgaccaaaucaacgggaaacugaauagguuaaucgagaaaacgaacgagaaauuccaucaaaucgaaaaggaauucucagaaguagaagggagaauucaggaccucgagaaauauguugaagacacuaaaauagaucucuggucuuacaacgcggagcuucuugucgcccuggagaaccaacauacaauugaucugacugacucagaaaugaacaaacuguuugaaaaaacaaggaagcaacugagggaaaaugcugaggacaugggcaaugguugcuucaagauauaccacaaaugugacaaugccugcauagggucaaucagaaauggaacuuaugaccaugauguauacagagacgaggcauuaaacaaccgguuccagaucaaagguguugagcugaagucaggauacaaagacuggaucuuauggauuuccuuugccauaucaugcuuuuugcuuuguguuguuuugcugggguucaucaugugggccugccaaaaaggcaacauuaggugcaacauuugcauuuga

SEQ ID NO: 32916 - RNA, 1698 nt, Artificial Sequence
  derived and/or modified CDS sequence (wt) from hemagglutinin__InfluenzaA__ABF47561
augaaagcaaaacuacugguccuguuauguacauuuacagcuacauacgcagacacaauauguauaggcuaccaugccaacaacucaaccgacacuguugacacaguacuugagaagaaugugacagugacacacucugucaaccuacuugaggacagucacaauggaaaacuaugucuacuaaaaggaauagccccacuacaauuggguaauugcagcguugccggauggaucuuaggaaacccagaaugcgaauuacugauuuccaaggaaucaugguccuacauuguagaaacaccaaaucccgagaauggaacauguuacccaggguauuucgccgacuaugaggaacugagggagcaauugaguucaguaucuucauuugagagauucgaaauauuccccaaaggaagcucauggcccaaccacaccgugaccggaguaucagcaucaugcucccauaaugggaaaagcaguuuuuacagaaauuugcuauggcugacggggaagaaugguuuguacccaaaacugagcauguccuauguaaacaacaaagagaaagaaguccuugugcuaugggguguucaucacccaccuaacauaggggaccaaagggcccucuaccauacagaaaaugcuuaugucucuguagugucuucacauuauagcagaagauucaccccagaaauagccaaaagacccaaaguaagagaucaggaaggaagaaucaacuacuacuggacucugcuggaacccggggacacaauaauauuugaggcaaauggaaaucuaauagcgccaugguaugcuuucgcacugaguagaggcuuuggaucaggaaucaucaccucaaaugcaccaaugggugaaugugaugcgaagugucaaacaccucagggagcuauaaacaguagucuuccuuuccagaauguacacccaguuacaauaggagaguguccaaaguaugucaggagugcaaaauuaaggaugguuacaggacuaaggaacaucccauccauucaauccagagguuuguuuggagccauugccgguuucauugaagggggguggacuggaaugguagaugggugguaugguuaucaucaucagaaugagcaaggaucuggcuaugcugcagaucaaaaaagcacacaaaaugccauuaacgggauuacaaacaaggugaauucuguaauugagaaaaugaacacucaauucacagcugugggcaaagaauucaacaaauuagaaagaaggauggaaaacuuaaauaaaaaaguugaugauggguuucuagacauuuggacauauaaugcagaauuguugguucuacuggaaaaugaaaggacuuuggauuuccaugacuccaaugugaagaaucuguaugagaaaguaaaaagccaauuaaagaauaaugccaaagaaauaggaaacggguguuuugaauucuaucacaaguguaacaaugaaugcauggaaagugugaaaaauggaacuuaugacuauccaaaauauuccgaagaaucaaaguuaaacagggagaaaauugauggaguaaaauuggaaucaaugggagucuaucagauucuggcgaucuacucaacugucgccaguucccugguucuuuuggucucccugggggcaaucagcuucuggauguguuccaaugggucuuugcaguguagaauaugcaucuga

SEQ ID NO: 32917 - RNA, 1698 nt, Artificial Sequence
  derived and/or modified CDS sequence (wt) from hemagglutinin__InfluenzaA__ABF47572
augaaagcaaaacuacugguccuguuauguacauuuacagcuacauacgcagacacaauauguauaggcuaccaugccaacaacucaaccgacacuguugacacaguacuugagaagaaugugacagugacacacucugucaaccuacuugaggacagucacaauggaaaacuaugucuacuaaaaggaauagccccacuacaauuggguaauugcagcguugccggauggaucuuaggaaacccagaaugcgaauuacugauuuccaaggaaucaugguccuacauuguagaaacaccaaaucccgagaauggaacauguuacccaggguauuucgccgacuaugaggaacugagggagcaauugaguucaguaucuucauuugagagauucgaaauauuccccaaaggaagcucauggcccaaccacaccgugaccggaguaucagcaucaugcucccauaaugggaaaagcaguuuuuacagaaauuugcuauggcugacggggaagaaugguuuguacccaaaccugagcauguccuauguaaacaacaaagauaaagaaguccuugugcuaugggguguucaucacccaccuaacauaggggaccaaagggcccucuaccauacagaaaaugcuuaugucucuguagugucuucacauuauagcagaagauucaccccagaaauagccaaaagacccaaaguaagagaucaggaaggaagaaucaacuacuacuggacucugcuggaacccggggacacaauaauauuugaggcaaauggaaaucuaauagcgccaugguaugcuuucgcacugaguagaggcuuuggaucaggaaucaucaccucaaaugcaccaaugggugaaugugaugcgaagugucaaacaccucagggagcuauaaacaguagucuuccuuuccagaauguacacccaguuacaauaggagaguguccaaaguaugucaggagugcaaaauuaaggaugguuacaggacuaaggaacaucccauccauucaauccagagguuuguuuggagccauugccgguuucauugaagggggguggacuggaaugguagaugggugguaugguuaucaucaucagaaugagcaaggaucuggcuaugcugcagaucaaaaaagcacacaaaaugccauuaacgggauuacaaacaaggugaauucuguaauugagaaaaugaacacucaauucacagcugugggcaaagaauucaacaaauuagaaagaaggauggaaaacuuaaauaaaaaaguugaugauggguuucuagacauuuggacauauaaugcagaauuguugguucuacuggaaaaugaaaggacuuuggauuuccaugacuccaaugugaagaaucuguaugagaaaguaaaaagccaauuaaagaauaaugccaaagaaauaggaaacggguguuuugaauucuaucacaaguguaacaaugaaugcauggaaagugugaaaaauggaacuuaugacuauccaaaauauuccgaagaaucaaaguuaaacagggagaaaauugauggaguaaaauuggaaucaaugggagucuaucagauucuggcgaucuacucaacugucgccaguucccugguucuuuuggucucccugggggcaaucagcuucuggauguguuccaaugggucuuugcaguguagaauaugcaucuga

SEQ ID NO: 32918 - RNA, 1698 nt, Artificial Sequence
  derived and/or modified CDS sequence (wt) from hemagglutinin__InfluenzaA__ABF47583
augaaagcaaaacuacugguccuguuauguacauuuacagcuacauacgcagacacaauauguauaggcuaccaugccaacaacucaaccgacacuguugacacaguacuugagaagaaugugacagugacacacucugucaaccuacuugaggacagucacaauggaaaacuaugucuacuaaaaggaauagccccacuacaauuggguaauugcagcguugccggauggaucuuaggaaacccagaaugcgaauuacugauuuccaaggaaucaugguccuacauuguagaaacaccaaaucccgagaauggaacauguuacccaggguauuucgccgacuaugaggaacugagggagcaauugaguucaguaucuucauuugagagauucgaaauauuccccaaaggaagcucauggcccaaccacaccgugaccggaguaucagcaucaugcucccauaaugggaaaagcaguuuuuacagaaauuugcuauggcugacggggaagaaugguuuguacccaaaccugagcauguccuauguaaacaacaaagagaaagaaguccuugugcuaugggguguucaucacccaccuaacauaggggaccaaagggcccucuaccauacagaaaaugcuuaugucucuguagugucuucacauuauagcagaagauucaccccagaaauagccaaaagacccaaaguaagagaucaggaaggaagaaucaacuacuacuggacucugcuggaacccggggacacaauaauauuugaggcaaauggaaaucuaauagcgccaugguaugcuuucgcacugaguagaggcuuuggaucaggaaucaucaccucaaaugcaccaaugggugaaugugaugcgaagugucaaacaccucagggagcuauaaacaguagucuuccuuuccagaauguacacccaguuacaauaggagaguguccaaaguaugucaggagugcaaaauuaaggaugguuacaggacuaaggaacaucccguccauucaauccagagguuuguuuggagccauugccgguuucauugaagggggguggacuggaaugguagaugggugguaugguuaucaucaucagaaugagcaaggaucuggcuaugcugcagaucaaaaaagcacacaaaaugccauuaacgggauuacaaacaaggugaauucuguaauugagaaaaugaacacucaauucacagcugugggcaaagaauucaacaaauuagaaagaaggauggaaaacuuaaauaaaaaaguugaugauggguuucuagacauuuggacauauaaugcagaauuguugguucuacuggaaaaugaaaggacuuuggauuuccaugacuccaaugugaagaaucuguaugagaaaguaaaaagccaauuaaagaauaaugccaaagaaauaggaaacggguguuuugaauucuaucacaaguguaacaaugaaugcauggaaagugugaaaaauggaacuuaugacuauccaaaauauuccgaagaaucaaaguuaaacagggagaaaauugauggaguaaaauuggaaucaaugggagucuaucagauucuggcgaucuacucaacugucgccaguucccugguucuuuuggucucccugggggcaaucagcuucuggauguguuccaaugggucuuugcaguguagaauaugcaucuga

SEQ ID NO: 32919 - RNA, 1701 nt, Artificial Sequence
  derived and/or modified CDS sequence (wt) from hemagglutinin__InfluenzaA__ABF47594
augaagacuaucauugcuuugagcuacauuuuaugucugguuuucgcucaaaaacuucccggaaaugacaacagcacggcaacgcugugccugggacaccaugcagugccaaacggaacgcuagugaaaacaaucacgaaugaccaaauugaagugacuaaugcuacugagcugguucagaguuccucaacagguagaauaugcgacaguccucaccgaauccuugauggaaaaaacugcacauugauagaugcucuauugggagacccucauugugauggcuuccaaaauaaggaaugggaccuuuuuguugaacgcagcaaagcuuacagcaacuguuacccuuaugaugugccggauuaugccucccuuaggucacuaguugccucauccggcacccuggaguuuaacaaugaaagcuucaauuggacuggagucgcucagaauggaacaagcuaugcuugcaaaaggagaucuguuaaaaguuucuuuaguagauugaauugguugcacaaauuagaauacaaauauccagcacagaacgugacuaugccaaacaaugacaaauuugacaaauuguacauuugggggguucaccacccgaguacggacagugaccaaaccagccuauauguucaagcaucagggagagucacagucucuaccaaaagaagccaacaaacuguaaucccgaauaucggaucuagacccuggguaaggggugucuccagcagaauaagcaucuauuggacaauaguaaaaccgggagacauacuuuugauuaacagcacagggaaucuaauugcuccucgggguuacuucaaaauacgaagugggaaaagcucaauaaugaggucagaugcacccauuggcaacugcaauucugaaugcaucacuccaaauggaagcauucccaaugacaaaccauuucaaaauguaaacaggaucacauauggggccugucccagauauguuaagcaaaacacucugaaauuggcaacagggaugcggaauguaccagagaaacaaacuagaggcauauucggcgcaaucgcagguuucauagaaaaugguugggagggaaugguagacgguugguacgguuucaggcaucaaaauucugagggcacaggacaagcagcagaucuuaaaagcacucaagcagcaaucaaccaaaucaacgggaaacugaauagguuaaucgagaaaacgaacgagaaauuccaucaaaucgaaaaagaauucucagaaguagaagggagaauucaggaccucgagaaauauguugaagacacuaaaauagaucucuggucguacaacgcggagcuucuuguugcccuggagaaccaacauacaauugaucuaacugacucagaaaugaacaaacuguuugaaagaacaaggaagcaacugagggaaaaugcugaggacaugggcaaugguugcuucaaaauauaccacaaaugugacaaugccugcauagggucaaucagaaauggaacuuaugaccaugauguauacagagacgaagcauuaaacaaccgguuccagaucaaagguguugagcugaagucaggauacaaagauuggauccuauggauuuccuuugccauaucauguuuuuugcuuuguguuguuuugcugggguucaucaugugggccugccaaaaaggcaacauuaggugcaacauuugcauuuga

SEQ ID NO: 32920 - RNA, 1701 nt, Artificial Sequence
  derived and/or modified CDS sequence (wt) from hemagglutinin__InfluenzaA__ABF47605
augaaagcaaaacuacuaguccuguugugugcauuuacagcuacauaugcagacacaauauguauaggcuaccaugcgaacaacucaaccgacacuguugacacaguacuugagaagaacgugacagugacacacucugucaaccuacuugaggacagucacaacggaaaacuaugccgacuaaaaggaacagccccacuacaauuggguaauugcagcguugccggauggaucuuaggaaacccagaaugcgaaucacuguuuucuaaggaaucaugguccuacauugcagaaacaccaaacccugagaauggaacauguuacccaggguauuucgccgacuaugaggaacugagggagcaauugagcucaguaucaucauucgagagauucgaaauauuccccaaggaaagcucauggcccaaccacacaguaaccaaaggagugacggcaucaugcucccauaaugggaaaagcaguuuuuacaaaaauuugcuauggcugacggaaaagaauggcuuguacccaaaucugagcaaguccuauguaaacaacaaggagaaagaaguccuuguacuaugggguguucaucacccgucuaacauaggggaccaaagggccaucuaucauacagaaaaugcuuaugucucuguggugucuucacauuauagcagaagauucaccccagaaauagcaaaaagacccaaaguaagagaucaagaagggagaauuaacuacuacuggacucugcuggaacccggggacacaauaauauuugaggcaaguggaaauuuaauagcgccaugguacgcuuucgcauugaguagaggcuuugggucaggaaucaucaccucaaacgcaucaaugggugaaugugacgcuaagugucaaacaccccaaggagcuauaaacaguagucuuccuuuccagaauguacacccagucacaauaggagagugucccaaguaugucaggaguacaaaauuaaggaugguuacaggacuaagaaacaucccauccauucaaucuagagguuuguuuggagccauugccgguuucauugaagggggguggacuggaaugauagauggaugguaugguuaucaucaucagaaugaacaaggaucuggcuaugcugcagacaaaaaaagcacacaaaaugccauugaugggauuacaaacaaggugaauucuguaaucgagaaaaugaacacucaauucacagcuguaggcaaagaauucaacaaauuagagagaaggauagaaaacuuaaauaagaaaguugaugauggauuucuggacauuuggacauauaaugcagaguuguugguucuccuggaaaaugaaaggacuuuggauuuucaugacucaaaugugaagaaucuguaugagaaaguaaaaaaccaauugaagaauaaugccaaagaaaucgggaacggguguuuugaauucuaucacaaguguaacaaugaaugcauggaaagugugaaaaauggaacuuaugacuauccaaaauauuccgaagaaucaaaguuaaaaagggaaaaaauugauggagugaaauuggaaucaaugggagucuaucagauucuggcgaucuacucaacugucgccaguucacuggugcuuuuggucucccugggggcaaucaguuucuggauguguucuaaugggucuuugcaguguagaauaugcaucuga

SEQ ID NO: 32921 - RNA, 1701 nt, Artificial Sequence; identical to SEQ ID NO: 32906
  derived and/or modified CDS sequence (wt) from hemagglutinin__InfluenzaA__ABF47616

SEQ ID NO: 32922 - RNA, 1701 nt, Artificial Sequence
  derived and/or modified CDS sequence (wt) from hemagglutinin__InfluenzaA__ABF47627
augaaagcaaaacuacuaguccuguugugugcauuuacagcuacauaugcagacacaauauguauaggcuaccaugcgaacaacucaaccgacacuguugacacaguacuugagaagaacgugacagugacacacucugucaaccuacuugaggacagucacaacggaaaacuaugccgacuaaaaggaacagccccacuacaauuggguaauugcagcguugccggauggaucuuaggaaacccagaaugcgaaucacuguuuucuaaggaaucaugguccuacauugcagaaacaccaaacccugagaauggaacauguuacccaggguauuucgccgacuaugaggaacugagggagcaauugagcucaguaucaucauucgagagauucgaaauauuccccaaggaaagcucauggcccaaccacacaguaaccaaaggagugacggcaucaugcucccauaaugggaaaagcaguuuuuacaaaaauuugcuauggcugacggaaaagaauggcuuguacccaaaucugagcaaguccuauguaaacaacaaggagaaagaaguccuuguacuaugggguguucaucacccgucuaacauaggggaccaaagggccaucuaucauacagaaaaugcuuaugucucuguggugucuucacauuauagcagaagauucaccccagaaauagcaaaaagacccaaaguaagagaucaagaagggagaauuaacuacuacuggacucugcuggaacccggggacacaauaauauuugaggcaaauggaaaucuaauagcgccaugguacgcuuucgcauugaguagaggcuuugggucaggaaucaucaccucaaacgcaucaaugggugacugugacgcuaagugucaaacaccccaaggagcuauaaacaguagucuuccuuuccagaauguacacccagucacaauaggagagugucccaaguaugucaggaguacaaaauuaaggaugguuacaggacuaagaaacaucccauccauucaaucuagagguuuguuuggagccauugccgguuucauugaagggggguggacuggaaugauagauggaugguaugguuaucaucaucagaaugaacaaggaucuggcuaugcugcagacaaaaaaagcacacaaaaugccauugaugggauuacaaacaaggugaauucuguaaucgagaaaaugaacacucaauucacagcuguaggcaaagaauucaacaaauuagagagaaggauggaaaacuuaaauaagaaaguugaugauggauuucuggacauuuggacauauaaugcagaguuguugguucuccuggaaaaugaaaggacuuuggauuuucaugacucaaaugugaagaaucuguaugagaaaguaaaaaaccaauugaagaauaaugccaaagaaaucgggaacggguguuuugaauucuaucacaaguguaacaaugaaugcauggaaagugugaaaaauggaacuuaugacuauccaaaauauuccgaagaaucaaaguuaaaaagggaaaaaauugauggagugaaauuggaaucaaugggagucuaucagauucuggcgaucuacucaacugucgccaguucacuggugcuuuuggucucccugggggcaaucaguuucuggauguguucuaaugggucuuugcaguguagaauaugcaucuga

SEQ ID NO: 32923 - RNA, 1701 nt, Artificial Sequence
  derived and/or modified CDS sequence (wt) from hemagglutinin__InfluenzaA__ABF47638
augaaagcaaaacuacuaguccuguugugugcauuuacagcuacauaugcagacacaauauguauaggcuaccaugcgaacaacucaaccgacacuguugacacaguacuugagaagaacgugacagugacacacucugucaaccuacuugaggacagucacaacggaaaacuaugccgacuaaaaggaacagccccacuacaauuggguaauugcagcguugccggauggaucuuaggaaacccagaaugcgaaucacuguuuucuaaggaaucaugguccuacauugcagaaacaccaaacccugagaauggaacauguuacccaggguauuucgccgacuaugaggaacugagggagcaauugagcucaguaucaucauucgagagauucgaaauauuccccaaggaaagcucauggcccaaccacaccguaaccaaaggagugacggcaucaugcucacauaaugggaaaagcaguuuuuacaaaaauuugcuauggcugacggaaaagaauggcuuguacccaaaucugagcaaguccuauguaaacaacaaggagaaagaaguccuuguacuaugggguguucaucacccgucuaacauaggggaccaaagggccaucuaucauacagaaaaugcuuaugucucuguagugucuucacauuauagcagaagauucaccccagaaauaacaaaaagacccaaaguaagagaucaagaagggagaauuaacuacuacuggacucugcuggaacccggggacacaauaauauuugaggcaaauggaaaucuaauagcgccaugguacgcuuucgcacugaguagaggcuuugggucaggaaucaucaccucaaacgcaucaaugggugaaugugacgcuaagugucaaacaccccaaggagcuauaaacaguagucuuccuuuccagaauguacacccagucacaauaggagagugucccaaguaugucaggaguacaaaauuaaggaugguuacaggacuaagaaacaucccauccauucaaucuagagguuuguuuggagccauugccgguuucauugaagggggguggacuggaaugauagauggaugguaugguuaccaucaucagaaugaacaaggaucuggcuaugcugcagaccaaaaaagcacacaaaaugccauugaugggauuacaaacaaggugaauucuguaaucgagaaaaugaacacucaauucacagcuguaggcaaagaauucaacaaauuagagagaaggauggaaaacuuaaauaagaaaguugaugauggguuucuggacauuuggacauauaaugcagaguuguugguucuccuggaaaaugaaaggacuuuggauuuucaugacucaaaugugaagaaucuguaugagaaaguaaaaacccaauugaagaauaaugccaaagaaaucgggaacggguguuuugaauucuaucacaaguguaacaaugaaugcauggaaagugugaaaaauggaacuuaugacuauccaaaauauuccgaagaaucaaaguuaaacagggaaaaaauugauggagugaaauuggaaucaaugggagucuaucagauucuggcgaucuacucaacugucgccaguucacuggugcuuuuggucucccugggggcaaucaguuucuggauguguucuaaugggucuuugcaguguagaauaugcaucuga

SEQ ID NO: 32924 - RNA, 1701 nt, Artificial Sequence
  derived and/or modified CDS sequence (wt) from hemagglutinin__InfluenzaA__ABF47649
augaaagcaaaacuacuaguccuguugugugcauuuacagcuacauaugcagacacaauauguauaggcuaccaugcgaacaacucaaccgacacuguugacacaguacuugagaagaacgugacagugacacacucugucaaccuacuugaggacagucacaacggaaaacuaugccgacuaaaaggaacagccccacuacaauuggguaauugcagcguugccggauggaucuuaggaaacccagaaugcgaaucacuguuuucuaaggaaucaugguccuacauugcagaaacaccaaacccugagaauggaacauguuacccaggguauuucgccgacuaugaggaacugagggagcaauugagcucaguaucaucauucgagagauucgaaauauuccccaaggaaagcucauggcccaaccacaccguaaccaaaggagugacggcaucaugcucacauaaugggaaaaguaguuuuuacaaaaauuugcuauggcugacggaaaagaauggcuuguacccaaaucugagcaaguccuauguaaacaacaaggagaaagaaguccuuguacuaugggguguucaucacccgucuaacauaggggaccaaagggccaucuaucauacagaaaaugcuuaugucucuguagugucuucacauuauagcagaagauucaccccagaaauaacaaaaagacccaaaguaagagaucaagaagggagaauuaacuacuacuggacucugcuggaacccggggacacaauaauauuugaggcaaauggaaaucuaauagcgccaugguacgcuuucgcacugaguagaggcuuugggucaggaaucaucaccucaaacgcaucaaugggugaaugugacgcuaagugucaaacaccccaaggagcuauaaacaguagucuuccuuuccagaauguacacccagucacaauaggagagugucccaaguaugucaggaguacaaaauuaaggaugguuacaggacuaagaaacaucccauccauucaaucuagagguuuguuuggagccauugccgguuucauugaagggggguggacuggaaugauagauggaugguaugguuaccaucaucagaaugaacaaggaucuggcuaugcugcagaccaaaaaagcacacaaaaugccauugaugggauuacaaacaaggugaauucuguaaucgagaaaaugaacacucaauucacagcuguaggcaaagaauucaacaaauuagagagaaggauggaaaacuuaaauaagaaaguugaugauggguuucuggacauuuggacauauaaugcagaguuguugguucuccuggaaaaugaaaggacuuuggauuuucaugacucaaaugugaagaaucuguaugagaaaguaaaaacccaauugaagaauaaugccaaagaaaucgggaacggguguuuugaauucuaucacaaguguaacaaugaaugcauggaaagugugaaaaauggaacuuaugacuauccaaaauauuccgaagaaucaaaguuaaacagggaaaaaauugauggagugaaauuggaaucaaugggagucuaucagauucuggcgaucuacucaacugucgccaguucacuggugcuuuuggucucccugggggcaaucaguuucuggauguguucuaaugggucuuugcaguguagaauaugcaucuga

SEQ ID NO: 32925 - RNA, 1701 nt, Artificial Sequence
  derived and/or modified CDS sequence (wt) from hemagglutinin__InfluenzaA__ABF47660
augaaagcaaaacuacuaguccuguugugugcauuuacagcuacauaugcagacacaauauguauaggcuaccaugcgaacaacucaaccgacacuguugacacaguacuugagaagaacgugacagugacacacucugucaaccuacuugaggacagucacaacggaaaacuaugccgacuaaaaggaacagccccacuacaauuggguaauugcagcguugccggauggaucuuaggaaacccagaaugcgaaucacuguuuucuaaggaaucaugguccuacauugcagaaacaccaaacccugagaauggaacauguuacccaggguauuucgccgacuaugaggaacugagggagcaauugagcucaguaucaucauucgagagauucgaaauauuccccaaggaaagcucauggcccaaccacacaguaaccaaaggagugacggcaucaugcucccauaaugggaaaagcaguuuuuacaaaaauuugcuauggcugacggaaaagaauggcuuguacccaaaucugagcaaguccuauguaaacaacaaggagaaagaaguccuuguacuaugggguauucaucacccgucuaacauaggggaccaaagggccaucuaucauacagaaaaugcuuaugucucuguggugucuucacauuauagcagaagauucaccccagaaauagcaaaaagacccaaaguaagagaucaagaagggagaauuaacuacuacuggacucugcuggaacccggggacacaauaauauuugaggcaaauggaaaucuaauagcgccaugguacgcuuucgcauugaguagaggcuuugggucaggaaucaucaccucaaacgcaucaaugggugacugugacgcuaagugucaaacaccccaaggagcuauaaacaguagucuuccuuuccagaauguacacccagucacaauaggagagugucccaaguaugucaggaguacaaaauuaaggaugguuacaggacuaagaaacaucccauccauucaaucuagagguuuguuuggagccauugccgguuucauugaagggggguggacuggaaugauagauggaugguaugguuaucaucaucagaaugaacaaggaucuggcuaugcugcagacaaaaaaagcacacaaaaugccauugaugggauuacaaacaaggugaauucuguaaucgagaaaaugaacacucaauucacagcuguaggcaaagaauucaacaaauuagagagaaggauggaaaacuuaaauaagaaaguugaugauggauuucuggacauuuggacauauaaugcagaguuguugguucuccuggaaaaugaaaggacuuuggauuuucaugacucaaaugugaagaaucuguaugagaaaguaaaaacccaauugaagaauaaugccaaagaaaucgggaacggguguuuugaauucuaucacaaguguaacaaugaaugcauggaaagugugaaaaauggaacuuaugacuauccaaaauauuccgaagaaucaaaguuaaaaagggaaaaaauugauggagugaaauuggaaucaaugggagucuaucagauucuggcgaucuacucaacugucgccaguucacuggugcuuuuggucucccugggggcaaucaguuucuggauguguucuaaugggucuuugcaguguagaauaugcaucuga

SEQ ID NO: 32926 - RNA, 1698 nt, Artificial Sequence
  derived and/or modified CDS sequence (wt) from hemagglutinin__InfluenzaA__ABF47671
augaaagcaaaacuacugguccuguuauguacauuuacagcuacauacgcagacacaauauguauaggcuaccaugccaacaacucaaccgacacuguugacacaguacuugagaagaaugugacagugacacacucugucaaccuacuugaggacagucacaauggaaaacuaugucuacuaaaaggaauagccccacuacaauuggguaauugcagcguugccggauggaucuuaggaaacccagaaugcgaauuacugauuuccaaggaaucaugguccuacauuguagaaacaccaaaucccgagaauggaacauguuacccaggguauuucgccgacuaugaggaacugagggagcaauugaguucaguaucuucauuugagagauucgaaauauuccccaaaggaagcucauggcccaaccacaccguaaccggaguaucagcaucaugcucccauaaugggaaaagcaguuuuuacagaaauuugcuauggcugacggggaagaaugguuuguacccaaaccugagcauguccuauguaaacaacaaagagaaagaaguccuugugcuaugggguguucaucacccaccuaacauaggggaccaaagggcccucuaccauacagaaaaugcuuuugucucuguagugucuucacauuauagcagaagauucaccccagaaauagccaaaagacccaaaguaagagaucaggaaggaagaaucaacuacuacuggacucugcuggaacccggggacacaauaauauuugaggcaaauggaaaucuaauagcgccaugguaugcuuucgcacugaguagaggcuuuggaucaggaaucaucaccucaaaugcaccaauggaugaaugugaugcgaagugucaaacaccucagggagcuauaaacaguagucuuccuuuccagaauguacacccaguuacaauaggagaguguccaaaguaugucaggagugcaaaauuaaggaugguuacaggacuaaggaacaucccauccauucaauccagagguuuguuuggagccauugccgguuucauugaagggggguggacuggaaugguagaugggugguaugguuaucaucaucagaaugagcaaggaucuggcuaugcugcagaucaaaaaagcacacaaaaugccauuaacgggauuacaaacaaggugaauucuguaauugagaaaaugaacacucaauucacagcugugggcaaagaauucaacaaauuagaaagaaggauggaaaacuuaaauaaaaaaguugaugauggguuucuagacauuuggacauauaaugcagaauuguugguucuacuggaaaaugaaaggacuuuggauuuccaugacuccaaugugaagaaucuguaugagaaaguaaaaagccaauuaaagaauaaugccaaagaaauaggaaacggguguuuugaauucuaucacaaguguaacaaugaaugcauggaaagugugaaaaauggaacuuaugacuauccaaaauauuccgaagaaucaaaguuaaacagggagaaaauugauggaguaaaauuggaaucaaugggagucuaucagauucuggcgaucuacucaacugucgccaguucccugguucuuuuggucucccugggggcaaucagcuucuggauguguuccaaugggucuuugcaguguagaauaugcaucuga

SEQ ID NO: 32927 - RNA, 1701 nt, Artificial Sequence
  derived and/or modified CDS sequence (wt) from hemagglutinin__InfluenzaA__ABF47693
augaaagcaaaacuacugguccuguuaugugcacuuucagcuacagaugcagacacaauauguauaggcuaccaugcgaacaacucaaccgacacuguugacacaguacucgaaaagaacgugacagugacacacucugucaaccuacuugaggacagucacaacggaaaacuaugcagacuaaaaggaauagccccacuacaauuggggaaaugcaacauugccggauggaucuuaggaaacccagaaugcgaaucacuguuuucuaagaaaucaugguccuacauugcagaaacaccaaacuccgagaauggaacauguuacccaggauauuucgccgacuaugaggaauugagggagcaauugagcucaguaucaucauucgagagauucgaaauauuccccaaggaaagaucauggcccaaacacaacguaaccagaggcguaacggcaucaugcucccauaaggggaaaagcaguuuuuacagaaauuugcuauggcugacggagaaaaauggcucguacccaaaucugagcaaguccuaugugaacaacaaagagaaagaaguccuuguacuaugggguguucaucacccgucuaacauagaggaccaaaagaccaucuaucggaaagaaaaugcuuaugucucuguagugucuucaaauuauaacaggagauucaccccagaaauagcagaaagacccaaaguaagaggucaagcagggagaauuaacuacuacuggacucugcuggaacccggggacacaauaauauuugaggcaaauggaaaucuaauagcgccauggcaugcuuucgcacugaauagaggcuuugggucaggaaucaucaccucaaacgcaucgauggaugaaugugacacgaagugucaaacaccccagggagcuauaaacaguagucuuccuuuccagaauauacacccagucacaauaggggagugcccaaaauacgucaggaguacaaaauugaggaugguuacaggacuaaggaacaucccauccauucaauccagaggucuguuuggagccauugccgguuucauugaagggggauggacuggaaugauagauggaugguaugguuaucaucaucagaaugaacagggaucuggcuaugcugcggaucaaaaaagcacacaaaaugccauuaacgggauuacaaacaaggugaacucuguuaucgagaaaaugaacacucaauucacagcuguggguaaagaauucaacaaauuagaaaaaaggauggaaaacuuaaauaaaaaaguugaugauggauuucuggacauuuggacauauaaugcagaauuguugguucuacuggaaaaugaaaggacuuuggauuuucaugacucaaaugugaagaaucuguaugagaaaguaaaaagccaauuaaagaauaaugccaaagaaauaggaaacggguguuuugaauucuaccacaaguguaacaaugaaugcauggaaaguguaaaaaauggaacuuaugacuauccaaaauauucagaggaaucaaaguuaaacagggaaaaaauugauggagugaaauuggaaucaaugggagucuaucagauucuggcgaucuacucaacugucgccaguucacuagugcuuuuggucucccugggggcaaucagcuucuggauguguucuaaugggucuuugcagugcagaauaugcaucuga

SEQ ID NO: 32928 - RNA, 1701 nt, Artificial Sequence
  derived and/or modified CDS sequence (wt) from hemagglutinin__InfluenzaA__ABF47704
augaaagcaaaacuacugguccuguuaugugcacuuucagcuacagaugcagacacaauauguauaggcuaccaugcgaacaacucaaccgacacuguugacacaguacucgaaaagaacgugacagugacacacucugucaaccuacuugaggacagucacaacggaaaacuaugcagacuaaaaggaauagccccacuacaauuggggaaaugcaacauugccggauggaucuuaggaaacccagaaugcgaaucacuguuuucuaagaaaucaugguccuacauugcagaaacaccaaacuccgagaauggaacauguuacccaggauauuucgccgacuaugaggaauugagggagcaauugagcucaguaucaucauucgagagauucgaaauauuccccaaggaaagaucauggcccaaacacaacguaaccagaggcguaacggcaucaugcucccauaaggggaaaagcaguuuuuacagaaauuugcuauggcugacggagaaaaauggcucguacccaaaucugagcaaguccuaugugaacaacaaagagaaagaaguccuuguacuaugggguguucaucacccgucuaacauagaggaccaaaagaccaucuaucggaaagaaaaugcuuaugucucuguagugucuucaaauuauaacaggagauucaccccagaaauagcagaaagacccaaaguaagaggucaagcagggagaauuaacuacuacuggacucugcuggaacccggggacacaauaauauuugaggcaaauggaaaucuaauagcgccauggcaugcuuucgcacugaauagaggcuuugggucaggaaucaucaccucaaacgcaucgauggaugaaugugacacgaagugucaaacaccccagggagcuauaaacaguagucuuccuuuccagaauauacacccagucacaauaggggagugcccaaaauacgucaggaguacaaaauugaggaugguuacaggacuaaggaacaucccauccauucaauccagaggucuguuuggagccauugccgguuucauugaagggggauggacuggaaugauagauggaugguaugguuaucaucaucagaaugaacagggaucuggcuaugcugcggaucaaaaaagcacacaaaaugccauuaacgggauuacaaacaaggugaacucuguuaucgagaaaaugaacacucaauucacagcuguggguaaagaauucaacaaauuagaaaaaaggauggaaaacuuaaauaaaaaaguugaugauggauuucuggacauuuggacauauaaugcagaauuguugguucuacuggaaaaugaaaggacuuuggauuuucaugacucaaaugugaagaaucuguaugagaaaguaaaaagccaauuaaagaauaaugccaaagaaauaggaaacggguguuuugaauucuaccacaaguguaacaaugaaugcauggaaaguguaaaaaauggaacuuaugacuauccaaaauauucagaggaaucaaaguuaaacagggaaaaaauugauggagugaaauuggaaucaaugggagucuaucagauucuggcgaucuacucaacugucgccaguucacuggugcuuuuggucucccugggggcaaucagcuucuggauguguucuaaugggucuuugcagugcagaauaugcaucuga

SEQ ID NO: 32929 - RNA, 1701 nt, Artificial Sequence
  derived and/or modified CDS sequence (wt) from hemagglutinin__InfluenzaA__ABF47715
augaaagcaaaacuacugguccuguuaugugcacuuucagcuacagaugcagacacaauauguauaggcuaccaugcgaacaacucaacugacacuguugacacaguacucgaaaagaacgugacagugacacacucugucaaccuacuugaggacagucacaacggaaaacuaugcagacuaaaaggaauagccccacuacaauuggggaaaugcagcauugccggauggaucuuaggaaacccagaaugcgaaucacuguuuuccaagaaaucaugguccuacauugcagaaacaccaaacuccgagaauggaacauguuacccaggauauuucgccgacuaugaggaauugagggagcaauugagcucaguaucaucauucgagagauucgaaauauuccccaaggaaagaucauggcccaaacacaacguaaccagaggcguaacggcaucaugcucccauaaggggaaaagcaguuuuuacagaaauuugcuauggcugacggagaaaaauggcucguacccaaaucugagcaaguccuaugugaacaacaaagagaaagaaguccuuguacuaugggguguucaucacccgucuaacauagaggaccaaaagaccaucuaucggaaagaaaaugcuuaugucucuguagugucuucaaauuauaacagaagauucaccccagaaauagcagaaagacccaaaguaagaggucaagcagggagaauuaacuacuacuggacucugcuggaaccuggggacacaauaauauuugaggcaaauggaaaucuaauagcgccauggcaugcuuucgcacugaauagaggcuuugggucaggaaucaucaccucaaacgcaucgauggaugaaugugacacgaagugucaaacaccccagggagcuauaaacaguagucuuccuuuccagaauauacacccagucacaauaggagagugcccaaaauacgucaggaguacaaaauugaggaugguuacaggacuaaggaacaucccauccauucaauccagaggucuguuuggagccauugccgguuucauugaagggggauggacuggaaugauagauggaugguaugguuaucaucaucagaaugaacagggaucuggcuaugcugcggaucaaaaaagcacacaaaaugccauuaacgggauuacaaacaaggugaacucuguuaucgagaaaaugaacacucaauucacagcuguggguaaagaauucaacaaauuagaaaaaaggauggaaaacuuaaauaaaaaaguugaugauggauuucuggacauuuggacauauaaugcagaauuguugguucuacuggaaaaugaaaggacuuuggauuuucaugacucaaaugugaagaaucuguaugagaaaguaaaaagccaauuaaagaauaaugccaaagaaauaggaaacggguguuuugaauucuaccacaaguguaacaaugaaugcauggaaaguguaaaaaauggaacuuaugacuauccaaaauauucagaggaaucaaaguuaaacagggaaaaaauugauggagugaaauuggaaucaaugggagucuaucagauucuggcgaucuacucaacugucgccaguucacuggugcuuuuggucucccugggggcaaucagcuucuggauguguucuaaugggucuuugcagugcagaauaugcaucuga

SEQ ID NO: 32930 - RNA, 1701 nt, Artificial Sequence; identical to SEQ ID NO: 32928
  derived and/or modified CDS sequence (wt) from hemagglutinin__InfluenzaA__ABF47726

SEQ ID NO: 32931 - RNA, 1701 nt, Artificial Sequence
  derived and/or modified CDS sequence (wt) from hemagglutinin__InfluenzaA__ABF47737
augaaagcaaaacuacugguccuguuaugugcacuuucagcuacagaugcagacacaauauguauaggcuaccaugcgaacaacucaaccgacacuguugacacaguacucgaaaagaacgugacagugacacacucugucaaccuacuugaggacagucacaacggaaaacuaugcagacuaaaaggaauagccccacuacaauuggggaaaugcaacauugccggauggaucuuaggaaacccagaaugcgaaucacuguuuucuaagaaaucaugguccuacauugcagaaacaccaaacuccgagaauggaacauguuacccaggauauuucgccgacuaugaggaauugagggagcaauugagcucaguaucaucauucgagagauucgaaauauuccccaaggaaagaucauggcccaaacacaacguaaccagaggcguaacggcaucaugcucccauaaggggaaaagcaguuuuuacagaaauuugcuauggcugacggagaaaaauggcucguacccaaaucugagcaaguccuaugugaacaacaaagagaaagaaguccuuguacuaugggguguucaucacccgucuaacauagaggaccaaaagaccaucuaucggaaagaaaaugcuuaugucucuguagugucuucaaauuauaacaggagauucaccccagaaauagcagaaagacccaaaguaagaggucaagcagggagaauuaacuacuacuggacucugcuggaacccggggacacaauaauauuugaggcaaauggaaaucuaauagcgccauggcaugcuuucgcacugaauagaggcuuugggucaggaaucaucaccucaaacgcaucgauggaugaaugugacacgaagugucaaacaccccagggagcuauaaacaguagucuuccuuuccagaauauacacccagucacaauaggggagugcccaaaauacgucaggaguacaaaauugaggaugguuacaggacuaaggaacaucccauccauucaauccagaggucuguuuggagccauugccgguuucauugaagggggauggacuggaaugauagauggaugguaugguuaucaucaucagaaugaacagggaucuggcuaugcugcggaucaaaaaagcacacaaaaugccauuaacgggauuacaaacaaggugaacucuguuaucgagaaaaugaacacucaauucacagcuguggguaaagaauucaacaaauuagaaaaaaggauggaaaacuuaaauaaaaaaguugaugauggauuucuggacauuuggacauauaaugcagaauuguugguucuacuggaaaaugaaaggacuuuggauuuucaugacucaaaugugaagaauuuguaugagaaaguaaaaagccaauuaaagaauaaugccaaagaaauaggaaacggguguuuugaauucuaccacaaguguaacaaugaaugcauggaaaguguaaaaaauggaacuuaugacuauccaaaauauucagaggaaucaaaguuaaacagggaaaaaauugauggagugaaauuggaaucaaugggagucuaucagauucuggcgaucuacucaacugucgccaguucacuggugcuuuuggucucccugggggcaaucagcuucuggauguguucuaaugggucuuugcagugcagaauaugcaucuga

SEQ ID NO: 32932 - RNA, 1701 nt, Artificial Sequence
  derived and/or modified CDS sequence (wt) from hemagglutinin__InfluenzaA__ABF47748
augaaagcaaaacugcugguccuguuaugugcacuuucagcuacagaugcagacacaauauguauaggcuaccaugcgaacaacucaaccgacacuguugacacaguacucgaaaagaacgugacagugacacacucugucaaccuacuugaggacagucacaacggaaaacuaugcagacuaaaaggaauagccccacuacaauuggggaaaugcagcauugccggauggaucuuaggaaacccagaaugcgaaucacuguuuucuaagaaaucaugguccuacauugcagaaacaccaaacuccgagaauggaacauguuacccaggguauuucgccgacuaugaggaacugagggagcaauugaguucaguaucaucauucgagagauucgaaauauuccccaaggaaaguucauggcccaaacacaacguaaccagaggaguaacggcaucaugcucccauaaggggaaaagcaguuuuuacagaaauuugcuauggcugacggagaaaaauggcucguacccaaaucugagcaaguccuaugugaacaacaaagagaaagaaguccuuguacuaugggguguucaucacccgucuaacauagaggaccaaaagaccaucuaucguaaagaaaaugcuuaugucucuguagugucuucacauuauaacaggagauucaccccagaaauagcaaaaagacccaaaguaagagaucaagaagggagaauuaacuacuacuggacucugcuggaacccggggacacaauaauauuugaggcaaauggaaaucuaauagcgccaugguaugcuuucgcacugaguagaggcuuugggucaggaaucaucaccucaaacgcaucgauggaugaaugugacgcgaagugucaaacaccccagggagcuauaaacaguagucuuccuuuccagaauguacacccagucacaauaggagagugcccaaaguacgucaggaguacaaaauuaaggaugguuacaggacuaaggaacaucccauccauucaauccagagguuuguuuggagccauugccgguuucauugaagggggauggacuggaaugauagauggaugguaugguuaucaucaucagaaugaacagggaucuggcuaugcugcggaucaaaaaagcacacaaaaugccauuaacgggauuacaaacaaggugaacucuguaaucgagaaaaugaacacucaauucacagcuguggguaaagaauucaacaaauuagaaaaaaggauggaaaacuuaaauaaaaaaguugaugauggauuucuggacauuuggacauauaaugcagaauuguugguucuacuggaaaaugaaaggacuuuggauuuucaugacucaaaugugaagaaccuguaugagaaaguaaaaagccaauuaaagaauaaugccaaagaaauaggaaacggguguuuugaauucuaccacaaguguaacaaugaaugcauggaaaguguaaaaaauggaacuuaugacuauccaaaauauucagaggaaucaaaguuaaacagggaaaaaauugauggagugaaauuggaaucaaugggagucuaucagauucuggcgaucuacucaacugucgccaguucacuggugcuuuuggucucccugggggcaaucagcuucuggauguguucuaaugggucuuugcagugcagaauaugcaucuga

SEQ ID NO: 32933 - RNA, 1701 nt, Artificial Sequence
  derived and/or modified CDS sequence (wt) from hemagglutinin__InfluenzaA__ABF47770
augaaagcaaaacuacugguccuguuaugugcacuuucagcuacagaugcagacacaauauguauaggcuaccaugcgaacaacucaaccgacacuguugacacaguacucgaaaagaacgugacagugacacacucugucaaccuacuugaggacaaucacaacggaaaacuaugcaaacuaaaaggaauagccccacuacaauuggggaaaugcagcauugccggauggaucuuaggaaacccagaaugcgaaucacuguuuucuaagaaaucaugguccuacauugcagaaacaccaaacuccgagaauggaacauguuacccaggguauuucgccgacuaugaggaacugagggaacaauugaguucaguaucaucauucgagagauucgaaauauuccccaaggaaaguucauggcccaaacacaacguaaccaaaggaguaacggcaucaugcucccauaaggggaaaagcaguuuuuacagaaauuugcuauggcugacggagaaaaauggcucguacccaaaucugagcaaguccuaugugaacaacaaagagaaagaaguccuuguacuaugggguguucaucacccgucuaacauagaggaccaaaagaccaucuaucguaaagaaaaugcuuaugucucuguagugucuucacauuauaacaggagauucaccccagaaauagcaaaaagacccaaaguaagaaaucaagaagggagaauuaacuacuacuggacucugcuggaacccggggacacaauaauauuugaggcaaauggaaaucuaauagcgccaugguaugcuuucgcauugaguagaggcuuugggucaggaaucaucaccucaaacgcaucgauggaugaaugugacgcgaagugucaaacaccccagggagcuauaaacaguagucuuccuuuucagaauguacacccagucacaauaggagagugcccaaaguacgucaggaguacaaaauuaaggaugguuacaggacuaaggaacaucccauccauucaauccagagguuuguuuggagccauugccgguuucauugaagggggauggacuggaaugauugauggaugguaugguuaucaucaucagaaugaacagggaucuggcuaugcugcggaucaaaaaagcacacaaaaugccauuaacgggauuacaaacaaggugaacucuauaaucgagaaaaugaacacucaauucacagcuguggguaaagaauucaacaaacuagaaaaaaggauggaaaacuuaaauaaaaaaguugaugauggauuucuggacauuuggacauauaaugcagaauuguugguucuacuggaaaaugaaaggacuuuggauuuccaugacucaaaugugaagaaccuguaugagaaaguaaaaagccaauuaaagaauaaugccaaagaaauaggaaacggguguuuugaauucuaccacaaguguaacaaugaaugcauggaaaguguaaaaaaugggacuuaugacuauccaaaauauucagaagaaucaaaguuaaacagggaaaaaauugauggagugaaauuggaaucaaugggagucuaucagauucuggcgaucuacucaacugucgccaguucacuggugcuuuuggucucccugggggcaaucagcuucuggauguguucuaaugggucuuugcagugcagaauaugcaucuga

SEQ ID NO: 32934 - RNA, 1701 nt, Artificial Sequence; identical to SEQ ID NO: 32933
  derived and/or modified CDS sequence (wt) from hemagglutinin__InfluenzaA__ABF47781

SEQ ID NO: 32935 - RNA, 1701 nt, Artificial Sequence; identical to SEQ ID NO: 32933
  derived and/or modified CDS sequence (wt) from hemagglutinin__InfluenzaA__ABF47792

SEQ ID NO: 32936 - RNA, 1701 nt, Artificial Sequence; identical to SEQ ID NO: 32933
  derived and/or modified CDS sequence (wt) from hemagglutinin__InfluenzaA__ABF47803

SEQ ID NO: 32937 - RNA, 1701 nt, Artificial Sequence; identical to SEQ ID NO: 32933
  derived and/or modified CDS sequence (wt) from hemagglutinin__InfluenzaA__ABF47814

SEQ ID NO: 32938 - RNA, 1701 nt, Artificial Sequence; identical to SEQ ID NO: 32933
  derived and/or modified CDS sequence (wt) from hemagglutinin__InfluenzaA__ABF47825

SEQ ID NO: 32939 - RNA, 1701 nt, Artificial Sequence; identical to SEQ ID NO: 32933
  derived and/or modified CDS sequence (wt) from hemagglutinin__InfluenzaA__ABF47836

SEQ ID NO: 32940 - RNA, 1701 nt, Artificial Sequence; identical to SEQ ID NO: 32933
  derived and/or modified CDS sequence (wt) from hemagglutinin__InfluenzaA__ABF47847

SEQ ID NO: 32941 - RNA, 1701 nt, Artificial Sequence
  derived and/or modified CDS sequence (wt) from hemagglutinin__InfluenzaA__ABF47858
augaagacuaucauugcuuugagcuacauuuuaugucugguuuucgcucaaaaacuucccggaaaugacaacggcacagcaacgcugugccugggacaccaugcagugccaaacggaacgcuagugaaaacaaucacgaaugaucaaauugaagugacuaaugcuacugagcugguucagaguuccucaacagguagaauaugcgacaguccucaccgaauccuugauggaaaaaacugcacacugauagaugcucuauugggagacccucauugugauggcuuccaaaauaaggaaugggaccuuuuuguugaacgcagcaaagcuuacagcaacuguuacccuuaugaugugccggauuaugccucccuuaggucacuaguugccucaucaggcacccuggaguuuaucaaugaagacuucaauuggacuggagucgcucaggaugggaaaagcuaugcuugcaaaaggggaucuguuaacaguuucuuuaguagauugaauuggcugcauaaauuagaauacaaauauccagcgcugaacgugaccaugccaaacaauggaaaauuugacaaauuguacauuugggggguucaccacccgagcacggacagugaccaaaccagccuauauguucgagcaucagggagagucacagucucuaccaaaagaagccaacaaacuguaaucccgaauaucggguuuagacccuggguaaggggucuguccaguagaauaagcaucuauuggacaauaguaaaaccgggagacauacuuuugauuaauagcacagggaaucuaauugcuccucgggguuacuucaaaauacgaaaugggaaaagcucaauaaugaggucagaugcacccauuggcaacugcaguucugaaugcaucacuccaaauggaagcauucccaaugacaaaccuuuucaaaauguaaacaggaucacauauggggccugccccagauauguuaagcaaaacacucugaaguuggcaacagggaugcggaauguaccagagaaacaaacuagaggcauauucggcgcaaucgcagguuucauagaaaaugguugggagggaaugguagacgguugguacgguuucaggcaucaaaauucugagggcacaggacaagcagcagaucuuaaaagcacucaagcagcaaucgaccaaaucaacgggaaacugaauagguuaaucgagaaaacgaacgagaaauuccaucaaaucgaaaaagaauucucagaaguagaagggagaauucaggaccucgagaaauauguugaagacacuaaaauagaucucuggucuuacaacgcggggcuucuuguugcccuggagaaccaacauacaauugaucuaacugacucagaaaugaacaaacuguuugaaagaacaaggaagcaacugagggaaaaugcugaggacaugggcaaugguugcuucaaaauauaccacaaaugugacaaugccugcauagggucaaucagaaauggaacuuaugaccaugauguauacagagacgaagcauuaaacaaccgguuccagaucaaaggugucgagcugaagucaggauacaaagauuggauccuauggauuuccuuugccauaucaugcuuuuugcuuuguguuguuuugcugggguucaucaugugggccugccaaaaaggcaacauuaggugcaacauuugcauuuga

SEQ ID NO: 32942 - RNA, 1698 nt, Artificial Sequence; identical to SEQ ID NO: 32754
  derived and/or modified CDS sequence (wt) from hemagglutinin__InfluenzaA__ABF47869

SEQ ID NO: 32943 - RNA, 1698 nt, Artificial Sequence
  derived and/or modified CDS sequence (wt) from hemagglutinin__InfluenzaA__ABF47880
augaaaguaaaacuacugguccuguuauguacauuuacagcuacauaugcagacacaauauguauaggguaccaugccaacaacucaaccgacacuguugacacaguacuugagaagaaugugacagugacacacucugucaaccuacuugaggacagucacaauggaaaacuaugucuacuaaaaggaauagccccacuacaauuggguaauugcagcguugccggauggaucuuaggaaacccagaaugcgaauuacugauuuccaaggaaucaugguccuacauuguagaaacaccaaauccugagaauggaacauguuacccaggguauuucgccgacuaugaggaacugagggagcaauugaguucaguaucuucauuugagagauucgaaauauuccccaaagaaagcucauggcccaaccacaccguaaccggaguaucagcaucaugcucccauaaugggaaaagcaguuuuuacagaaauuugcuauggcugacggggaagaaugguuuguacccaaaccugagcaaguccuaugcaaacaacaaagagaaagaaguccuuguacuaugggguguucaucacccgccuaacauaggggaccaaagggcccucuaucauacagaaaaugcuuaugucucuguagugucuucacauuauagcagaagguucaccccagaaauagccaaaagacccaaaguaagagaucaggaaggaagaaucaacuacuacuggacucugcuggaacccggggauacaauaauauuugaggcaaauggaaaucuaauagcgccacgguaugcuuucgcacugaguagaggcuuuggaucaggaaucaucaccucaaaugcaccaauggaugaaugugaugcgaagugucaaacaccucagggagcuauaaacagcagucuuccuuuccagaacguacacccagucacaauaggagaguguccaaaguaugucaggagugcaaaauuaaggaugguuacaggacuaaggaacaucccauccauucaauccagagguuuguuuggagccauugccgguuucauugaagggggguggacuggaaugguagaugggugguaugguuaucaucaucagaaugagcaaggaucuggcuaugccgcagaucaaaaaagcacacaaaaugccauuaacgggauuacaaacaaggugaauucuguaauugagaaaaugaacacucaauucacagcugugggcaaagaauucaacaaauuggaaagaaggauggaaaacuuaaauaaaaaaguugaugauggguuucuagacauuuggacauauaaugcagaauuguugguucuacuggaaaaugaaaggacuuuggauuuccaugacuccaaugugaagaaucuguaugagaaaguaaaaagccaauuaaagaauaaugccaaagaaauaggaaacggguguuuugaauucuaucacaaguguaacaaugaaugcauggagagugugaaaaauggaacuuaugacuauccaaaauauuccgaagaaucaaaguuaaacagggagaaaauugauggagugaaauuggaaucaaugggagucuaucagauucuggcgaucuacucaacugucgccaguucccugguucuuuuggucucccugggggcaaucagcuucuggauguguuccaaugggucuuugcaguguagaauaugcaucuga

SEQ ID NO: 32944 - RNA, 1698 nt, Artificial Sequence
  derived and/or modified CDS sequence (wt) from hemagglutinin__InfluenzaA__ABF47891
augaaaguaaaacuacugguccuguuauguacauuuacagcuacauaugcagacacaauauguauaggguaccaugccaacaacucaaccgacacuguugacacaguacuugagaagaaugugacagugacacacucugucaaccuacuugaggacagucacaauggaaaacuaugucuacuaaaaggaauagccccacuacaauuggguaauugcagcguugccggauggaucuuaggaaacccagaaugcgaauuacugauuuccaaggaaucaugguccuacauuguagaaacaccaaauccugagaauggaacauguuacccaggguauuucgccgacuaugaggaacugagggagcaauugaguucaguaucuucauuugagagauucgaaauauuccccaaagaaagcucauggcccaaccacaccguaaccggaguaucagcaucaugcucccauaaugggaaaagcaguuuuuacagaaauuugcuauggcugacgaggaagaaugguuuguacccaaaccugagcaaguccuaugcaaacaacaaagagaaagaaguccuuguacuaugggguguucaucacccgccuaacauaggggaccaaagggcccucuaucauacagaaaaugcuuaugucucuguagugucuucacauuauagcagaagauucaccccagaaauagccaaaagacccaaaguaagagaucaggaaggaagaaucaacuacuacuggacucugcuggaacccggggauacaauaauauuugaggcaaauggaaaucuaauagcgccacgguaugcuuucgcacugaguagaggcuuuggaucaggaaucaucaccucaaaugcaccaauggaugaaugugaugcaaagugucaaacaccucagggagcuauaaacagcagucuuccuuuccagaacguacacccagucacaauaggagaguguccaaaguaugucaggagugcaaaauuaaggaugguuacaggacuaaggaacaucccauccauucaauccagagguuuguuuggagccauugccgguuucauugaagggggguggacuggaaugguagaugggugguaugguuaucaucaucagaaugagcaaggaucuggcuaugccgcagaucaaaaaagcacacaaaaugccauuaacgggauuacaaacaaggugaauucuguaauugagaaaaugaacacucaauucacagcugugggcaaagaauucaacaaauuggaaagaaggauggaaaacuuaaauaaaaaaguugaugauggguuucuagacauuuggacauauaaugcagaauuguugguucuacuggaaaaugaaaggacuuuggauuuccaugacuccaaugugaagaaucuguaugagaaaguaaaaagccaauuaaagaauaaugccaaagaaauaggaaacggguguuuugaauucuaucacaaguguaacaaugaaugcauggagagugugaaaaauggaacuuaugacuauccaaaauauuccgaagaaucaaaguuaaacagggagaaaauugauggagugaaauuggaaucaaugggagucuaucagauucuggcgaucuacucaacugucgccaguucccugguucuuuuggucucccugggggcaaucagcuucuggauguguuccaaugggucuuugcaguguagaauaugcaucuga

SEQ ID NO: 32945 - RNA, 1701 nt, Artificial Sequence
  derived and/or modified CDS sequence (wt) from hemagglutinin__InfluenzaA__ABF47902
augaagacuaucauugcuuugagcuacauuuuaugucugguuuucgcucaaaaacuucccggaaaugacaacagcacggcaacgcugugccuggggcaccaugcagugccaaacggaacgcuagugaaaacaaucacgaaugaccaaauugaagugacuaaugcuacugagcugguucagaguuccucaacagguggaauaugcgacaguccucaccaaauccuugauggagaaaacugcacacuaauagaugcucuauugggagacccucauugugauggcuuccaaaauaaggaaugggaccuuuuuguugaacgcagcaaagccuacagcaacuguuacccuuaugaugugccggauuaugccucccuuaggucacuaguugccucauccggcacacuggaguuuaacaaugaaagcuucaauuggacuggagucgcucagaauggaacaagcucugcuugcaaaaggagaucuaauaaaaguuucuuuaguagauugaauugguugcaccaauuaaaauacaaauacccagcacugaacgugacuaugccaaacaaugaaaaauuugacaaauuguacauuugggggguucaccacccgaguacggacagugaccaaaucagccuauaugcucaagcaccagggagagucacagucucuaccaaaagaagccaacaaacuguaaucccgaauaucggaucuagacccuggguaaggggugucuccagcagaauaagcaucuauuggacaauaguaaaaucgggagacauacuuuugauuaacugcacagggaaucuaauugcuccucgggguuacuucaaaauacgaagugggaaaagcucaauaaugaggucagaugcauccauuggcaaaugcaauucugaaugcaucacuccaaauggaagcauucccaaugacaaaccauuucaaaauguaaacaggaucacauauggggccugucccagauauguuaagcaaaacacucugaaauuggcaacagggaugcggaauguaccagagaaacaaacuagaggcauauucggcgcaaucgcggguuucauagaaaaugguugggagggaaugguggacgguugguacgguuucaggcaucaaaauucugagggcacaggacaagcagcagaucucaaaagcacucaagcagcaaucaaccaaaucaacgggaaacugaauagguuaaucgagaaaacgaacgagaaauuccaucaaauugaaaaagaauucucagaaguggaagggagaauucaggaccucgagaaauauguugaggacacuaaaauagaucucuggucguacaacgcggagcuucuuguugcccuggagaaccagcauacaauugaucuaacugacucagaaaugaacaaacuguuugaaagaacaaagaagcaacugagggaaaaugcugaggauaugggcaaugguuguuucaaaauauaccacaaaugugacaaugccugcauagggucaaucagaaaugggacuuaugaccaugauguauacagagacgaagcauuaaacaaccgguuccagaucaaagguguugagcugaagucaggauacaaagauuggauccuauggauuuccuuugccauaucauguuuuuugcuuuguguugucuugcugggguucaucaugugggccugccaaaaaggcaacauuaggugcaacauuugcauuuga

SEQ ID NO: 32946 - RNA, 1698 nt, Artificial Sequence
  derived and/or modified CDS sequence (wt) from hemagglutinin__InfluenzaA__ABF47955
augaaggcaaaacuacugguccuguuauaugcauuuguagcuacagaugcagacacaauauguauaggcuaccaugcgaacaacucaaccgacacuguugacacaauauucgagaagaauguggcagugacacauucuguuaaccugcucgaagacagacacaacgggaaacuauguaaauuaaaaggaauagccccacuacaauuggggaaauguaacaucaccggauggcucuugggaaauccagaaugcgacucacugcuuccagcgagaucaugguccuacauuguagaaacaccaaacucugagaauggagcauguuauccaggagauuucaucgacuaugaggaacugagggagcaauugagcucaguaucaucauuagaaagauucgaaauauuucccaaggaaaguucauggcccaaccacacauucaacggaguaacaguaucaugcucccauaggggaaaaagcaguuuuuacagaaauuugcuauggcugacgaagaagggggauucauacccaaagcugaccaauuccuaugugaacaauaaagggaaagaaguccuuguacuaugggguguucaucacccgucuagcagugaugagcaacagagucucuauaguaauggaaaugcuuaugucucuguagcgucuucaaauuauaacaggagauucaccccggaaauagcugcaaggcccaaaguaaaagaucaacaugggaggaugaacuauuacuggaccuugcuagaacccggagacacaauaauauuugaggcaacugguaaucuaauagcaccaugguaugcuuucgcacugaguagaggguuugaguccggcaucaucaccucaaacgcgucaaugcaugaguguaacacgaagugucaaacaccccagggaucuauaaacagcaaucucccuuuccagaauauacacccagucacaauaggagagugcccaaaauaugucaggaguaccaaauugaggaugguuacaggacuaagaaacaucccauccauucaauacagaggucuauuuggagccauugcugguuuuauugaggggggauggacuggaaugauagauggaugguaugguuaucaucaucagaaugaacagggaucaggcuaugcagcggaucaaaaaagcacacagaaugccauuaacaggauuacaaacaaggugaacucuguuaucgagaaaaugaacacucaauucacagcuguggguaaagaauucaacaacuuagaaaaaaggauggaaaauuuaaauaaaaaaguugaugauggguuucuggacauuuggacauauaaugcagaauuguuaguucuacuggaaaaugaaagaacuuuggauuuccaugacuuaaaugugaagaaucuguacgagaaaguaaaaagccaauuaaagaauaaugccaaagaaaucggaaauggguguuuugaguucuaccacaagugugacaaugaaugcauggaaaguguaagaaaugggacuuaugauuauccaaaauauucagaagaaucaaaguugaacagggaaaagauagauggagugaaauuggaaucaauggggguguaucagauucuggcgaucuacucaacugucgccaguucacuggugcuuuuggucucccugggggcaaucaguuucuggauguguucuaaugggucuuugcagugcagaauaugcaucuga

SEQ ID NO: 32947 - RNA, 1698 nt, Artificial Sequence
  derived and/or modified CDS sequence (wt) from hemagglutinin__InfluenzaA__ABF60576
augaagacaaccauuauuuugauacuacugacccaugcuguggacagucaaaacccaaucaguggcaacaacacagccacacuaugucugggacaccaugcaguagcaaauggaacauugguaaaaacaauaacugaugaccaaauugaggugacaaaugcuacugaauuaguucagagcacuucaauagggaaaauaugcaacaacccauauaggguucuagauggaagaaacugcacauuaauagaugcaaugcuaggagauccccacugugauguuuuucaguaugagaauugggaccucuucauagaaagaagcagcgcuuucagcaauugcuacccauaugacaucccugacuaugcaucgcuccggucuauuguggcaucuucaggaacauuagaauucacagcagagggauucacauggacaggugucacucaaaacggaggaaguggcgccugcagaaggggaucagccgauaguuucuuuagccgacugaauuggcuaacaaaaucuggaaauucuuaccccacauugaaugugacaaugccuaacaaugacaauuucgauaaacuauacaucugggggauccaucacccgagcacaaacaaugagcagacaaaauuguauguccaagaauuagggcgaguaacagucucaacaaaaagaagucaacaaacaauaauccccaacaucggaucuagaccgggggucaggggucaagcaggcaggauaagcauauauuggaccauugugaaaccuggagauauccuaaugauaaacaguaauggcaacuuaguugcaccgcggggauauuucaaaaugcgaacaggaaaaagcucuauaaugagaucagaugcacccauagacacuuguugguccgaguguauuacaccaaauggaagcauccccaacgacaaaccauuucaaaaugugaacaaaguuacauauggaaaaugccccaaguauaucaagcagaauacuuugaagcuggccacugggaugaggaauguaccagaaaagcaaaucagaggaaucuuuggagcaauagcgggauucauagaaaauggcugggagggaaugguugaugggugguauggauuccgauaucagaauucggaaggaacaggacaagcugcagaucuaaagagcacucaagcagccaucgaccagaucaauggaaaauugaacagagugauugagaggaccaaugagaaauuccaucaaauagagaaggaauucucagaaguagaagggagaauccaggacuuggagaaguauguagaagacaccaaaauagaccuaugguccuacaaugcagaguuacugguggcucuagaaaaucaacauacgauugacuuaacagaugcagagaugaauaaauuauucgagaagacuaggcgccaguuaagagaaaacgcggaagacaugggggguggauguuucaagauuuaucacaaaugugauaaugcaugcauuggaucaauaagaaaugggacauaugaccauuacauauacagagaugaagcauuaaacaaccgauuucaaauuaaagguguugaguugaaaucaggcuacaaagauuggauacuguggauuucauucgccauaucaugcuucuuaauuugcguuguucuauuggguuucaucaugugggcuugcgaaaaaggcaacaucagaugcaacauuugcauuuga

SEQ ID NO: 32948 - RNA, 1701 nt, Artificial Sequence
  derived and/or modified CDS sequence (wt) from hemagglutinin__InfluenzaA__ABF60577
augaagaccaucauuguucuaagcuacuuuuucugucuggcucucagccaagacuacucagaaagcaacaacagcacugcaacacugugcuuggggcaucaugcggugccaaaugggacaauagugaagacaauuacggaugaccaaauugaggugaccaaugccacugagcugguccagagcuccucaacagggaaaauaugcaacaacccucaucgaauccuugauggaagggacuguacacugauagaugcccuacugggagacccucacugugauguauuccaagaugaaaccugggaccuuuauguggaacguagcagcgccuucagcaacugcuacccauaugauguaccagacuaugcaucacugaggucucuaguugcuuccucaggaacccuagaguucaucacagaaggauucacauggacaggagucacucaaaauggaggaagcaaugccugcaaaagagggccugcuagugguuucuucagcagacugaauuggcugacuaaaucuggaaguacuuacccaguguugaaugugaccaugccaaaugaugacaacuuugacaaauuguaugucuggggaguucaccacccgagcacaaaccaagagcaaaccgaccuauacguucaggcaucaggaagggucacaguuucaacuagaaggagucaacaaaccauaaucccgaauauuggauccaggccuugggucaggggccaaucaggaaggauaagcaucuacuggacaauagugaagccgggggauguacuaguaauuaacaguaaugguaaccugaucgcuccuagaggguacuucaaaauacgcacugggaaaagcucaauaaugagaucagaugcaccuauugacacaugcaucucugaauguaucacuccuaauggaagcauccccaaugacaagccauuucagaauguaaacaagaucacuuacggagcauguccuaaguaugucaaacagagcacuuugaaacuggcaacagggaugaggaacgugccugagaaaaagaccaggggucuguucguggcaauagcaggauuuauagaaaauggaugggaaggaaugauagacugcugguacgguuucagacaccagaacucugaggguacaggacaagcugcagaucuaaaaagcacacaggcagccauugaccagauuaaugggaaguugaaccgaguaaucgagaagacaaaugagaaguuucaccagauugaaaaggaauucucugaaguagaaggaagaauccaggaccuugagaacuauguugaggacacuaagauagaucuauggucuuacaaugcagagcuucugguggccuuggaaaaucagcauacaauugaucugacugauucugaaaugaacaaacuguucgaaagaacaaggcggcaacugagggagaaugcugaagacaugggcaguggcugcuucaaaauauaccacaaaugugacaacgcauguauagagucaaucaggaacgggaccuaugaucaugacauauacagagaugaagcauuaaacaaccgauuucaaaucaaggguguagagcuaaaaucuggguacaaagauuggaucuuauggauuuccuuugccacaucaugcuuuuugcuuuguguuguucuggggggguucauuaugugggccugccaaagaggcaacauuaggugcaacauuugcauuuga

SEQ ID NO: 32949 - RNA, 1701 nt, Artificial Sequence
  derived and/or modified CDS sequence (wt) from hemagglutinin__InfluenzaA__ABF60578
augaagaccauuauuguucuaagcuguuuuuucugucuggcuuucagccaagaucuuucagagaacaacaacaacacugcaacacugugccuggggcaucaugcaguaccaaaugggacaauagugaaaacaauaacggaugaucaaauugaagugacuaaugcuacugaacugguucagaguuccucaacagggaaaauaugcaacaauccucacagaauucucgauggaagagacugcacacuaauagaugcccuacuaggggacccucauugugauguauuccaagaugaaacaugggaccuuuauguagagcgcagcaaauccuucagcaacugcuacccauaugaugugccagacuaugcaucucucagaucucuaguggccucaucaggaacccuagaguucaucaccgaagccuucacguggacaggagucacacaaaauggagggaguggugcuugcaaaagaggacccgguaaugguuucuucaguagacugaauuggcugacuaaaucugguagcgcuuauccagugcugaacgugacuaugccaaacaacgauaacuuugacaaguuguacguguggggaguucaucacccaagcacaaaccaagagcaaaccaaucuguacguucaggcaucgggaagggucacaguuucaacuagaagaagccagcaaaccauaauuccuaacaucggauccaggccuugggucagaggccaaucuaggagaauaaguaucuacuggacaauaguuaagccgggagauauacuggugaucaacagcaauggaaaucuaauugcuccucgagguuacuuuaagaugcgcacugggaaaagcucaauaaugagaucagaugcaccuauugacacauguaucucugagugcaucacuccaaacgggagcaucccuaaugacaagcccuuucagaauguaaacaaaauuacuuauggagcaugucccaaauauaucaaacaaagcacccuaaaguuggcaacagggaugcggaauguaccugagaaacaaaccaggggucuguuuggugcaauagcaggguucauagaaaauggaugggaaggaaugauagaugguugguaugguuucaggcaucagaacucggaaggcacaggacaagcagcagaccuuaaaagcacucaagccgccauugaucagaucaaugggaaauugaaccgaguaaucgagaaaacaaaugaaaaguuucaucagauugaaaaggaauuuucugaaguggaagggagaauucaggaccuugagaaauaugucgaagacacuaaaauagaucuauggucuuacaaugcggacguucuuguggcccuggaaaaccagcauacaauugaucugacugauucagaaaugaacaaacuauuugaaaagacaaggagacagcugagggagaaugcugaagacaugggcaauggcugcuucaagauauaccacaaaugugacaacgcuuguauagagucaaucaggaaugggacuuaugaucaugacauauacagagaugaagcacuaaacaaucgauuucagaucaaaggguguggagugaaaucuggauacaaagauuggaucuuauggauuuccuuugccauaucaugcuuuuugcuguguguuguucuacugggauucaucaugugggccugccagagaggcaacauuaggugcaacauuugcauuuga

SEQ ID NO: 32950 - RNA, 1701 nt, Artificial Sequence
  derived and/or modified CDS sequence (wt) from hemagglutinin__InfluenzaA__ABF60579
augaagacucucauugcuuugagcuacauuuucugucugguucuuggccaagaccuuccaggaaauggcaacagcacagcaacacugugccugggacaucaugcggugccaaacggaacgcuagugaaaacaaucacggaugaucagaucgaagugacuaaugcuacugagcugguccagaauuucucaauggauaaaauaugcaacaauccucaucgaauucuugauggagcaaacugcacacugauagaugcucuauugggggacccucauugugaugacuuucaaaaugagaaaugggaccuuuucguugaacgcagcaaggcuuucagcaacuguuacccuuaugaugugccagauuauaccucccuuaggucacuaauugccucgucaggcacuuuggaguuuaucaaugaagauuucaauuggacuggggucacucagaauggaggaagcaaugcuugcaagagggggccugauagcaguuuuuucaguaggcugaacugguuguacaaaucagguaacacauauccgaugcuaaacgugacuaugccaaacagugauaauuuugacaaauuauacauuugggggguucaucacccgagcacagccagggaacaaaccaaccuauauguucaagcaucagggaaaguaacaguuuccaccaagagaagccagcagaccauaaucccgaauaucgggucuagacccuggguaaggggucugucuaguagaauaagcaucuauuggacaauaguuaaaccgggggacauccugguaauuaauaguaaugggaaccuaauugcuccucgggguuacuucaaaaugcacacugggagaagcucaauaaugaggucagaugcaccuauugacaccugcaguucugaaugcauaacuccaaauggaagcauucccaaugacaagcccuuucaaaacguaaacaagaucacauauggggcauguccuaaguauguuaagcaaaacacucugaaguuggcaacagggaugcggaauauaccagaaaaacaaacuagaggcauauucggugcaauagcagguuucauagagaaugguugggaagggaugguagacggcugguacgguuucagacaucaaaauucugagggcacaggacaagcagcagaucuuaaaagcacccaagcagcuaucgaccaaaucaaugggaaacugaauaggguaaucgagaaaacgaacgagaaauuccaucaaaucgaaaaggaauucucaggaguagaagggagaauucaggaccucgagaaauacguugaagacacuaaaauagaucucuggucuuacaaugcggaacuucuugucgcucuggagaaccaacauacaaucgauuugacugacucggaaaugaacaaacuguuugaaaaaacaaggaggcaacugagggaaaaugcugaagacaugggaaaugguugcuucaaaauauaccacaaaugugacaaugcuugcauagagucaaucagaaauggaacuuaugaccauaacgaauacagagacgaagcauuaaacaaccgguuucagaucaaagguguugagcugaagucaggauacaaagacuggauccuguggauuuccuuugccauaucaugcuuuuugcuuuguguuguucugcugggauucaucaugugggccugccagaaaggcaacauuaggugcaacauuugcaucuga

SEQ ID NO: 32951 - RNA, 1701 nt, Artificial Sequence
  derived and/or modified CDS sequence (wt) from hemagglutinin__InfluenzaA__ABF60580
augaagacuaucauugcuuugagcuacauuuucugucuggcuuucgcccaagaccuuccaggaaaugacaacagcacagcaacucuuugccugggacaucaugcggugccaaacggaacgcuagugaaaacaaucacgaaugaucagauugaagugacuaaugcuacugaacugguucagaguuccucaacggguaaaauaugcgacaauccucaucgaauccuugauggaauaaacugcacacugauagaugcucuauugggggacccucauugugauggcuuucaaaaugagaaaugggaccuuuucguugaacgcagcaaagcuuucagcaacuguuacccuuaugaugugccagauuaugccucccuuaggucacuaguugccucgucaggcacucuggaguuuaucaaugaaggcuucaauuggacuggggucacucagaaugggggaagcagugcuugcaaaaggggaccugauaacgguuuuuucaguagacugaacugguuguacaaaucaggaagcacauauccagugcagaacgugaccaugccaaacaaugacaacucugacaaacuauacauuugggggguucaccacccgagcacggacaaagaacaaaccgaccuauauguucaagcaucagggaaagucacagucuccaccaagagaauccagcaaacuguaaucccgaaugucgggucuagacccuggguaaggggucuaucuaguagaguaagcaucuauuggacaauaguuaaaccgggagacguacugguaauuaauaguaauggaaaccuaauugcuccucgggguuacuacaaaaugcgcacugggaaaagcucaauaaugaggucagaugcaccuauuggcacuugcagcucugaaugcaucacuccaaauggaagcauucccaaugacaagcccuuucaaaacguaaacaagaucacauauggggcaugucccaaguauguuaagcaaaacacucugaaguuggcaacagggaugcggaauguaccagagaaacaaacuagaggcauauucggcgcaauagcagguuucauagaaaaugguugggagggaaugauagacgguugguacgguuucaggcaucaaaauucugagggcacaggacaagcagcagaucuuaaaagcacucaagcagccaucgaccaaaucaaugggaaacugaacaggguaaucgagaagacgaacgagaaauuccaucaaaucgaaaaggaauucucagaaguagaagggagaauucaggaccucgagaaauacguugaagacacuaaaauagaucucuggucuuacaaugcggagguucuugucgcucuggagaaccaacauacaauugaucugacugacucggaaaugaacaaacuguuugaaaaaacaaggaggcaacugagggaaaaugcugaggacaugggcaaugguugcuucaaaauauaccacaaaugugacaaugcuugcauagggucaaucagaaaugggacuuaugaccaugauguauacagagacgaagcauuaaacaaccgguuucagaucaaagguguugaacugaagucaggauacaaagacuggauccuguggauuuccuuugccauaucaugcuuuuugcuuuguguuguuuugcugggguucaucaugugggccugccagaaaggcaacauuaggugcaacauuugcauuuga

SEQ ID NO: 32952 - RNA, 1701 nt, Artificial Sequence
  derived and/or modified CDS sequence (wt) from hemagglutinin__InfluenzaA__ABF60581
augaagaccaucauuguucuaagcuacuuuuucugucuggcucucagccaagacuacucagaaagcaacaacagcacugcaacacugugcuuggggcaucaugcgguaccaaaugggacaauagugaagacaauuacugaugaccaaauugaagugaccaaugccacugagcugguccagagcuccucaacagggaaaauaugcaacaacccucauagaauccuugauggaagggacuguacacugauagaugcccuacugggggacccccacugugauguauuccaagaugaaaccugggaccuuuauguggaacguagcagcgccuucagcaacugcuacccauaugauguaccagacuaugacucacucaggucucuaguugcuuccucaggaacccuagaguucaucacagaaggauucacauggacaggagucacucaaaauggaggaagcaaugcuugcaaaagagggccugcuagugguuucuucagcagacugaauuggcugacuaaaucuggaaguacuuacccaguguugaaugugacuaugccaaauaaugacaacuuugacaaacuguaugucuggggaguucaccacccgagcacaaaccaagagcaaaccaaccuauacguucaggcaucagggagggucacaguuucaacuagaaggagucaacaaaccauaaucccgaauauuggauccaggccuugggucaggggccaaucaggacggauaagcaucuauuggacaauagugaagccgggagauguacuaguaauuaacaguaaugguaaccugaucgcuccucgaggauacuucaagaugcgcacuggaaaaagcucaauaaugagaucagaugcgccuauugacacaugcaucucugaauguauuacuccuaauggaagcauccccaaugacaugcccuuucagaauguaaacaagaucacuuacggagcauguccuaaguaugucaaacagggcacuuugaaauuggcaacaggaaugaggaacgugccugagaaacagacuaggggucuguucggugcaauagcaggauuuauagaaaauggaugggaaggaaugauagacgguugguaugguuucagacaccagaacucugaggguacaggacaagcagcagaccuaaaaagcacucaggcagccaucgaccagauuaaugggaaguugaaccgaguaaucgagaagacaaaugagaaguuucaccagauugaaaaggaauucucugaaguagaaggaagaauccaggaccuugagaaauauguugaggacacuaagauagaucuauggucugacaaugcagagcuucuugucgccuuggaaaaccagcauacaauugaucugacugauucugaaaugaacaaacuauucgaaaaaacaaggaggcaacugagggaaaaugcugaagugaugggcaacgguugcuucaaaauauaccacaaaugugacaacgcauguauagagucaaucaggaacgggacuuaugaucaugacauauacagagaugaagcauuaaacaaccgauuucaaaucaaggguguagagcuaaaaucuggguacaaagacuggaucuuauggauuuccuuugccauaucaugcuuuuugcuuuguguuguucuacugggguucauuaugugggccugccaaagaggcaacauuaggugcaacauuugcauuuga

SEQ ID NO: 32953 - RNA, 1701 nt, Artificial Sequence; identical to SEQ ID NO: 32752
  derived and/or modified CDS sequence (wt) from hemagglutinin__InfluenzaA__ABF82651

SEQ ID NO: 32954 - RNA, 1698 nt, Artificial Sequence; identical to SEQ ID NO: 32812
  derived and/or modified CDS sequence (wt) from hemagglutinin__InfluenzaA__ABF82662

SEQ ID NO: 32955 - RNA, 1698 nt, Artificial Sequence
  derived and/or modified CDS sequence (wt) from hemagglutinin__InfluenzaA__ABF82673
augaaagcaaaacuacugguccuguuauguacauuuacagcuacauacgcagacacaauauguauaggcuaccaugccaacaacucaaccgacacuguugacacaguacuugagaagaaugugacagugacacacucugucaaccuacuugaggacagucacaauggaaaacuaugucuacuaaaaggaauagccccacuacaauuggguaauugcagcguugccggauggaucuuaggaaacccagaaugcgaauuacugauuuccaagggaucaugguccuacauuguagaaacaccaaaucccgagaauggaacauguuacccaggguauuucgcagacuaugaggaacugagggagcaauugaguucaguaucuucauuugagagauucgaaauauuccccaaaggaagcucauggcccaaccacaccgugaccggaguaucagcaucaugcucccauaaugggaaaagcaguuuuuacagaaauuugcuauggcugacggggaagaaugguuuguacccaaaccugagcauguccuauguaaacaacaaagagaaagaaguccuugugcuaugggguguucaucacccaccuaacauaggggaccaaagggcccucuaccauacagaaaaugcuuaugucucuguagugucuucacauuauagcagaagauucaccccagaaauagccaaaagacccaaaguaagagaucaggaaggaagaaucaacuacuacuggacucugcuggaacccggggacacaauaauauuugaggcaaauggaaaucuaauagcgccaugguaugcuuucgcacugaguagaggcuuuggaucaggaaucaucaccucaaaugcaccaaugggugaaugugaugcgaagugucaaacaccucagggagcuauaaacaguagucuuccuuuccagaauguacacccaguuacaauaggagaguguccaaaguaugucaggagugcaaaauuaaggaugguuacaggacuaaggaacaucccauccauucaauccagagguuuguuuggagccauugccgguuucauugaagggggguggacuggaaugguagaugggugguaugguuaucaucaucagaaugagcaaggaucuggcuaugcugcagaucaaaaaagcacacaaaaugccauuaacgggauuacaaacaaggugaauucuguaauugagaaaaugaacacucaauucacagcugugggcaaagaauucaacaaauuagaaagaaggauggaaaacuuaaauaaaaaaguugaugauggguuucuagacauuuggacauauaaugcagaauuguugguucuacuggaaaaugaaaggacuuuggauuuccaugacuccaaugugaagaaucuguaugagaaaguaaaaagccaauuaaagaauaaugccaaagaaauaggaaacggguguuuugaauucuaucacaaguguaacaaugaaugcauggaaagugugaaaaauggaacuuaugacuauccaaaauauuccgaagaaucaaaguuaaacagggagaaaauugauggaguaaaauuggaaucaaugggagucuaucagauucuggcgaucuacucaacugucgccaguucccugguucuuuuggucucccugggggcaaucagcuucuggauguguuccaaugggucuuugcaguguagaauaugcaucuga

SEQ ID NO: 32956 - RNA, 1698 nt, Artificial Sequence
  derived and/or modified CDS sequence (wt) from hemagglutinin__InfluenzaA__ABF82684
augaaagcaaaacuacugguccuguuauguacauuuacagcuacauacgcagacacaauauguauaggcuaccaugccaacaacucaaccgacacuguugacacaguacuugagaagaaugugacagugacacacucugucaaccuacuugaggacagucacaauggaaaacuaugucuacuaaaaggaauagccccacuacaauuggguaauugcagcguugccggauggaucuuaggaaacccagaaugcgaauuacugauuuccaaggaaucaugguccuacauuguagaaacaccaaaucccgagaauggaacauguuacccaggguauuucgccgacuaugaggaacugagggagcaauugaguucaguaucuucauuugagagauucgaaauauucccuaaaggaagcucauggcccaaccacaccgugaccggaguaucagcaucaugcucccauaaugggaaaagcaguuuuuacagaaauuugcuauggcugacggggaagaaugguuuguacccaaaccugagcauguccuauguaaacaacaaagggaaagaaguccuugugcuaugggguguucaucacccaccuaacauaggggaccaaagggcccucuaccauacagaaaaugcuuaugucucuguagugucuucacauuauaguagaagauucaccccagaaauagccaaaagacccaaaguaagagaucaggaaggaagaaucaacuacuacuggacucugcuggaacccggggacacaauaauauuugaggcaaauggaaaucuaauagcgccaugguaugcuuucgcacugaguagaggcuuuggaucaggaaucaucaccucaaaugcaccaaugggugaaugugaugcgaagugucaaacaccucagggagcuauaaacaguagucuuccuuuccagaauguacacccaguuacaauaggagaguguccaaaguaugucaggagugcaaaauuaaggaugguuacaggacuaaggaacaucccauccauucaauccagagguuuguuuggagccauugccgguuucauugaagggggguggacuggaaugguagaugggugguaugguuaucaucaucagaaugagcaaggaucuggcuaugcugcagaucaaaaaagcacacaaaaugccauuaacgggauuacaaacaaggugaauucuguaauugagaaaaugaacacucaauucacagcugugggcaaagaauucaacaaauuagaaagaaggauggaaaacuuaaauaaaaaaguugaugauggguuucuagacauuuggacauauaaugcagaauuguugguucuacuggaaaaugaaaggacuuuggauuuccaugacuccaaugugaagaaucuguaugagaaaguaaaaagccaauuaaagaauaaugccaaagaaauaggaaacggguguuuugaauucuaucacaaguguaacaaugaaugcauggaaagugugaaaaauggaacuuaugacuauccaaaauauuccgaagaaucaaaguuaaacagggagaaaauugauggaguaaaauuggaaucaaugggagucuaucagauucuggcgaucuacucaacugucgccaguucccugguucuuuuggucucccugggggcaaucagcuucuggauguguuccaaugggucuuugcaguguagaauaugcaucuga

SEQ ID NO: 32957 - RNA, 1701 nt, Artificial Sequence; identical to SEQ ID NO: 32820
  derived and/or modified CDS sequence (wt) from hemagglutinin__InfluenzaA__ABF82695

SEQ ID NO: 32958 - RNA, 1701 nt, Artificial Sequence; identical to SEQ ID NO: 32795
  derived and/or modified CDS sequence (wt) from hemagglutinin__InfluenzaA__ABF82706

SEQ ID NO: 32959 - RNA, 1698 nt, Artificial Sequence; identical to SEQ ID NO: 32867
  derived and/or modified CDS sequence (wt) from hemagglutinin__InfluenzaA__ABF82819

SEQ ID NO: 32960 - RNA, 1698 nt, Artificial Sequence; identical to SEQ ID NO: 32812
  derived and/or modified CDS sequence (wt) from hemagglutinin__InfluenzaA__ABF82830

SEQ ID NO: 32961 - RNA, 1698 nt, Artificial Sequence; identical to SEQ ID NO: 32812
  derived and/or modified CDS sequence (wt) from hemagglutinin__InfluenzaA__ABF82841

SEQ ID NO: 32962 - RNA, 1698 nt, Artificial Sequence; identical to SEQ ID NO: 32812
  derived and/or modified CDS sequence (wt) from hemagglutinin__InfluenzaA__ABF82852

SEQ ID NO: 32963 - RNA, 1698 nt, Artificial Sequence
  derived and/or modified CDS sequence (wt) from hemagglutinin__InfluenzaA__ABF82863
augaaagcaaaacuacugguccuguuauguacauuuacagcuacauacgcagacacaauauguauaggcuaccaugccaacaacucaaccgacacuguugacacaguacuugagaagaaugugacagugacacacucugucaaccuacuugaggacagucacaauggaaaacuaugucuacuaaaaggaauagccccacuacaauuggguaauugcagcguugccggauggaucuuaggaaacccagaaugcgaauuacugauuuccaaggaaucaugguccuacauuguagaaacaccaaaucccgagaauggaacauguuacccaggguauuucgccgacuaugaggaacugagggagcaauugaguucaguaucuucauuugagagauucgaaauauuccccaaaggaagcucauggcccaaccacaccgugaccggaguaucagcaucaugcucccauaaugggaaaagcaguuuuuacagaaauuugcuauggcugacggggaagaaugguuuguacccaaaccugagcauguucuauguaaacaacaaagagaaagaaguccuugugcuaugggguguucaucacccaccuaacauaggggaccaaagggcccucuaccauacagaaaaugcuuaugucucuguagugucuucacauuauagcagaagauucaccccagaaauagccaaaagacccaaaguaagagaucaggaaggaagaaucaacuacuacuggacucugcuggaacccggggacacaauaauauuugaggcaaauggaaaucuaauagcgccaugguaugcuuucgcacugaguagaggcuuuggaucaggaaucaucaccucaaaugcaccaaugggugaaugugaugcgaagugucaaacaccucagggagcuauaaacaguagucuuccuuuccagaauguacacccaguuacaauaggagaguguccaaaguaugucaggagugcaaaauuaaggaugguuacaggacuaaggaacaucccauccauucaauccagagguuuguuuggagccauugccgguuucauugaagggggguggacuggaaugguagaugggugguaugguuaucaucaucagaaugagcaaggaucuggcuaugcugcagaucaaaaaagcacacaaaaugccauuaacgggauuacaaacaaggugaauucuguaauugagaaaaugaacacucaauucacagcugugggcaaagaauucaacaaauuagaaagaaggauggaaaacuuaaauaaaaaaguugaugauggguuucuagacauuuggacauauaaugcagaauuguugguucuacuggaaaaugaaaggacuuuggauuuccaugacuccaaugugaagaaucuguaugagaaaguaaaaagccaauuaaagaauaaugccaaagaaauaggaaacggguguuuugaauucuaucacaaguguaacaaugaaugcauggaaagugugaaaaauggaacuuaugacuauccaaaauauuccgaagaaucaaaguuaaacagggagaaaauugauggaguaaaauuggaaucaaugggagucuaucagauucuggcgaucuacucaacugucgccaguucccugguucuuuuggucucccugggggcaaucagcuucuggauguguuccaaugggucuuugcaguguagaauaugcaucuga

SEQ ID NO: 32964 - RNA, 1698 nt, Artificial Sequence
  derived and/or modified CDS sequence (wt) from hemagglutinin__InfluenzaA__ABF82874
augaaagcaaaacuacugguccuguuauguacauuuacagcuacauacgcagacacaauauguauaggcuaccaugccaacaacucaaccgacacuguugacacaguacuugagaagaaugugacagugacacacucugucaaccuacuugaggacagucacaauggaaaacuaugucuacuaaaaggaauagccccacuacaauuggguaauugcagcguugccggauggaucuuaggaaacccagaaugcgaauuacugauuuccaaggaaucaugguccuacauuguagaaacaccaaaucccgagaauggaacauguuacccaggguauuucgccgacuaugaggaacugagggagcaauugaguucaguaucuucauuugagagauucgaaauauuccccaaaggaagcucauggcccaaccacaccgugaccggaguaucagcaucaugcucccauaaugggaaaagcaguuuuuacagaaauuugcuauggcugacggggaagaaugguuuguacccaaaccugagcauguccuauguaaacaacaaagagaaagaaguccuugugcuaugggguguucaucacccaccuaacauaggggaccaaagggcccucuaccauacagaaaaugcuuaugucucuguagugucuucacauuauagcagaagauucaccccagaaauagccaaaagacccaaaguaagagaucaggaaggaagaaucaacuacuacuggacucugcuggaacccggggacacaauaauauuugaggcaaauggaaaucuaauagcgccaugguaugcuuucgcacugaguagaggcuuuggaucaggaaucaucaccucaaaugcaccaaugggugaaugugaugcgaagugucaaacaccucagggagcuauaaacaguagucuuccuuuccagaauguacacccaguuacaauaggagaguguccaaaguaugucaggagugcaaaauuaaggaugguuacaggacuaaggaacaucccauccauucaauccagagguuuguuuggagccauugccgguuucauugaagggggguggacuggaaugguagaugggugguaugguuaucaucaucagaaugagcaaggaucuggcuaugcugcagaucaaaaaagcacacaaaaugccauuaacgggauuacaaacaaggugaauucuguaauugagaaaaugaacacucaauucacagcugugggcaaagaauucaacaaauuagaaagaaggauggaaaacuuaauuaaaaaaguugaugauggguuucuagacauuuggacauauaaugcagaauuguugguucuacuggaaaaugaaaggacuuuggauuuccaugacuccaaugugaagaaucuguaugagaaaguaaaaagccaauuaaagaauaaugccaaagaaauaggaaacggguguuuugaauucuaucacaaguguaacaaugaaugcauggaaagugugaaaaauggaacuuaugacuauccaaaauauuccgaagaaucaaaguuaaacagggagaaaauugauggaguaaaauuggaaucaaugggagucuaucagauucuggcgaucuacucaacugucgccaguucccugguucuuuuggucucccugggggcaaucagcuucuggauguguuccaaugggucuuugcaguguagaauaugcaucuga

SEQ ID NO: 32965 - RNA, 1698 nt, Artificial Sequence
  derived and/or modified CDS sequence (wt) from hemagglutinin__InfluenzaA__ABF82885
augaaagcaaaacuacugguccuguuauguacauuuacagcuacauacgcagacacaauauguauaggcuaccaugccaacaacucaaccgacacuguugacacaguacuugagaagaaugugacagugacacacucugucaaccuacuugaggacagucacaauggaaaacuaugucuacuaaaaggaauagccccacuacaauuggguaauugcagcguugccggauggaucuuaggaaacccagaaugcgaauuacugauuuccaaggaaucaugguccuacauuguagaaacaccaaaucccgagaauggaacauguuacccaggguauuucgccgacuaugaggaacugagggagcaauugaguucaguaucuucauuugagagauucgaaauauuccccaaaggaagcucauggcccaaccacaccgugaccggaguaucagcaucaugcucccauaaugggaaaagcaguuuuuacaggaauuugcuauggcugacggggaagaaugguuuguacccaaaccugagcauguccuauguaaacaacaaagagaaagaaguccuugugcuaugggguguucaucacccaccuaacauaggggaccaaagggcccucuaccauacagaaaaugcuuaugucucuguagugucuucacauuauagcagaagauucaccccagaaauagccaaaagacccaaaguaagagaucaggaaggaagaaucaacuacuacuggacucugcuggaacccggggacacaauaauauuugaggcaaauggaaaucuaauagcgccaugguaugcuuucgcacugaguagaggcuuuggaucaggaaucaucaccucaaaugcaccaaugggugaaugugaugcgaagugucaaacaccucagggagcuauaaacaguagucuuccuuuccagaauguacacccaguuacaauaggagaguguccaaaguaugucaggagugcaaaauuaaggaugguuacaggacuaaggaacaucccauccauucaauccagagguuuguuuggagccauugccgguuucauugaagggggguggacuggaaugguagaugggugguaugguuaucaucaucagaaugagcaaggaucuggcuaugcugcagaucaaaaaagcacacaaaaugccauuaacgggauuacaaacaaggugaauucuguaauugagaaaaugaacacucaauucacagcugugggcaaagaauucaacaaauuagaaagaaggauggaaaacuuaaauaaaaaaguugaugauggguuucuagacauuuggacauauaaugcagaauuguugguucuacuggaaaaugaaaggacuuuggauuuccaugacuccaaugugaagaaucuguaugagaaaguaaaaagccaauuaaagaauaaugccaaagaaauaggaaacggguguuuugaauucuaucacaaguguaacaaugaaugcauggaaagugugaaaaauggaacuuaugacuauccaaaauauuccgaagaaucaaaguuaaacagggagaaaauugauggaguaaaauuggaaucaaugggagucuaucagauucuggcgaucuacucaacugucgccaguucccugguucuuuuggucucccugggggcaaucagcuucuggauguguuccaaugggucuuugcaguguagaauaugcaucuga

SEQ ID NO: 32966 - RNA, 1698 nt, Artificial Sequence
  derived and/or modified CDS sequence (wt) from hemagglutinin__InfluenzaA__ABF82896
augaaagcaaaacuacugguccuguuauguacauuuacagcuacauacgcagacacaauauguauaggcuaccaugccaacaacucaaccgacacuguugacacaguacuugagaagaaugugacagugacacacucugucaaccuacuugaggacagucacaauggaaaacuaugucuacuaaaaggaauagccccacuacaauuggguaauugcagcguugccggauggaucuuaggaaacccagaaugcgaauuacugauuuccaaggaaucaugguccuacauuguagaaacaccaaaucccgagaauggaacauguuacccaggguauuucgccgacuaugaggaacugagggagcaauugaguucaguaucuucauuugagagauucgaaauauuccccaaaggaagcucauggcccaaccacaccgugaccggaguaucagcaucaugcucccauaaugggaaaagcaguuuuuacagaaauuugcuauggcugacggggaagaaugguuuguacccaaaccugagcauguccuauguaaacaacaaagagaaagaaguccuugugcuaugggguguucaucacccaccuaacauaggggaccaaagggcccucuaccauacagaaaaugcuuaugucucuguagugucuucacauuauagcagaagauucaccccagaaauagccaaaagacccaaaguaagagaucaggaaggaagaaucaacuacuacuggacucugcuggaacccggggacacaauaauauuugaggcaaauggaaaucuaauagcgccaugguaugcuuucgcacugaguagaggcuuuggaucagggaucaucaccucaaaugcaccaaugggugaaugugaugcgaagugucaaacaccucagggagcuauaaacaguagucuuccuuuccagaauguacacccaguuacaauaggagaguguccaaaguaugucaggagugcaaaauuaaggaugguuacaggacuaaggaacaucccauccauucaauccagagguuuguuuggagccauugccgguuucauugaagggggguggacuggaaugguagaugggugguaugguuaucaucaucagaaugagcaaggaucuggcuaugcugcagaucaaaaaagcacacaaaaugccauuaacgggauuacaaacaaggugaauucuguaauugagaaaaugaacacucaauucacagcugugggcaaagaauucaacaaauuagaaagaaggauggaaaacuuaaauaaaaaaguugaugauggguuucuagacauuuggacauauaaugcagaauuguugguucuacuggaaaaugaaaggacuuuggauuuccaugacuccaaugugaagaaucuguaugagaaaguaaaaagccaauuaaagaauaaugccaaagaaauaggaaacggguguuuugaauucuaucacaaguguaacaaugaaugcauggaaagugugaaaaauggaacuuaugacuauccaaaauauuccgaagaaucaaaguuaaacagggagaaaauugauggaguaaaauuggaaucaaugggagucuaucagauucuggcgaucuacucaacugucgccaguucccugguucuuuuggucucccugggggcaaucagcuucuggauguguuccaaugggucuuugcaguguagaauaugcaucuga

SEQ ID NO: 32967 - RNA, 1698 nt, Artificial Sequence
  derived and/or modified CDS sequence (wt) from hemagglutinin__InfluenzaA__ABF82907
augaaagcaaaacuacugguccuguuauguacauuuacagcuacauacgcagacacaauauguauaggcuaccaugccaacaacucaaccgacacuguugacacaguacuugagaagaaugugacagugacacacucugucaaccuacuugaggacagucacaauggaaaacuaugucuacuaaaaggaauagccccacuacaauuggguaauugcagcguugccggauggaucuuaggaaacccagaaugcgaauuacugauuuccaaggaaucaugguccuacauuguagaaacaccaaaucccgagaauggaacauguuacccaggguauuucgccgacuaugaggaacugagggagcaauugaguucaguaucuucauuugagagauucgaaauauuccccaaaggaagcucauggcccaaccacaccgugaccggaguaucagcaucaugcucccauaaugggaaaagcaguuuuuacagaaauuugcuauggcugacggggaagaaugguuuguacccaaaccugagcauguccuauguaaacaacaaagagaaagaaguccuugugcuaugggguguucaucacccaccuaacauaggggaccaaagggcccucuaccauacagaaaaugcuuaugucuccguagugucuucacauuauagcagaagauucaccccagaaauagccaaaagacccaaaguaagagaucaggaaggaagaaucaacuacuacuggacucugcuggaacccggggacacaauaauauuugaggcaaauggaaaucuaauagcgccaugguaugcuuucgcacugaguagaggcuuuggaucaggaaucaucaccucaaaugcaccaaugggugaaugugaugcgaagugucaaacaccucagggagcuauaaacaguagucuuccuuuccagaauguacacccaguuacaauaggagaguguccaaaguaugucaggagugcaaaauuaaggaugguuacaggacuaaggaacaucccauccauucaauccagagguuuguuuggagccauugccgguuucauugaagggggguggacuggaaugguagaugggugguaugguuaucaucaucagaaugagcaaggaucuggcuaugcugcagaucaaaaaagcacacaaaaugccauuaacgggauuacaaacaaggugaauucuguaauugagaaaaugaacacucaauucacagcugugggcaaagaauucaacaaauuagaaagaaggauggaaaacuuaaauaaaaaaguugaugauggguuucuagacauuuggacauauaaugcagaauuguugguucuacuggaaaaugaaaggacuuuggauuuccaugacuccaaugugaagaaucuguaugagaaaguaaaaagccaauuaaagaauaaugccaaagaaauaggaaacggguguuuugaauucuaucacaaguguaacaaugaaugcauggaaagugugaaaaauggaacuuaugacuauccaaaauauuccgaagaaucaaaguuaaacagggagaaaauugauggaguaaaauuggaaucaaugggagucuaucagauucuggcgaucuacucaacugucgccaguucccugguucuuuuggucucccugggggcaaucagcuucuggauguguuccaaugggucuuugcaguguagaauaugcaucuga

SEQ ID NO: 32968 - RNA, 1698 nt, Artificial Sequence; identical to SEQ ID NO: 32856
  derived and/or modified CDS sequence (wt) from hemagglutinin__InfluenzaA__ABF82929

SEQ ID NO: 32969 - RNA, 1698 nt, Artificial Sequence
  derived and/or modified CDS sequence (wt) from hemagglutinin__InfluenzaA__ABF82940
augaaagcaaaacuacugguccuguuauguacauuuacagcuacauacgcagacacaauauguauaggcuaccaugccaacaacucaaccgacacuguugacacaguacuugagaagaaugugacagugacacacucugucaaccuacuugaggacagucacaauggaaaacuaugucuacuaaaaggaauagccccacuacaauuggguaauugcagcguugccggauggaucuuaggaaacccagaaugcgaauuacugauuuccaaggaaucaugguccuacauuguagaaacaccaaaucccgagaauggaacauguuacccaggguauuucgccgacuaugaggaacugagggagcaauugaguucaguaucuucauuugagagauucgaaauauuccccaaaggaagcucauggcccaaccacaccgugaccggaguaucagcaucaugcucccauaaugggaaaagcaguuuuuacagaaauuugcuauggcugacggggaagaaugguuuguacccaaaccugagcauguccuauguaaacaacaaagagaaagaaguccuugugcuaugggguguucaucacccaccuaacauaggggaccaaagggcccucuaccauacagaaaaugcuuaugucucuguagugucuucacauuauagcagaagauucaccccagaaauagccaaaagacccaaaguaagagaucaggaaggaagaaucaacuacuacuggacucugcuggaacccggggacacaauaauauuugaggcaaauggaaaucuaauagcgccaugguaugcuuucgcacugaguagaggcuuuggaucaggaaucaucaccucaaaugcaccaaugggugaaugugaugcgaagugucaaacaccucagggagcuauaaacaguagucuuccuuuccagaauguacacccaguuacaauaggagaguguccaaaguaugucaggagugcaaaauuaaggaugguuacaggacuaaggaacaucccauccauucaauccagagguuuguuuggagccauugccgguuucauugaagggggguggacuggaaugguagaugggugguaugguuaucaucaucagaaugagcaaggaucuggcuaugcugcagaucaaaaaagcacacaaaaugccauuaacgggauuacaaacaaggugaauucuguaauugagaaaaugaacacucaauucacagcugugggcaaagaauucaacaaauuagaaagaaggauggaaaacuuaaauaaaaaaguugaugauggguuucuagacauuuggacauauaaugcagaauuguugguucuacuggaaaaugaaaggacuuuggauuuccaugacuccaaugugaagaaccuguaugagaaaguaaaaagccaauuaaagaauaaugccaaagaaauaggaaacggguguuuugaauucuaucacaaguguaacaaugaaugcauggaaagugugaaaaauggaacuuaugacuauccaaaauauuccgaagaaucaaaguuaaacagggagaaaauugauggaguaaaauuggaaucaaugggagucuaucagauucuggcgaucuacucaacugucgccaguucccugguucuuuuggucucccugggggcaaucagcuucuggauguguuccaaugggucuuugcaguguagaauaugcaucuga

SEQ ID NO: 32970 - RNA, 1701 nt, Artificial Sequence
  derived and/or modified CDS sequence (wt) from hemagglutinin__InfluenzaA__ABF83447
augaagaccaucauugcuuugagcuacauuuucugucuggcucucggccaagaccuuccaggaaaugacaacaacacagcaacgcugugccugggacaucaugcggugccaaacggaacacuagugaaaacaaucacagaugaucagauugaagugacuaaugcuacugagcuaguucagagcuccucaacggggaaaauaugcaacaauccucaucgaauccuugauggaauagacugcacacugauagaugcucuauugggggacccucauugugauguuuuucaaaaugagacaugggaccuuuucguugaacgcagcaaagcuuucagcaacuguuacccuuaugaugugccagauuaugccucccuuaggucacuaguugccucgucaggcacucuggaguuuaucacugaggguuucacuuggacuggggucacucagaaugggggaagcaaugcuugcaaaaggggaccugguagcgguuuuuucaguagacugaacugguugaccaaaucaggaagcacauauccagugcugaacgugacuaugccaaacaaugacaauuuugacaaacuauacauuugggggguucaccacccgagcacgaaccaagaacaaaccagccuguauguucaagcaucagggggagucacagucucuaccaggagaagccagcaaacuauaaucccgaauaucggguccagacccuggguaaggggucugucuaguagaauaagcaucuauuggacaauaguuaagccgggagacguacugguaauuaauaguaaugggaaccuaaucgcuccucgggguuauuucaaaaugcgcacugggaaaagcucaauaaugaggucagaugcaccuauugauaccuguauuucugaaugcaucacuccaaauggaagcauucccaaugacaagcccuuucaaaacguaaacaagaucacauauggagcaugccccaaguauguuaagcaaaacacccugaaguuggcaacagggaugcggaauguaccagagaaacaaacuagaggccuauucggcgcaauagcagguuucauagaaaaugguugggagggaaugauagacgguugguacgguuucaggcaucaaaauucugagggcacaggacaagcagcagaucuuaaaagcacucaagcagccaucgaccaaaucaaugggaaauugaacaggguaaucgagaagacgaacgagaaauuccaucaaaucgaaaaggaauucucagaaguagaagggagaauucaggaccucgagaaauacguugaagacacuaaaauagaucucuggucuuacaaugcggagcuucuugucgcucuggagaaucaacauacaauugaccugacugacucggaaaugaacaagcuguuugaaaaaacaaggaggcaacugagggaaaaugcugaagacaugggcaaugguugcuucaaaauauaccacaaaugugacaacgcuugcauagagucaaucagaaaugggacuuaugaccaugauguauacagagacgaagcauuaaacaaccgguuucagaucaaagguguugaacugaagucuggauacaaagacuggauccuguggauuuccuuugccauaucaugcuuuuugcuuuguguuguuuugcugggguucaucaugugggccugccagagaggcaacauuaggugcaacauuugcauuuga

SEQ ID NO: 32971 - RNA, 1644 nt, Artificial Sequence
  derived and/or modified CDS sequence (wt) from hemagglutinin__InfluenzaA__ABG20468
auggagaaaauagugcuucuucuugcaauagucagucuuguuaaaagugaucagauuugcauugguuaccaugcaaacaacucgacagagcagguugacacaauaauggaaaagaacgucacuguuacacacgcccaagacauacuggaaaagacacacaacgggaaacucugcgaucuagauggagugaagccucuaauuuuaagagauuguaguguagcuggggagaagaucaauccagccaaugaccucuguuacccagggaauuucaacgacuaugaagaacugaaacaccuauugagcagaauaaaccauuuugagaaaauucagaucauccccaaaaguucuuggucagaucaugaagccucaucaggggugagcucagcauguccauaccagggaagguccuccuuuuuuagaaaugugguauggcuuaucaaaaagaacaaugcauacccaacaauaaagagaaguuacaauaauaccaaccaagaagaucuuuugguacugugggggauucaccauccaaaugaugcggcagagcagacaaggcucuaucaaaacccaaccaccuauauuuccguugggacaucaacacuaaaccagagauugguaccaaaaauagcuacuagauccaagguaaacgggcaaaguggaaggauggaguucuuuuggacaauuuuaaaaccgaaugaugcaauaaacuuugagaguaauggaaauuucauugcuccagaaaaugcauacaaaauugucaagaaaggggacucaacaauuaugaaaagugaauuggaauaugguaacugcaacaccaagugugaaacuccaauaggggcgauaaacucuaguaugccauuccacaacauccacccucucaccaucggggaaugccccaaauaugugaaaucaaacagauuaguccuugcgacugggcucagaaauagcccucaaggagagagaagaagaaaaaagagaggacuauuuggagcuauagcagguuuuauagagggaggauggcagggaaugguagaugguugguauggguaccaccauagcaacgagcaggggaguggguacgcugcagacaaagaauccacucaaaaggcaauagauggagucaccaauaaggucaacucgaucauugacaaaaugaacacucaguuugaggccguuggaagggaauuuaauaacuuagaaaggagaauagaaaauuuaaacaagaagauggaagacggauuccuagaugucuggacuuauaaugcugaacuucugguucucauggaaaaugagagaacucuagacuuucaugacucaaaugucaagaaccuuuacgacaagguccgacuacagcuuagggauaaugcaaaggagcuugguaacgguuguuucgaguucuaucacagaugugauaaugaauguauggaaaguguaagaaacggaacguaugacuacccgcaguauucagaagaagcaagauuaaaaagagaggaaauaaguggaguaaaauuggaaucaauaggaacuuaccaaauacugucaauuuauucaacaguggcgagcucccuagcacuggcaaucaugguggcuggucuaucuuuauggaugugcuccaauggaucguuacaaugcagaauuugcauuuaa

SEQ ID NO: 32972 - RNA, 1707 nt, Artificial Sequence
  derived and/or modified CDS sequence (wt) from hemagglutinin__InfluenzaA__ABG20472
auggagaaaauagugcuucuucuugcaauagucagucuuguuaaaagugaucagauuugcauugguuaccaugcaaacaacucgacagagcagguugacacaauaauggaaaagaacgucacuguuacacacgcccaagauauacuggaaaaggcacacaacgggaagcucugcgaucuagacggagugaagccucuaauuuuaagagauuguaguguagcuggauggcuccucgggaacccaaugugugacgaauuccucaaugugccggaauggucuuacauaguggagaagaucaauccagccaaugaccucuguuacccagggaauuucaacgacuaugaagaacugaaacaccuauugagcagaauaaaccauuuugagaaaauucagaucauccccaagaguucuuggucagaucaugaagccucaucaggggugagcucagcauguccauaccagggaagguccuccuuuuuuagaaaugugguauggcuuaucaaaaaggacaaugcauacccaacaauaaagagaaguuacaauaauaccaaccaagaagaucuuuugguacugugggggauucaccauccaaaugaugcggcagagcagacaaggcucuaucaaaacccaaccaccuauauuuccguugggacaucaacacuaaaccagagauugguaccaaaaauagcuacuagauccaagguaaacgggcaaaguggaaggauggaguucuuuuggacaauuuuaaaaccgaaugaugcaauaaacuuugagaguaauggaaauuucauugcuccagaaaaugcauacaaaauugucaagaaaggggacucaacaauuaugaaaagugaauuggaauaugguaacugcaacaccaagugucaaacuccaauaggggcgauaaacucuaguaugccauuccacaacauccacccucucaccaucggggaaugccccaaauaugugaaaucaaacagauuaguccuugcgacugggcucagaaauagcccucaaggagagagaagaagaaaaaagagaggacuauuuggagcuauagcagguuuuauagagggaggauggcagggaaugguagaugguugguauggguaccaccauagcaacgagcaggggaguggguacgcugcagacaaagaauccacucaaaaggcaauagauggagucaccaauaaggucaacucgaucauugacaaaaugaacacucaguuugaggccguuggaagggaauuuaauaacuuagaaaggagaauagaaaauuuaaacaagaagauggaagacggauuccuagaugucuggacuuauaaugcugaacuucugguucucauggaaaaugagagaacucuagacuuucaugacucaaaugucaagaaccuuuacgacaagguccgacuacagcuuagggauaaugcaaaggagcuugguaacgguuguuucgaguucuaucacagaugugauaaugaauguauggaaaguguaagaaacggaacguaugacuacccgcaguauucagaagaagcaagauuaaaaagagaggaaauaaguggaguaaaauuggaaucaauaggaacuuaccaaauacugucaauuuauucaacaguggcgagcucccuagcacuggcaaucaugguggcuggucuaucuuuauggaugugcuccaauggaucguugcaaugcagaauuugcauuuaa

SEQ ID NO: 32973 - RNA, 1707 nt, Artificial Sequence
  derived and/or modified CDS sequence (wt) from hemagglutinin__InfluenzaA__ABG20478
auggagaaaauagugcuucuuuuugcaauagucagucuuguuaaaagugaucagauuugcauugguuaccaugcaaacaacucgacagagcagguugacacaauaauggaaaagaacgucacuguuacacacgcccaagacauacuggaaaagacacacaacgggaagcucugcgaucuagauggagugaagccucuaauuuuaagagauuguaguguagcuggauggcuccucgggaacccaaugugugacgaauuccucaaugugccggaauggucuuacauaguggagaagaucaauccagccaaugaccucuguuacccagggaauuucaacgacuaugaagaacugaaacaccuauugagcagaauaaaccauuuugagaaaauucagaucauccccaaaaguucuuggucagaucaugaagccucaucaggggugagcucagcauguccauaccagggaagguccuccuuuuuuagaaaugugguauggcuuaucaaaaaggacaaugcauacccaacaauaaagagaaguuacaauaauaccaaccaagaagaucuuuugguacugugggggauucaccauccaaaugaugcagcagagcagacaaggcucuaucaaaacccaaccaccuauauuuccguugggacaucaacacuaaaccagagauugguaccaaaaauagcuacuagauccaagguaaacgggcaaaguggaaggauggaguucuuuuggacaauuuuaaaaccgaaugaugcaauaaacuuugagaguaauggaaauuucauugcuccagaaaaugcauacaaaauugucaagaaaggggacucaacaauuaugaaaagugaauuggaauaugguaacugcaacaccaagugucaaacuccaauaggggcgauaaacucuaguaugccauuccacaacauccacccucucaccaucggggaaugccccaaauaugugaaaucaaacagauuaguccuugcgacugggcucagaaauagcccucaaggagagagaagaagaaaaaagagaggacuauuuggagcuauagcagguuuuauagaaggaggauggcagggaaugguagaugguugguauggguaccaucauagcaacgagcaggggaguggguacgcugcagacaaagaauccacucaaaaggcaauagauggagucaccaauaaggucaacucgaucauugacaaaaugaacacucaguuugaggccguuggaagggaauuuaauaacuuagaaaggagaauagaaaauuuaaacaagaagauggaagacggauuccuagaugucuggacuuauaaugcugaacuucugguucucauggaaaaugagagaacucuagacuuucaugacucaaaugucaagaaccuuuacgacaagguccgacuacagcuuagggauaaugcaaaggaacuugguaacgguuguuucgaguucuaucacagaugugauaaugaauguauggaaaguguaagaaacgguacguaugacuacccgcaguauucagaagaagcaagauuaaaaagagaggaaauaaguggaguaaaauuggaaucaauaggaaccuaccaaauacugucaauuuauucaacaguggcgagcucccuagcacuggcaaucaugguggcuggucuaucuuuauggaugugcuccaauggaucguugcaaugcagaauuugcauuuaa

SEQ ID NO: 32974 - RNA, 1701 nt, Artificial Sequence
  derived and/or modified CDS sequence (wt) from hemagglutinin__InfluenzaA__ABG26758
augaagacuauuauugcuuugagcuacauuuuaugucugguuuucgcucaaaaacuucccggaaaugacaacagcacggcaacgcugugccugggacaccaugcagugccaaacggaacgcuagugaaaacaaucacgaaugaccaaauugaagugacuaaugcuacugagcugguucaggguuccucaacagguagaauaugcgacaguccucaccgaauccuugauggaaaaaacugcacacugauagaugcucuauugggagacccucauugugauggcuuccaaaauaaggaaugggaccuuuuuguugaacgcagcaaagcuuacagcaacuguuacccuuaugaugugccggauuaugccucccuuaggucacuaguugccucaucaggcacccuggaguuuaacaaugaaagcuucaauuggacuggagucgcccagaauggaacaagcuaugcuugcaaaaggagaucuguuaaaaguuucuuuaguagauugaauugguugcacaaauuagaauacaaauauccagcacugaacgugacuaugccaaacaaugacaaauuugacaaauuguacaucugggggguucaccacccgaguacggacagugaccaaaccagccuauauguucaagcaucagggagagucacagucucuaccaaaagaagccaacaaacuguaaucccgaauaucggaucuagacccuggguaaggggugucuccagcagaauaagcauauauuggacaauaguaaaaccgggagacauacuuuugauuaacagcacagggaaucuaauugcuccucgggguuacuucaaaauacgaagugggaaaagcucaauaaugaggucagaugcacccauugacaacugcaauucugaaugcaucacuccaaauggaagcauucccaaugacaaaccauuucaaaauguaaacaggaucacauauggggccugucccagauauguuaagcaaaacacucugaaauuggcaacagggaugcggaauguaccagagaaacaaacuagaggcauauucggcgcaaucgcagguuucauagaaaaugguugggagggaaugguagacgguugguacgguuucaggcaucaaaauucugagggcacaggacaagcagcagaucuuaaaagcacucaagcagcaaucaaccaaaucaacgggaaacugaauagguuaaucgagaaaacgaacgagaaauuccaucaaaucgaaaaagaauucucagaaguagaagggagaauucaggaccucgagaaauauguugaagacacuaaaauagaucucuggucguacaacgcggagcuucuuguugcccuggagaaccaacauacaauugaucuaacugacucagaaaugaacaaacuguuugaaagaacaaggaagcaacugagggaaaaugcugaggacaugggcaaugguugcuucaaaauauaccacaaaugugacaaugccugcauagggucaaucagaaauggaacuuaugaccaugauguauacagagacgaagcauuaaacaaccgguuccagaucaaagguguugagcugaagucaggauacaaagauuggauccuauggauuuccuuugccauaucauguuuuuugcuuuguguuguuuuguugggguucaucaugugggccugccaaaaaggcaacauuaggugcaacauuugcauuuga

SEQ ID NO: 32975 - RNA, 1701 nt, Artificial Sequence
  derived and/or modified CDS sequence (wt) from hemagglutinin__InfluenzaA__ABG26769
augaagacuaucauugcuuugagcuacauuuuaugucugguuuucgcucaaaaacuucccggaaaugacaacagcacggcaacgcugugccugggacaccaugcagugccaaacggaacgcuagugaaaacaaucacgaaugaccaaauugaagugacuaaugcuacugagcugguucagaauuccucaacagguaggauaugugacaguccucaccgaauccuugaugggaaaaacugcacacugauagaugcucuauugggagacccucauugugauggcuuccaaaauaaggaaugggaccuuuuuguugaacgcagcaaagcuuacagcaacuguuacccuuaugaugugccggauuaugccucccuuaggucacuaguugccucauccggcacccuggaguuuaacaaugaaagcuucaauuggacuggagucgcucagaauggaacaagcuaugcuugcaaaaggagaucuguuaaaaguuucuuuaguagauugaauugguugcacaaauuagaauacaaauauccagcacugaacgugacuaugccaaacaaugacaaauuugacaaauuguacauuugggggguucaccacccgaguacggacagugaccaaaccagccuauauguucaagcaucagggagagucacagucucuaccaaaagaagccaacaaacuguaaucccgaauaucggaucuggacccuggguaaggggugucuccagcagaauaagcaucuauuggacaauaguaaaaccgggagacauacuuuugauuaacagcacagggaaucuaauugcuccucgggguuacuucaaaauacgaagugggaaaagcucaauaaugaggucagaugcacccauuggcaacugcaauucugaaugcaucacuccaaauggaagcauucccaaugacaaaccauuucaaaauguaaacaggaucacauauggggccugucccagauauguuaagcaaaacacucugaaauuggcaacagggaugcggaauguaccagagaaacaaacuagaggcauauucggcgcaaucgcagguuucauagaaaaugguugggagggaaugguagacgguugguacgguuucaggcaucaaaauucugagggcacaggacaagcagcggaucuuaaaagcacucaagcagcaaucaaccaaaucaacgggaaacugaauagguuaaucgagaaaacgaacgagaaauuccaucaaaucgaaaaagaauucucagaaguagaagggagaauucaggaccucgagaaauauguugaagacacuaaaauagaucucuggucguacaacgcggagcuucuuguugcccuggagaaccaacauacaauugaucuaacugacucagaaaugaacaaacuguuugaaagaacaaggaagcaacugagggaaaaugcugaggacaugggcaaugguugcuucagaauauaccacaaaugugacaaugccugcauagggucaaucagaaauggaacuuaugaccaugauguauacagagacgaagcauuaaacaaccgguuccagaucaaagguguugagcugaagucaggauacaaagauuggauccuauggauuuccuuugccauaucauguuuuuugcuuuguguuguuuugcugggguucaucaugugggccugccaaaaaggcaacauuaggugcaacauuugcauuuga

SEQ ID NO: 32976 - RNA, 1701 nt, Artificial Sequence
  derived and/or modified CDS sequence (wt) from hemagglutinin__InfluenzaA__ABG26780
augaaagcaaaacuacuaguccuguugugugcauuuacagcuacauaugcagacacaauauguauaggcuaccaugcgaacaacucaaccgacacuguugacacaguacuugagaagaacgugacagugacacacucugucaaccuacuugaggacagucacaacggaaaacuaugccgacuaaaaggaacagccccacuacaauuggguaauugcagcguugccggauggaucuuaggaaacccagaaugcgaaucacuguuuucuaaggaaucaugguccuacauugcagaaacaccaaacccugagaauggaacauguuacccaggguauuucgccgacuaugaggaacugagggagcaauugagcucaguaucaucauucgagagauucgaaauauuccccaaggaaagcucauggcccaaccacaccguaaccaaaggagugacggcaucaugcucacauaaugggaaaagcaguuuuuacaaaaauuugcuauggcugacggaaaagaauggcuuguacccaaaucugagcaaguccuauguaaacaacaaggagaaagaaguccuugugcuaugggguguucaucacccgucuaacauaggggaccaaagggccaucuaucauacagaaaaugcuuaugucucuguagugucuucacauuauagcagaagauucaccccagaaauaacaaaaagacccaaaguaagagaucaagaagggagaauuaacuacuacuggacucugcuggaacccggggacacaauaauauuugaggcaaauggaaaucuaauagcgccaugguacgcuuucgcacugaguagaggcuuugggucaggaaucaucaccucaaacgcaucaaugggugaaugugacgcuaagugucaaacaccccaaggagcuauaaacaguagucuuccuuuccagaauguacacccagucacaauaggagagugucccaaguaugucaggaguacaaaauuaaggaugguuacaggacuaagaaacaucccauccauucaaucuagagguuuguuuggagccauugccgguuucauugaagggggguggacuggaaugauagauggaugguaugguuaccaucaucagaaugaacaaggaucuggcuaugcugcagaccagaaaagcacacaaaaugccauugaugggauuacaaacaaggugaauucuguaaucgagaaaaugaacacucaauucacagcuguaggcaaagaauucaacaaauuagagagaaggauggaaaacuuaaauaagaaaguugaugauggguuucuggacauuuggacauauaaugcagaguuguugguucuccuggaaaaugaaaggacuuuggauuuucaugacucaaaugugaagaaucuguaugagaaaguaaaaacccaauugaagaauaaugccaaagaaaucgggaacggguguuuugaauucuaucacaaguguaacaaugaaugcauggaaagugugaaaaauggaacuuaugacuauccaaaauauuccgaagaaucaaaguuaaacagggaaaaaauugauggagugaaauuggaaucaaugggagucuaucagauucuggcgaucuacucaacugucgccaguucacuggugcuuuuggucucccugggggcaaucaguuucuggauguguucuaaugggucuuugcaguguagaauaugcaucuga

SEQ ID NO: 32977 - RNA, 1701 nt, Artificial Sequence
  derived and/or modified CDS sequence (wt) from hemagglutinin__InfluenzaA__ABG26791
augaaagcaaaacuacuaguccuguugugugcauuuacagcuacauaugcagacacaauauguauaggcuaccaugcgaacaacucaaccgacacuguugacacaguacuugagaagaacgugacagugacacacucugucaaccuacuugaggacagucacaacggaaaacuaugccgacuaaaaggaacagccccacuacaauuggguaauugcagcguugccggauggaucuuaggaaacccagaaugcgaaucacuguuuucuaaggaaucaugguccuacauugcagaaacaccaaacccugagaauggaacauguuacccaggguauuucgccgacuaugaggaacugaaggagcaauugagcucaguaucaucauucgagagauucgaaauauuccccaaggaaagcucauggcccaaccacacaguaaccaaaggagugacggcaucaugcucccauaaugggaaaagcaguuuuuacaaaaauuugcuauggcugacggaaaagaauggcuuguacccaaaucugagcaaguccuauguaaacaacaaggagaaagaaguccuuguacuaugggguguucaucacccgucuaacauaggggaccaaagggccaucuaucauacagaaaaugcuuauguuucuguggugucuucacauuauagcagaagauucaccccagaaauagcaaaaagacccaaaguaagagaucaagaagggagaauuaacuacuacuggacucugcuggaacccggggacacaauaauauuugaggcaaauggaaaucuaauagcgccaugguacgcuuucgcauugaguagaggcuuugggucaggaaucaucaccucaaacgcaucaaugggugaaugugacgcuaagugucaaacaccccaaggagcuauaaacaguagucuuccuuuccagaauguacacccagucacaauaggagagugucccaaguaugucaggaguacaaaauuaaggaugguuacaggacuaagaaacaucccauccauucagucuagagguuuguuuggagccauugccgguuucauugaagggggguggacuggaaugauagauggaugguaugguuaucaucaucagaaugaacaaggaucuggcuaugcugcagacaaaaaaagcacacaaaaugccauugaugggauuacaaacaaggugaauucuguaaucgagaaaaugaacacucaauucacagcuguaggcaaagaauucaacaaauuagagagaaggauggaaaacuuaaauaagaaaguugaugauggauuucuggacauuuggacauauaaugcagaguuguugguucuccuggaaaaugaaaggacuuuggauuuucaugacucaaaugugaagaaucuguaugagaaaguaaaaaaccaauugaagaauaaugccaaagaaaucgggaacggguguuuugaauucuaucacaaguguaacaaugaaugcauggaaagugugaaaaauggaacuuaugacuauccaaaauauuccgaagaaucaaaguuaaaaagggaaaaaauugauggagugaaauuggaaucaaugggagucuaucagauucuggcgaucuacucaacugucgccaguucacuggugcuuuuggucucccugggggcaaucaguuucuggauguguucuaaugggucuuugcaguguagaauaugcaucuga

SEQ ID NO: 32978 - RNA, 1701 nt, Artificial Sequence
  derived and/or modified CDS sequence (wt) from hemagglutinin__InfluenzaA__ABG26802
augaagacuaucauugcuuugagcuacauuuccugucugguuuucgcccaaaaacuucccggaaaugacaacagcacagcaacgcugugccugggacaucaugcaguaccaaacggaacgcuagugaaaacaaucacgaaugaucagauugaagugacuaaugcuacugagcugguccaaaguuccucaacagguagaauaugcgacaguccucaccgaauccuugauggaaaaaacugcacacugauagaugcucuauugggagacccucauugugauggcuuccaaaaugagaaaugggaucuuuuuguugaacgcagcaaagcuuucagcaacugcuacccuuaugaugugccggauuaugccucccuuaggucacuaguugccucaucaggcacccuggaguuuaucaaugaaggcuucaauuggacuggagucacucagagugggggaagcuaugcuugcaaaaggggaucuguuaacaguuucuucaguagauugaauugguuguaugagucagaaagcaaauauccagcgcugaacgugacuaugccaaacaauggcaaauuugacaaauuguacauuugggggguucaccacccuagcacggacaaagaacaaaccaaccuauauguucgagcaucagggagagucacagucucuaccaagaggagccagcaaacuguaaucccgaauaucgggccuagacccuggguaaggggucugucuaguagaauaaguaucuauuggacaauaguaaaaccgggagacauacuguuaauuaauagcacugggaaccuaauugcuccccgggguuacuucaaaauacgcacugggaaaagcucaauaaugaggucagaugcaccuauuggcaccugcaguucuggaugcaucacuccaaauggaagcauucccaaugacaaacccuuucaaaaugugaacaagaucacauauggggcaugucccagguauguuaagcagaacacucugaaguuggcaacagggaugcggaauguaccugaaaaacaaacuagaggcauauucggcgcaauagcagguuucauagaaaaugguugggagggaaugguagacgguugguacgguuucaggcaucaaaauucugagggcacaggacaagcagcagaucuuaaaagcacucaagcagcaaucgaccaaaucaacgggaaacugaauagguuaaucgagaaaacgaacgagaaauuccaucaaaucgaaaaggaauucucagaaguagaagggagaauucaggaccucgagaaguauguugaagacacuaaaauagaucucuggucuuacaacgcggagcuucuuguugcccuggagaaccaacauacaauugauaugacugacucagaaaugaacaaacuguuugaaaaaacaaggaagcaacugagggaaaaugcugaggacaugggcaaugguugcuucaaaauauaccacaaaugugacaaugcuugcauagggucaaucagaaauggaacuuaugaccaugauguauacagagacgaagcauuaaacaaccgguuucagaucaaagguguugagcugaagucaggauacaaagacuggauccuauggauuuccuuugccauaucaugcuuuuugcucuguguuguuuugcugggguucauaaugugggccugccaaaaaggcaacauuaggugcaacauuugcauuuga

SEQ ID NO: 32979 - RNA, 1701 nt, Artificial Sequence; identical to SEQ ID NO: 32928
  derived and/or modified CDS sequence (wt) from hemagglutinin__InfluenzaA__ABG26813

SEQ ID NO: 32980 - RNA, 1701 nt, Artificial Sequence
  derived and/or modified CDS sequence (wt) from hemagglutinin__InfluenzaA__ABG26824
augaaagcaaaacuacugguccuguuaugugcacuuucagcuacagaugcagacacaauauguauaggcuaccaugcgaacaacucaaccgacacuguugacacaguacucgaaaagaacgugacagugacacacucugucaaccuacuugaggacaaucacaacggaaaacuaugcaaacuaaaaggaauagccccacuacaauuggggaaaugcagcauugccggauggaucuuaggaaacccagaaugcgaaucacuguuuucuaagaaaucaugguccuacauugcagaaacaccaaacuccgagaauggaacauguuacccaggguauuucgccgacuaugaggaacugagggaacaauugaguucaguaucaucauucgagagauucgaaauauuccccaaggaaaguucauggcccaaacacaacguaaccaaaggaguaacggcaucaugcucccauaaggggaaaagcaguuuuuacagaaauuugcuauggcugacggagaaaaauggcucguacccaaaucugagcaaguccuaugugaacaacaaagagaaagaaguccuuguacuaugggguguucaucacccgucuaacauagaggaccaaaagaccaucuaucguaaagaaaaugcuuaugucucuguagugucuucacauuauaacaggagauucaccccagaaauagcaaaaagacccaaaguaagaaaucaagaagggagaauuaacuacuacuggacucugcuggaacccggggacacaauaauauuugaggcaaauggaaaucuaauagcgccaugguaugcuuucgcauugaguagaggcuuugggucaggaaucaucaccucaaacgcaucgauggaugaaugugacgcgaagugucaaacaccccagggagcuauaaacaguagucuuccuuuucagaauguacacccagucacaauaggagagugcccaaaguacgucaggaguacaaaauuaaggaugguuacaggacuaaggaacaucccauccauucaauccagagguuuguuuggagccauugccgguuucauugaagggggauggacuggaaugauugauggaugguaugguuaucaucaucagaaugaacagggaucuggcuaugcugcggaucaaaaaagcacacaaaaugccauuaacgggauuacaaacaaggugaacucuauaaucgagaaaaugaacacucaauucacagcuguggguaaagaauucaacaaacuagaaaaaaggauggaaaacuuaaauaaaaaaguugaugauggauuuuuggacauuuggacauauaaugcagaauuguugguucuacuggaaaaugaaaggacuuuggauuuccaugacucaaaugugaagaaccuguaugagaaaguaaaaagccaauuaaagaauaaugccaaagaaauaggaaacggguguuuugaauucuaccacaaguguaacaaugaaugcauggaaaguguaaaaaaugggacuuaugacuauccaaaauauucagaagaaucaaaguuaaacagggaaaaaauugauggagugaaauuggaaucaaugggagucuaucagauucuggcgaucuacucaacugucgccaguucacuggugcuuuuggucucccugggggcaaucagcuucuggauguguucuaaugggucuuugcagugcaaaauaugcaucuga

SEQ ID NO: 32981 - RNA, 1701 nt, Artificial Sequence
  derived and/or modified CDS sequence (wt) from hemagglutinin__InfluenzaA__ABG26835
augaaagcaaaacuacugguccuguuaugugcacuuucagcuacagaugcagacacaauauguauaggcuaccaugcgaacaacucaaccgacacuguugacacagugcucgaaaagaacgugacagugacacacucugucaaccuacuugaggacaaucacaacggaaaacuaugcaaacuaaaaggaauagccccacuacaauuggggaaaugcagcauugccggauggaucuuaggaaacccagaaugcgaaucacuguuuucuaagaaaucaugguccuacauugcagaaacaccaaacuccgagaauggaacauguuacccaggguauuucgccgacuaugaggaacugagggaacaauugaguucaguaucaucauucgagagauucgaaauauuccccaaggaaaguucauggcccaaacacaacguaaccaaaggaguaacggcaucaugcucccauaaggggaaaagcaguuuuuacagaaauuugcuauggcugacggagaaaaauggcucguacccaaaucugagcaaguccuaugugaacaacaaagagaaagaaguccuuguacuaugggguguucaucacccgucuaacauagaggaccaaaagaccaucuaucguaaagaaaaugcuuaugucucuguagugucuucacauuauaacaggagauucaccccagaaauagcaaaaagacccaaaguaagaaaucaagaagggagaauuaacuacuacuggacucugcuggaacccggggacacaauaauauuugaggcaaauggaaaucuaauagcgccaugguaugcuuucgcauugaguagaggcuuugggucaggaaucaucaccucaaacgcaucgauggaugaaugugacgcgaagugucaaacaccccagggagcuauaaacaguagucuuccuuuucagaauguacacccagucacaauaggagagugcccaaaguacgucaggaguacaaaauuaaggaugguuacaggacuaaggaacaucccauccauucaauccagagguuuguuuggagccauugccgguuucauugaagggggauggacuggaaugauugauggaugguaugguuaucaucaucagaaugaacagggaucuggcuaugcugcggaucaaaaaagcacacaaaaugccauuaacgggauuacaaacaaggugaacucuauaaucgagaaaaugaacacucaauucacagcuguggguaaagaauucaacaaacuagaaaaaaggauggaaaacuuaaauaaaaaaguugaugauggauuucuggacauuuggacauauaaugcagaauuguugguucuacuggaaaaugaaaggacuuuggauuuccaugacucaaaugugaagaaccuguaugagaaaguaaaaagccaauuaaagaauaaugccaaagaaauaggaaacggguguuuugaauucuaccacaaguguaacaaugaaugcauggaaaguguaaaaaaugggacuuaugacuauccaaaauauucagaagaaucaaaguuaaacagggaaaaaauugauggagugaaauuggaaucaaugggagucuaucagauucuggcgaucuacucaacugucgccaguucacuggugcuuuuggucucccugggggcaaucagcuucuggauguguucuaaugggucuuugcagugcagaauaugcaucuga

SEQ ID NO: 32982 - RNA, 1701 nt, Artificial Sequence
  derived and/or modified CDS sequence (wt) from hemagglutinin__InfluenzaA__ABG26890
augaagacuaucauugcuuugagcuacauuuuaugucugguuuucgcucaaaaacuucccggaaaugacaacagcacagcaacgcugugccugggacaccaugcagugccaaacggaacgcuagugaaaacaaucacgaaugaucaaauugaagugacuaaugcuacugagcugguucagaauuccccaacagguagaauaugcgacaguccucaccgaauccuugauggaaagaacugcacacugauagaugcucuauugggagacccucauugugauggcuuccaaaauaaggaaugggaccuuuuuguugaacgcagcaaagcuuacagcaacuguuacccuuaugaugugccggauuaugccucccuuaggucacuaguugccucaucaggcacccuggaguuuaccaacgaaaacuucaauuggacuggagucgcucaggaugggaaaagcuaugcuugcaaaaggggaucuguuaacaguuucuuuaguagauugaauugguugcacaaauuagaauacaaauauccagcgcugaacgugacuaugccaaacaauggcaaauuugacaaauuguacauuugggggguucaccacccgagcacggacagugaccaaaccagccuauauguccgagcaucagggaaagucacagucucuaccaaaagaagccaacaaacuguaaucccggauaucggguauagaccauggguaaggggucuguccaguagaauaagcaucuauuggacaauaguaaaaccgggagacauacuuuugauuaauagcacagggaaucuaauugcuccucgggguuacuucaaaauacgaaaugggaaaagcucaauaaugaggucagaugcacccauuggcaacugcaguucugaaugcaucacuccaaauggaagcauucccaaugacaaaccuuuucaaaauguaaacaggaucacauauggggccugccccagauauguuaagcaaaacacucugaaauuggcaacagggaugcggaauguaccagagaaacaaacuagaggcauauucggcgcaaucgcagguuucauagaaaaugguugggagggaaugguagacgguugguacgguuucaggcaucagaauucugagggcacaggacaagcugcagaucuuaaaagcacucaagcagcaaucgaccaaaucaacgggaaacugaauagguuagucgagaaaacgaacgagaaauuccaucaaaucgaaaaagaauucucagaaguagaagggagaauucaggaccucgagaaauauguugaagacacuaaaauagaucucuggucuuacaaugcggagcuucuuguugcucuggagaaccaacauacaauugaucuaacugacucagaaaugaacaaacuauuugaaagaacaaggaagcaacugagggaaaaugcugaggacaugggcaaugguuguuucaaaauauaccacaaaugugacaaugccugcauagggucaaucagaaauggaacuuaugaccaugauguauacagagacgaagcauuaaacaaccgguuccagaucaaagguguugagcugaagucaggauacaaagauuggauccuauggauuuccuuugccauaucaugcuuuuugcuuuguguuguuuugcuuggguucaucaugugggccugccaaaaaggcaacauuaggugcaacauuugcauuuga

SEQ ID NO: 32983 - RNA, 1701 nt, Artificial Sequence
  derived and/or modified CDS sequence (wt) from hemagglutinin__InfluenzaA__ABG26901
augaagacuaucauugcuuugagcuacauuuuaugucugguuuucgcucaaaaacuucccggaaaugacaacagcacagcaacgcugugccugggacaccaugcagugccaaacggaacgcuagugaaaacaaucacgaaugaucaaauugaagugacuaaugcuacugagcugguucagaauuccccaacagguagaauaugcgacaguccucaccgaauccuugauggaaagaacugcacacugauagaugcucuauugggagacccucauugugauggcuuccaaaauaaggaaugggaccuuuuuguugaacgcagcaaagcuuacagcaacuguuacccuuaugaugugccggauuaugccucccuuaggucacuaguugccucaucaggcacccuggaguuuaccaacgaaaacuucaauuggacuggagucgcucaggaugggaaaagcuauucuugcaaaaggggaucuguuaacaguuucuuuaguagauugaauugguugcacaaaucagaauacaaauauccagcgcugaacgugacuaugccaaacaauggcaaauuugacaaauuguacauuugggggguucaccacccgagcacggacagugaccaaaccagccuauauguccgagcaucagggaaagucacagucucuaccaaaagaagccaacaaacuguaaucccggauaucggguauagaccauggguaaggggucuguccaguagaauaagcaucuauuggacaauaguaaaaccgggagacauacuuuugauuaauagcacagggaaucuaauugcuccucgggguuacuucaaaauacgaaaugggaaaagcucaauaaugaggucagaugcacccauuggcaacugcaguucugaaugcaucacuccaaauggaagcauucccaaugacaaaccuuuucaaaauguaaacaggaucacauauggggccugccccagauauguuaagcaaaacacucugaaauuggcaacagggaugcggaauguaccagagaaacaaacuagaggcauauucggcgcaaucgcagguuucauagaaaaugguugggagggaaugguagacgguugguacgguuucaggcaucagaauucugagggcacaggacaagcugcagaucuuaaaagcacucaagcagcaaucgaccaaaucaacgggaaacugaauagguuagucgagaaaacgaacgagaaauuccaucaaaucgaaaaagaauucucagaaguagaagggagaauucaggaccucgagaaauauguugaagacacuaaaauagaucucuggucuuacaaugcggagcuucuuguugcucuggagaaccaacauacaauugaucuaacugacucagaaaugaacaaacuauuugaaagaacaaggaagcaacugagagaaaaugcugaggacaugggcaaugguuguuucaaaauauaccacaaaugugacaaugccugcauagggucaaucagaaauggaacuuaugaccaugauguauacagagacgaagcauuaaacaaccgguuccagaucaaagguguugagcugaagucaggauacaaagauuggauccuauggauuuccuuugccauaucaugcuuuuugcuuuguguuguuuugcuuggguucaucaugugggccugccaaaaaggcaacauuaggugcaacauuugcauuuga

SEQ ID NO: 32984 - RNA, 1701 nt, Artificial Sequence
  derived and/or modified CDS sequence (wt) from hemagglutinin__InfluenzaA__ABG26912
augaagacuaucauugcuuugagcuacauuuuaugucugguuuucgcucaaaaacuucccggaaaugacaacagcacagcaacgcugugccugggacaccaugcagugccaaacggaacgcuagugaaaacaaucacgaaugaucaaauugaagugacuaaugcuacugagcugguucagaguuccucaacagguagaauaugcgacaguccucaccgaauccuugauggaaaaaacugcacacugauagaugcucuauugggagacccucauugugauggcuuccaaaauaaggaaugggaccuuuuuguugaacgcagcaaagcuuacagcaacuguuacccuuaugaugugccggauuaugccucccuuaggucacuaguugccucaucaggcacccuggaguuuaccaaggaaggcuucaauuggacuggagucgcucaggaugggaaaagcuaugcuugcaaaaggggaucuguuaacaguuucuuuaguagauugaauugguugcacaaauuagaauacaaauauccagcacugaacgugacuaugccaaacaaugacaaauuugacaaauuguacauuugggggguucaccacccgagcacggacagugaccaaaccagccuauauguucaagcaucagggagagucacagucucuaccaaaagaagccaacaaacuguaaucccgaauaucgggucuagacccuggguaagggguaucuccaguagaauaagcaucuauuggacaauaguaaaaccgggagacauacuuuugauuaacagcacagggaaucuaauugcuccucgggguuacuucaaaauacgaaaugggaaaagcucaauaaugaggucagaugcacccauuagcaacugcaauucugaaugcaucacuccaaauggaagcauucccaaugacaaaccuuuucaaaauguaaacaggaucacauauggggccugucccagauauguuaagcaaaacacucugaaguuggcaacagggaugcggaauguaccagagaaacaaacuagaggcauauucggcgcaaucgcagguuucauagaaaaugguugggagggaaugguagacgguugguacgguuucaggcaucaaaauucugagggcacaggacaagcagcagaucuuaaaagcacucaagcagcaaucgaccaaaucaacgggaagcugaauagguuaaucgagaaaacgaacgaaaaauuccaucaaaucgaaaaagaauucucagaaguagaagggagaauucaggaccucgagaaauauguugaagacacuaaaauagaucucuggucuuacaacgcggagcuucuuguugcccuggagaaccaacauacaauugaucuaacugacucagaaaugaacaaacuguuugaaagaacaaggaagcaacugagggaaaaugcugaggacaugggcaaugguugcuucaaaauauaccacaaaugugacaaugccugcauagggucaaucagaaauggaacuuaugaccaugauguauacagagacgaagcauuaaacaaccgguuccagaucaaagguguugagcugaagucaggauacaaagauuggauccuauggauuuccuuugccauaucaugcuuuuugcuuuguguuguuuugcugggguucaucaugugggccugccaaaaaggcaacauuaggugcaacauuugcauuuga

SEQ ID NO: 32985 - RNA, 1698 nt, Artificial Sequence
  derived and/or modified CDS sequence (wt) from hemagglutinin__InfluenzaA__ABG26945
augaaagcaaaacuacugguccuguuauguacauuuacagcuacauacgcagacacaauauguauaggcuaccaugccaacaacucaaccgacacuguugacacaguacuugagaagaaugugacagugacacacucugucaaccuacuugaggacagucacaauggaaaacuaugucuacuaaaaggaauagccccacuacaauuggguaauugcagcguugccggauggaucuuaggaaacccagaaugcgaauuacugauuuccaaggaaucaugguccuacauuguagaaacaccaaaucccgagaauggaacauguuacccaggguauuucgccgacuaugaggaacugagggagcaauugaguucaguaucuucauuugagagauucgaaauauuccccaaaggaagcucauggcccaaccacaccgugaccggaguaucagcaucaugcucccauaaugggaaaagcaguuuuuacagaaauuugcuauggcugacggggaagaaugguuuguacccaaaccugagcauguccuauguaaacaacaaagagaaagaaguccuugugcuaugggguguucaucacccaccuaacauagggaaccaaagggcccucuaccauacagaaaaugcuuaugucucuguagugucuucacauuauagcagaagauucaccccagaaauagccaaaagacccaaaguaagagaucaggaaggaagaaucaacuacuacuggacucugcuggaacccggggacacaauaauauuugaggcaaguggaaaucuaauagcgccaugguaugcuuucgcacugaguagaggcuuuggaucaggaaucaucaccucaaaugcaccaaugggugaaugugaugcgaagugucaaacaccucagggagcuauaaacaguagucuuccuuuccagaauguacacccaguuacaauaggagaguguccaaaguaugucaggagugcaaaauuaaggaugguuacaggacuaaggaacaucccauccauucaauccagagguuuguuuggagccauugccgguuucauugaagggggguggacuggaaugguagaugggugguaugguuaucaucaucagaaugagcaaggaucuggcuaugcugcagaucaaaaaagcacacaaaaugccauuaacgggauuacaaacaaggugaauucuguaauugagaaaaugaacacucaauucacagcugugggcaaagaauucaacaaauuagaaagaaggauggaaaacuuaaauaaaaaaguugaugauggguuucuagacauuuggacauauaaugcagaauuguugguucuacuggaaaaugaaaggacuuuggauuuccaugacuccaaugugaagaaucuguaugagaaaguaaaaagccaauuaaagaauaaugccaaagaaauaggaaacggguguuuugaauucuaucacaaguguaacaaugaaugcauggaaagugugaaaaauggaacuuaugacuauccaaaauauuccgaagaaucaaaguuaaacagggagaaaauugauggaguaaaauuggaaucaaugggagucuaucagauucuggcgaucuacucaacugucgccaguucccugguucuuuuggucucccugggggcaaucagcuucuggauguguuccaaugggucuuugcaguguagaauaugcaucuga

SEQ ID NO: 32986 - RNA, 1701 nt, Artificial Sequence
  derived and/or modified CDS sequence (wt) from hemagglutinin__InfluenzaA__ABG26956
augaagacuaucauugcuuugagcuacauuuuaugccugguuuucgcucaaaaacuucccggaaaugacaaccgcacggcaacgcugugucuggggcaucaugcagugccaaacggaacgcuagugaaaacaaucacgaaugaccaaauugaaguaacuaaugcuacugagcugguucagaguuccucaacagguagaauaugcgacaguccucaccaaauccuugauggagaaaacugcacacuaauagaugcucuauugggagacccccauugugauggcuuccaaaauaaggaaugggaccuuuuuguugaacgcagcaaagccuacagcaacuguuacccuuaugaugugccggauuaugucucccuuaggucacuaguugccucaucaggcacgcuggaguuuaacaaugaaagcuucaauuggacuggagucgcucagaauggaacaagcucugcuugcaaaaggagaucugauaaaaguuucuuuaguaaauugaauugguugcaccaauuaaaauauaaauauccagcacugaacgugacuaugccaaacaaugaaaaauuugacaaauuguacauuugggggguucaccacccggguacagacagugaccaaaucagccuauaugcucaagcaucagggagagucacagucucuaccaaaagaagccaacaaacuguaaucccgaauaucggaucuagacccuggguaaggggugucuccagcagaauaagcaucuauuggacaauaguaaaaccgggagacauacuuuugauuaacagcacagggaaucuaauugcuccucgggguuacuucaaaauacgaagugggaaaagcucaauaaugaggucagaugcacccauuggcaaaugcaauucugaaugcaucacuccaaauggaagcauucccaaugacaaaccauuucaaaauguaaacaggaucacauauggggccugucccagauauguuaagcaaaacacucugaaauuggcaacagggaugcggaaugugccagagaaacaaacuagaggcauauucggugcaaucgcgggcuucauagaaaaugguugggagggaaugauggacgguugguacgguuucaggcaucaaaauucugagggcacagggcaagcagcagaucuuaaaagcacucaagcagcaaucaaccaaaucaacgggaagcugaauagguuaaucgagaaaacgaacgagaaauuccaucaaauugaaaaagaauucucagaaguagaagggagaauucaggaccucgagaaauauguugaggacacuaaaauagaucucuggucguacaaugcggagcuucuuguugcccuggagaaccaacauacaauugaucuaacugacucagaaaugaacaaacuguuugaaagaacaaagaagcaacugagggaaaaugcugaggauaugggcaaugguuguuucaaaauauaccacaaaugugacaaugccugcauagggucaaucagaaauggaacuuaugaccaugauguauacagagacgaagcauugaacaaccgguuccagaucaaagguguugagcugaagucaggauacaaagauuggguccuauggauuuccuuugccauaucauguuuuuugcuuuguauuguuuugcugggguucaucaugugggccugccaaaaaggcaacauuaggugcaacauuugcauuuga

SEQ ID NO: 32987 - RNA, 1698 nt, Artificial Sequence
  derived and/or modified CDS sequence (wt) from hemagglutinin__InfluenzaA__ABG37120
augaaagcaaaacuacugguccuguuauguacauuuacagcuacauacgcagacacaauauguauaggcuaccaugccaacaacucaaccgacacuguugacacaguacuugagaagaaugugacagugacacacucugucaaccuacuugaggacagucacaauggaaaacuaugucuacuaaaaggaauagccccacuacaauuggguaauugcagcguugccggauggaucuuaggaaacccagaaugcgaauuacugauuuccaaggaaucaugguccuacauuguagaaacaccaaaucccgagaauggaacauguuacccaggguauuucgccgacuaugaggaacugagggagcaauugaguucaguaucuucauuugagagauucgaaauauuccccaaaggaagcucauggcccaaccacaccgugaccggaguaucagcaucaugcucccauaauggggaaagcaguuuuuacagaaauuugcuauggcugacggggaagaaugguuuguacccaaaccugagcauguccuauguaaacaacaaagagaaagaaguccuugugcuaugggguguucaucacccaccuaacauagggaaccaaagggcccucuaccauacagaaaaugcuuaugucucuguagugucuucacauuauagcagaagauucaccccagaaauagccaaaagacccaaaguaagagaucaggaaggaagaaucaacuacuacuggacucugcuggaacccggggacacaauaauauuugaggcaaauggaaaucuaauagcgccaugguaugcuuucgcacugaguagaggcuuuggaucaggaaucaucaccucaaaugcaccaaugggugaaugugaugcgaagugucaaacaccucagggagcuauaaacaguagucuuccuuuccagaauguacacccaguuacaauaggagaguguccaaaguaugucaggagugcaaaauuaaggaugguuacaggacuaaggaacaucccauccauucaauccagagguuuguuuggagccauugccgguuucauugaagggggguggacuggaaugguagaugggugguaugguuaucaucaucagaaugagcaaggaucuggcuaugcugcagaucaaaaaagcacacaaaaugccauuaacgggauuacaaacaaggugaauucuguaauugagaaaaugaacacccaauucacagcugugggcaaagaauucaacaaauuagaaagaaggauggaaaacuuaaauaaaaaaguugaugauggguuucuagacauuuggacauauaaugcagaauuguugguucuacuggaaaaugaaaggacuuuggauuuccaugacuccaaugugaagaaucuguaugagaaaguaaaaagccaauuaaagaauaaugccaaagaaauaggaaacggguguuuugaauucuaucacaaguguaacaaugaaugcauggaaagugugaaaaauggaacuuaugacuauccaaaauauuccgaagaaucaaaguuaaacagggagaaaauugauggaguaaaauuggaaucaaugggagucuaucagauucuggcgaucuacucaacugucgccaguucccugguucuuuuggucucccugggggcaaucagcuucuggauguguuccaaugggucuuugcaguguagaauaugcaucuga

SEQ ID NO: 32988 - RNA, 1701 nt, Artificial Sequence
  derived and/or modified CDS sequence (wt) from hemagglutinin__InfluenzaA__ABG37131
augaagacuaucauugcuuugagcuacauuucaugucugguuuucgcucaaaaacuucccggaaaugacaacagcacggcaacgcugugccugggacaccaugcagugccaaacgggacgcuagugaaaacaaucacgaaugaccaaauugaagugacuaaugcuacugagcugguucagaguuccucaacagguagaauaugcgacgguccucaccaaauccuugauggaaaaaacugcacacugauagaugcucuauugggagacccucauugugauggcuuccaaaauaaggaaugggaccuuuuuguugaacgcagcaaagcuuacagcaacuguuacccuuaugaugugccggauuaugccucccuuaggucacuaguugccucuuccggcacccuggaguuuaccaaugaaagcuucaauuggacuggagucgcucagaauggaacaagcuaugcuugcaaaaggggaucuguuaaaaguuucuuuaguagauugaauugguugcacaaauuagaauacaaauauccagcacuaaacgugacuaugccaaacaaugacaaauuugacaaauuguacauuugggggguucaccacccgaguacggacagugaccaaaccagccuauauguucaaucaucagggagagucacagucucuaccaaaagaagccaacaaacuguaaccccgaauaucgggucuagacccuggguaagggguaucuccagcagaauaagcaucuauuggacaauaguaaaaccgggagacauacuuuugauuaacagcacagggaaucuaauugcuccucgggguuacuucaaaauacgaagggggaaaagcucaauaaugaggucagaugcacccauugacaacugcaauucugaaugcaucacuccaaauggaagcauucccaaugacaaaccuuuucaaaauguaaacaggaucacauauggggccugucccagauauguuaagcaaaacacucugaaauuggcaacagggaugcggaauguaccagagaaacaaacuagaggcauauucggcgcaaucgcagguuucauagaaaaugguugggagggaaugguagacgguugguacgguuucaggcaucaaaauucugagggcacaggacaagcagcagaucuuaaaagcacucaagcagcaaucaaccaaaucaacgggaaacugaauagguuaaucgagaaaacgaacgagaaauuucaucaaaucgaaaaagaauucucagaaguagaagggagaauucaggaccucgagaaauauguugaagacacuaaaauagaucucuggucuuacaacgcggagcuucuuguugcccuggagaaucaacauacaauugaucuaacugacucagaaaugaacaaacuguuugaaagaacaaggaagcaacugagggaaaaugcugaggacaugggcaaugguugcuucaaaauauaccacaaaugugacaaugcaugcauagggucaaucagaaauggaacuuaugaccaugauguauacagagacgaagcauuaaacaaccgguuccagaucaaagguguugagcugaagucaggauacaaagauuggauccuauggauuuccuuugccauaucaugcuuuuugcuuuguguuguuuugcugggguucaucaugugggccugccaaaaaggcaacauuaggugcaacauuugcauuuga

SEQ ID NO: 32989 - RNA, 1701 nt, Artificial Sequence
  derived and/or modified CDS sequence (wt) from hemagglutinin__InfluenzaA__ABG37142
augaagacuauuauugcuuugagcuacauuuuaugucugguuuucgcucaaaaacuucccggaaaugacaacagcacggcaacgcugugccugggacaccaugcagugccaaacggaacgcuagugaaaacaaucacgaaugaccaaauugaagugacuaaugcuacugagcugguucaggguuccucaacagguagaauaugcgacaguccucaccgaauccuugauggaaaaaacugcacacugauagaugcucuauugggagacccucauugugauggcuuccaaaauaaggaaugggaccuuuuuguugaacgcagcaaagcuuacagcaacuguuacccuuaugaugugccggauuaugccucccuuaggucacuaguugccucaucaggcacccuggaguuuaacaaugaaagcuucaauuggacuggagucgcccagaauggaacaagcuaugcuugcaaaaggagaucuguuaaaaguuucuuuaguagauugaauugguugcacaaauuagaauacaaauauccagcacugaacgugacuaugccaaacaaugacaaauuugacaaauuguacauuugggggguucaccacccgaguacggacagugaccaaaccagccuauauguucaagcaucagggagagucacagucucuaccaaaagaagccaacaaacuguaaucccgaauaucggaucuagacccuggguaaggggugucuccagcagaauaagcauauauuggacaauaguaaaaccgggagacauacuuuugauuaacagcacagggaaucuaauugcuccucgggguuacuucaaaauacgaagugggaaaagcucaauaaugaggucagaugcacccauugacaacugcaauucugaaugcaucacuccaaauggaagcauucccaaugacaaaccauuucaaaauguaaacaggaucacauauggggccugucccagauauguuaagcaaaacacucugaaauuggcaacagggaugcggaauguaccagagaaacaaacuagaggcauauucggcgcaaucgcagguuucauagaaaaugguugggagggaaugguagacgguugguacgguuucaggcaucaaaauucugagggcacaggacaagcagcagaucuuaaaagcacucaagcagcaaucaaccaaaucaacggaaaacugaauagguuaaucgagaaaacgaacgagaaauuccaucaaaucgaaaaagaauucucagaaguagaagggagaauucaggaccucgagaaauauguugaagacacuaaaauagaucucuggucguacaacgcggagcuucuuguugcccuggagaaccaacauacaauugaucuaacugacucagaaaugaacaaacuguuugaaagaacaaggaagcaacugagggaaaaugcugaggacaugggcaaugguugcuucaaaauauaccacaaaugugacaaugccugcauagggucaaucagaaauggaacuuaugaccaugauguauacagagacgaagcauuaaacaaccgguuccagaucaaagguguugagcugaagucaggauacaaagauuggauccuauggauuuccuuugccauaucauguuuuuugcuuuguguuguuuuguugggguucaucaugugggccugccaaaaaggcaacauuaggugcaacauuugcauuuga

SEQ ID NO: 32990 - RNA, 1701 nt, Artificial Sequence
  derived and/or modified CDS sequence (wt) from hemagglutinin__InfluenzaA__ABG37164
augaagacuaucauugcuuugagcuacauuuuaugucugguuuucgcucaaaaacuucccggaaaugacaacagcacagcaacgcugugccugggacaccaugcagugccaaacggaacgcuagugaaaacaaucacgaaugaucaaauugaagugacuaaugcuacugagcugguucagaguuccucaacagguagaauaugcgacaguccucaccgaauccuugauggaaaaaauugcacacugauagaugcucuauugggagacccucauugugaugacuuccaaaauaaggaaugggaccuuuuuguugaacgcagcaaagcuuacagcaacuguuacccuuaugaugugccggauuaugccucccuuaggucacuaguugccucaucaggcacccuggaguuuaccaaggaaggcuucaauuggacuggagucgcucaggaugggaaaagcuaugcuugcaaaaggggaucuguuaacaguuucuuuaguagauugaauugguugcacaaauuagaauacaaauauccagcacugaacgugacuaugccaaacaaugacaaauuugacaaauuguacauuugggggguucaccacccgagcacggacagugaccaaaccagccuauauguucaagcaucagggagagucacagucucuaccaaaagaagccaacaaacuguaaucccgaauaucgggucuagacccuggguaagggguaucuccaguagaauaagcaucuauuggacaauaguaaaaccgggagacauacuuuugauuaacagcacagggaaucuaauugcuccucgggguuacuucaaaauacgaaaugggaaaagcucaauaaugaggucagaugcacccauuggcaacugcaauucugaaugcaucacuccaaauggaagcauucccaaugacaaaccuuuucaaaauguaaacaggaucacauauggggccugucccagauauguuaagcaaaacacucugaaguuggcaacagggaugcggaauguaccagagaaacaaacuagaggcauauucggcgcaaucgcagguuucauagaaaaugguugggagggaaugguagacgguugguacgguuucaggcaucaaaauucugagggcacaggacaagcagcagaucuuaaaagcacucaagcagcaaucgaccaaaucaacgggaagcugaauaggcuaaucgagaaaacgaacgaaaaauuccaucaaaucgaaaaagaauucucagaaguagaagggagaauucaggaccucgagaaauauguugaagacacuaaaauagaucucuggucuuacaacgcggagcuucuuguugcccuggagaaccaacauacaauugaucuaacugacucagaaaugaacaaacuguuugaaagaacaaggaagcaacugagggaaaaugcugaggacaugggcaaugguugcuucaaaauauaccacaaaugugacaaugccugcauagggucaaucagaaauggaacuuaugaccaugauguauacagagacgaagcauuaaacaaccgguuccagaucaaagguguugagcugaagucaggauacaaagauuggauccuauggauuuccuuugccauaucaugcuuucugcuuuguguuguuuugcugggguucaucaugugggccugccaaaaaggcaacauuaggugcaacauuugcauuuga

SEQ ID NO: 32991 - RNA, 1701 nt, Artificial Sequence
  derived and/or modified CDS sequence (wt) from hemagglutinin__InfluenzaA__ABG37175
augaagacuaucauugcuuugagcuacauuuuaugucagguuuucgcuaaaaaacuucccggaaaugacaacagcacagcaacgcugugccugggacaccaugcagugccaaacggaacgcuagugaaaacaaucacgaaugaucaaauugaagugacuaaugcuacugagcugguucagaguuccucaacagguagaauaugcgacaguccucaccgaauccuugauggaaaaaacugcacacugauagaugcucuauugggagacccucauugugauggcuuccaaaauaaggaaugggaccuuuuuguugaacgcagcaaagcuuacagcaacuguuacccuuaugaugugccggauuaugccucccuuaggucacuaguugccucaucaggcacccuggaguuuaccaaugaaggcuucaauuggacuggagucgcucaggaugggaaaagcuauucuugcaaaaggggaucuguuaacaguuucuuuaguagauugaauugguugcacaaauuagaauacaaauauccagcacugaacgugacuaugccaaacaaugacaaauuugauaaauuguacauuugggggguucaccacccgagcacggacagugaccaaaccagccuauauguucaagcaucagggagagucacagucucuaccaaaagaagccaacaaacuguaaucccgaauaucggguccagacccugggugaggggcaucuccaguagaauaagcaucuauuggacaauaguaaaaccgggagacauacuuuugauuaacagcacagggaaucuaauugcuccucgggguuacuucaaaauacgaaaugggaaaagcucaauaaugaggucagaugcacccauugacaacugcaauucugaaugcaucacuccaaauggaagcauucccaaugacaaaccuuuucaaaauguaaacaggaucacauauggggccugucccagauauguuaagcaaaacacucugaaauuggcaacagggaugcggaauguaccagagaaacaaacuagaggcauauucggcgcaaucgcagguuucauagaaaaugguugggagggaaugguagacgguugguacgguuucaggcaucaaaauucugagggcacaggacaagcagcagaucuuaaaagcacucaagcagcaaucgaucaaaucaacgggaaacugaauagguuaaucgagaaaacgaacgagaaauuccaucaaaucgaaaaagaauucucagaaguagaagggagaauucaggaccucgagaaauauguugaagacacuaaaauagaucucuggucuuacaacgcggagcuucuuguugcccuggagaaucaacauacaauugaucuaacugacucagaaaugaacaaacuguuugaaagaacaaggaagcaacugagggaaaaugcugaggacaugggcaaugguugcuucaaaauauaccacaaaugugacaaugccugcauagggucaaucagaaauggaacuuaugaccaugauguauacagagacgaagcauuaaacaaccgguuccagaucaaagguguugagcugaagucgggauacaaagauuggauccuauggauuucuuuugccauaucaugcuuuuugcuuuguguuguuuugcugggguucaucaugugggccugccaaaaaggcaacauuaggugcaacauuugcauuuga

SEQ ID NO: 32992 - RNA, 1701 nt, Artificial Sequence
  derived and/or modified CDS sequence (wt) from hemagglutinin__InfluenzaA__ABG37186
augaagacuaucauugcuuugagcuacauuuuaugucagguuuucgcucaaaaacuucccggaaaugacaacagcacagcaacgcugugccugggacaccaugcagugccaaacggaacgcuagugaaaacaaucacgaaugaucaaauugaagugacuaaugcuacugagcugguucagaguuccucaacagguagaauaugcgacaguccucaccgaauccuugauggaaaaaacugcacacugauagaugcucuauugggagacccucauugugauggcuuccaaaauaaggaaugggaccuuuuuguugaacgcagcaaagcuuacagcaacuguuacccuuaugaugugccggauuaugccucccuuaggucacuaguugccucaucaggcacccuggaguuuaccaaugaaggcuucaauuggacuggagucgcucaggaugggaaaagcuaugcuugcaaaaggggaucuguuaacaguuucuuuaguagauugaauugguugcacaaauuagaauacaaauauccagcacugaacgugacuaugccaaacaaugacaaauuugacaaauuguacauuugggggguucaccacccgagcacggacagugaccaaaccagccuauauguucaagcaucagggagagucacagucucuaccaaaagaagccaacaaacuguaaucccgaauaucggguccagacccugggugaggggcaucuccaguagaauaagcaucuauuggacaauaguaaaaccgggagacauacuuuugauuagcagcacagggaaucuaauugcuccucgggguuacuucaaaauacgaaaugggaaaagcucaauaaugaggucagaugcacccauugacaacugcaauucugaaugcaucacuccaaauggaagcauucccaaugacaaaccuuuucaaaauguaaacagggucacauauggggccugucccagauauguuaagcaaaacacucugaaauuggcaacagggaugcggaauguaccagagaaacaaacuagaggcauauucggcgcaaucgcagguuucauagaaaaugguugggagggaaugguagacgguugguacgguuucaggcaucaaaauucugagggcacaggacaagcagcagaucuuaaaagcacucaagcagcaaucgaucaaaucaacgggaaacugaauagguuaaucgagaaaacaaacgagaaauuccaucaaaucgaaaaagaauucucagaaguagaagggagaauucaggaccucgagaaauauguugaagacacuaaaauagaucucuggucuuacaacgcggagcuucuuguugcccuggagaaucaacauacaauugaucuaacugacucagaaaugaacaaacuguuugaaagaacaaggaagcaacugagggaaaaugcugaggacaugggcaaugguugcuucaaaauauaccacaaaugugacaaugccugcauagggucaaucagaaauggaacuuaugaccaugauguguacaaagacgaagcauuaaacaaccgguuccagaucaaagguguugugcugaagucgggauacaaagauuggauccuauggauuucuuuugccauaucaugcuuuuugcuuuguguuguuuugcugggguucaucaugugggccugccaaaaaggcaacauuaggugcaacauuugcauuuga

SEQ ID NO: 32993 - RNA, 1701 nt, Artificial Sequence
  derived and/or modified CDS sequence (wt) from hemagglutinin__InfluenzaA__ABG37197
augaagacuaucauugcuuugagcuacauuuuaugucagguuuucgcucaaaaacuucccggaaaugacaacagcacagcaacgcugugccugggacaccaugcagugccaaacggaacgcuagugaaaacaaucacgaaugaucaaauugaagugacuaaugcuacugagcugguucagaguuccucaacagguagaauaugcgacaguccucaccgaauccuugauggaaaaaacugcacacugauagaugcucuauugggagacccucauugugauggcuuccaaaauaaggaaugggaccuuuuuguugaacgcagcaaagcuuacagcaacuguuacccuuaugaugugccggauuaugccucccuuaggucacuaguugccucaucaggcacccuggaguuuaccaaugaaggcuucaauuggaauggagucgcucaggaugggaaaagcuaugcuugcaaaaggggaucuguuaaaaguuucuuuaguagauugaauugguugcacaaauuagaauacaaauauccagcacugaacgugacuaugccaaacaaugacaaauuugauaaauuguacauuugggggguucaccacccgagcacggacagugaccaaaccagccuauauguucaagcaucagggagagucacagucucuaccaaaagaagccaacaaacuguaaucccgaauaucggguccagacccugggugaggggcaucuccaguagaauaagcaucuauuggacaauaguaaaaccgggagacauacuuuugauuaacagcacagggaaucuaauugcuccucgggguuacuucaaaauacgaaaugggaaaagcucaauaaugaggucagaugcacccauugacaacugcaauucugaaugcaucacuccaaauggaagcauucccaaugacaaaccuuuucaaaauguaaacaggaucacauauggggccugucccagauauguuaagcaaaacacucugaaauuggcaacagggaugcggaauguaccagagaaacaaacuagaggcauauucggcgcaaucgcagguuucauagaaaaugguugggagggaaugguagacgguugguacgguuucaggcaucaaaauucugagggcacaggacaagcagcagaucuuaaaagcacucaagcagcaaucgaucaaaucaacgggaaacugaauagguuaaucgagaaaacgaacgagaaauuccaucaaaucgaaaaagaauucucagaaguagaagggagaauucaggaccucgagaaauauguugaagacacuaaaauagaucucuggucuuacaacgcggagcuucuuguugcccuggagaaucaacauacaauugaucuaacugacucagaaaugaacaaacuguuugaaagaacaaggaagcaacugagggaaaaugcugaggacaugggcaaugguugcuucaaaauauaccacaaaugugacaaugccugcauagggucaaucagaaauggaacuuaugaccaugauguauacagagacgaagcauuaaacaaccgguuccagaucaaagguguugagcugaagucgggauacaaagauuggauccuauggauuucuuuugccauaucaugcuuuuugcuuuguguuguuuugcugggguucaucaugugggccugccaaaaaggcaacauuaggugcaacauuugcauuuga

SEQ ID NO: 32994 - RNA, 1701 nt, Artificial Sequence
  derived and/or modified CDS sequence (wt) from hemagglutinin__InfluenzaA__ABG37208
augaagacuaucauugcuuugagcuacauuuccugucugguuuucgcccaaaaacuucccggaaaugacaacagcacagcaacgcugugccugggacaucaugcaguaccaaacggaacgcuagugaaaacaaucacgaaugaucagauugaagugacuaaugcuacugagcugguccaaaguuccucaacagguagaauaugcgacaguccucaccgaauccuugauggaaaaaacugcacacugauagaugcucuauugggagacccucauugugauggcuuccaaaaugagaaaugggaucuuuuuguugaacgcagcaaagcuuucagcaacugcuacccuuaugaugugccggauuaugccucccuuaggucacuaguugccucaucaggcacccuggaguuuaucaaugaaggcuucaauuggacuggagucacucagagugggggaagcuaugcuugcaaaaggggaucuguuaacaguuucuucaguagauugaauugguuguauaagucagaaagcaaauauccagcgcugaacgugacuaugccaaacaauggcaaauuugacaaauuguacauuugggggguucaccacccuagcacggacaaagaacaaaccaaccuauauguucgagcaucagggagagucacagucucuaccaagagaagccagcaaacuguaaucccgaauaucgggccuagacccuggguaaggggucugucuaguagaauaaguaucuauuggacaauaguaaaaccgggagacauacuguuaauuaauagcacugggaaccuaauugcuccccgggguuacuucaaaauacgcacugggaaaagcucaauaaugaggucagaugcaccuauuggcaccugcaguucuggaugcaucacuccaaauggaagcauucccaaugacaaacccuuucaaaaugugaacaagaucacauauggggcaugucccagguauguuaagcagaacacucugaaguuggcaacagggaugcggaauguaccugaaaaacaaacuagaggcauauucggcgcaauagcagguuucauagaaaaugguugggagggaaugguagacgguugguacgguuucaggcaucaaaauucugagggcacaggacaagcagcagaucuuaaaagcacucaagcagcaaucgaccaaaucaacgggaaacugaauagguuaaucgagaaaacgaacgagaaauuccaucaaaucgaaaaggaauucucagaaguagaagggagaauucaggaccucgagaaguauguugaagacacuaaaauagaucucuggucuuacaacgcggagcuucuuguugcccuggagaaccaacauacaauugauaugacugacucagaaaugaacaaacuguuugaaaaaacaaggaagcaacugagggaaaaugcugaggacaugggcaaugguugcuucaaaauauaccacaaaugugacaaugcuugcauagggucaaucagaaauggaacuuaugaccaugauguauacagagacgaagcauuaaacaaccgguuucagaucaaagguguugagcugaagucaggauacaaagacuggauccuauggauuuccuuugccauaucaugcuuuuugcucuguguuguuuugcugggguucauaaugugggccugccaaaaaggcaacauuaggugcaacauuugcauuuga

SEQ ID NO: 32995 - RNA, 1701 nt, Artificial Sequence
  derived and/or modified CDS sequence (wt) from hemagglutinin__InfluenzaA__ABG37230
augaagacuaucauugcuuugagcuacauuuuaugucugguuuucgcucaaaaacuucccggaaaugacaacagcacagcaacgcugugccugggacaccaugcagugccaaacggaacgcuagugaaaacaaucacgaaugaucaaauugaagugacuaaugcuacugagcugguucagaguuccucaacagguagaauaugcgacaguccucaccgaauccuugauggaaaaaacugcacacugauagaugcucuauugggagacccucauugugauggcuuccaaaauaaggaaugggaccuuuuuguugaacgcagcaaagcuuacagcaauuguuacccuuaugaugugccggauuaugccucccuuaggucacuaguugccucaucaggcacccuggaguuuaucaaugaagacuucaauuggacuggagucgcucaggaugggaaaagcuaugcuugcaaaaggggaucuguuaacaguuucuuuaguagauugaauugguugcaccaaucaaaauacaaauauccagagcugaacgugacuaugccaaacaauggcaaauuugacaaauuguacauuugggggguucaccacccgagcacggacagugaccaaaccagccuauaugcucgagcaucagggagagucacagucucuaccaaaagaagccaacaaacuguaaucccgaauaucggguuuagacccuggguaaggggucuguccaguagaauaagcaucuauuggacaauaguaaaaccgggagacauacuuuugauuaauagcacagggaaucuaauugcuccucgggguuacuucaaaauacgaaaugggaaaagcucaauaaugaggucagaugcaccaauuggcaacugcaguucugaaugcaucacuccaaauggaagcauucccaaugacaaaccuuuucaaaauguaaacaggaucacauauggggccugccccagauauguuaagcaaaacacucugaaguuggcaacagggaugcggaauguaccagagaaacaaacuagaggcauauucggcgcaaucgcagguuucauagaaaaugguugggagggaaugguagacgguugguacgguuucaggcaucaaaauucugagggcacaggacaagcagcagaucuuaaaagcacucaagcagcaaucgaccaaaucaacgggaaacugaauagguuaaucgagaaaacgaacgagaaauuccaucaaaucgaaaaagaauucucagaaguagaagggagaauucaggaccuugagaaauauguugaagacacuaaaauagaucucuggucuuacaacgcggggcuucuuguugcccuggagaaccaacauacaauugaucuaacugacucagaaaugaacaaacuguuugaaagaacaaggaagcaacugagggaaaaugcugaggacaugggcaaugguugcuucaaaauauaccacaaaugugacaaugccugcauagggucaaucagaaauggaacuuaugaccaugauguauacagagacgaagcauuaaacaaccgguuccagaucaaagguguugagcugaagucaggauacaaagauuggauccuauggauuuccuuugccauaucaugcuuuuugcuuuguguuguuuugcugggguucaucaugugggccugccaaaaaggcaacauuaggugcaacauuugcauuuga

SEQ ID NO: 32996 - RNA, 1701 nt, Artificial Sequence
  derived and/or modified CDS sequence (wt) from hemagglutinin__InfluenzaA__ABG37241
augaagacuaucauugcuuugagcuacauuuuaugucugguuuucgcucaaaaacuucccggaaaugacaacagcacagcaacgcugugccugggacaccaugcagugccaaacggaacgcuagugaaaacaaucacgaaugaucaaauugaagugacuaaugcuacugagcugguucagaguuccccaacagguagaauaugcgacaguccucaccgaauccuugauggaaagaacugcacacugauagaugcucuauugggagacccucauugugauggcuuucaaaauaaggaaugggaccuuuuuguugaacgcagcaaagcuuacagcaacuguuacccuuaugaugugccggauuaugccucccuuaggucacuaguugccucaucaggcacccuggaauuuaccaacgaaaacuucaauuggacuggagucgcucaggaugggaaaagcuaugcuugcaaaaggggaucuguuaacaguuucuuuaguagauugaauugguugcacaaauuagaauacaaauauccagcgcugaacgugacuaugccaaacaauggcaaauuugacaaauuguacauuugggggguucaccacccgagcacggacagugaccaaaccagccuauauguccgagcaucagggaaagucacagucucuaccaaaagaagccaacaaacuguaaucccggauaucggguauagaccauggguaaggggucuguccaguagaauaagcaucuauuggacaauaguaaaaccgggagacauacuuuugauuaauagcacagggaaucuaauugcuccucgggguuacuucaaaauacgaaaugggaaaagcucaauaaugaggucagaugcacccauuggcaacugcaguucugaaugcaucacuccaaauggaagcauucccaaugacaaaccuuuucaaaauguaaacaggaucacauauggggccugccccagauauguuaagcaaaacacucugaaauuggcaacagggaugcggaauguaccagagaaacaaacuagaggcauauucggcgcaaucgcagguuucauagaaaaugguugggagggaaugguagacgguugguacgguuucaggcaucagaauucugagggcacaggacaagcugcagaucuuaaaagcacucaagcagcaaucgaccaaaucaacgggaaacugaauagguuagucgagaaaacgaacgagaaauuccaucaaaucgaaaaagaauucucagaaguagaagggagaauucaggaccucgagaaauauguugaagacacuaaaauagaucucuggucuuacaaugcggagcuucuuguugcucuggagaaccaacauacaauugaucuaacugacucagaaaugaacaaacuauuugaaagaacaaggaagcaacugagggaaaaugcugaggacaugggcaaugguuguuucaaaauauaccacaaaugugacaaugccugcauagggucaaucagaaauggaacuuaugaccaugauguauacagagacgaagcauuaaacaaccgguuccagaucaaagguguugagcugaagucaggauacaaagauuggauccuauggauuuccuuugccauaucaugcuuuuugcuuuguguuguuuugcuuggguucaucaugugggccugccaaaaaggcaacauuaggugcaacauuugcauuuga

SEQ ID NO: 32997 - RNA, 1701 nt, Artificial Sequence
  derived and/or modified CDS sequence (wt) from hemagglutinin__InfluenzaA__ABG37252
augaagacuaucauugcuuugagcuacauuuuaugucugguuuucgcucaaaaacuuaccggaaaugacaacagcacagcaacgcugugccugggacaccaugcagugccaaacggaacgcuagugaaaacaaucacgaaugaucaaauugaagugacuaaugcuacugagcugguucagaguuccccaacagguagaauaugcgacaguccucaccgaauccuugauggaaagaacugcacacugauagaugcucuauugggagacccucauugugauggcuuccaaaauaaggaaugggaccuuuuuguugaacgcagcaaagcuuacagcaacuguuacccuuaugaugugccggauuaugccucccuuaggucacuaguugccucaucaggcacccuggaguuuaccaacgaaaacuucaauuggacuggagucgcucaggaugggaaaagcuaugcuugcaaaaggggaucuguuaacaguuucuuuaguagauugaauugguugcacaaauuagaauacaaauauccagcgcugaacgugacuaugccaaacaauggcaaauuugacaaauuguacauuugggggguucaccacccgagcacggacagugaccaaaccagccuauauguccgagcaucagggaaagucacagucucuaccaaaagaagccaacaaacuguaaucccggauaucggguauagaccauggguaaggggucuguccaguagaauaagcaucuauuggacaauaguaaaaccgggagacauacuuuugauuaauagcacagggaaucuaauugcuccucgggguuacuucaaaauacgaaaugggaaaagcucaauaaugaggucagaugcacccauuggcaacugcaguucugaaugcaucacuccaaauggaagcauucccaaugacaaaccuuuucaaaauguaaacaggaucacauauggggccugccccagauauguuaagcaaaacacucugaaauuggcaacagggaugcggaauguaccagagaaacaaacuagaggcauauucggcgcaaucgcagguuucauagaaaaugguugggagggaaugguagacgguugguacgguuucaggcaucagaauucugagggcacaggacaagcugcagaucuuaaaagcacucaagcagcaaucgaccaaaucaacgggaaacugaauagguuagucgagaaaacgaacgagaaauuccaucaaaucgaaaaagaauucucagaaguagaagggagaauucaggaccucgagaaauauguugaagacacuaaaauagaucucuggucuuacaaugcggagcuucuuguugcucuggagaaccaacauacaauugaucuaacugacucagaaaugaacaaacuauuugaaagaacaaggaagcaacugagggaaaaugcugaggacaugggcaaugguuguuucaaaauauaccacaaaugugacaaugccugcauagggucaaucagaaauggaacuuaugaccaugauguauacagagacgaagcauuaaacaaccgguuccagaucaaagguguugagcugaagucaggauacaaagauuggauccuauggauuuccuuugccauaucaugcuuuuugcuuuguguuguuuugcuuggguucaucaugugggccugccaaaaaggcaacauuaggugcaacauuugcauuuga

SEQ ID NO: 32998 - RNA, 1701 nt, Artificial Sequence
  derived and/or modified CDS sequence (wt) from hemagglutinin__InfluenzaA__ABG37263
augaagacuaucauugcuuugagcuacauuuuaugucugguuuucgcucaaaaacuucccggaaaugacaacagcacagcaacgcugugccugggacaccaugcagugccaaacggaacgcuagugaaaacaaucacgaaugaucaaauugaagugacuaaugcuacugagcugguucagaguuccucaacagguagaauaugcgacaguccucaccgaauccuugauggaaaaaacugcacacugauagaugcucuauugggagacccucauugugauggcuuccaaaauaaggaaugggaccuuuuuguugaacgcagcaaagcuuacagcaacuguuacccuuaugaugugccggauuaugccucccuuaggucacuaguugccucaucaggcacccuggaguuuaccaaggaaggcuucaauuggacuggagucgcucaggaugggaaaagcuaugcuugcaaaaggggaucuguuaacaguuucuuuaguagauugaauugguugcacaaauuagaauacaaauauccagcacugaacgugacuaugccaaacaaugacaaauuugacaaauuguacauuugggggguucaccacccgagcacggacagugaccaaaccagccuauauguucaagcaucagggagagucacagucucuaccaaaagaagccaacaaacuguaaucccgaauaucgggucuagacccuggguaagggguaucuccaguagaauaagcaucuauuggacaauaguaaaaccgggagacauacuuuugauuaacagcacagggaaucuaauugcuccucgggguuacuucaaaauacgaaaugggaaaagcucaauaaugaggucagaugcacccauuggcaacugcaauucugaaugcaucacuccaaauggaagcauucccaaugacaaaccuuuucaaaauguaaacaggaucacauauggggccugucccagauauguuaagcaaaacacucugaaguuggcaacagggaugcggaauguaccagagaaacaaacuagaggcauauucggcgcaaucgcagguuucauagaaaaugguugggagggaaugguagacgguugguacgguuucaggcaucaaaauucugagggcacaggacaagcagcagaucuuaaaagcacucaagcagcaaucgaccaaaucaacgggaagcugaauagguuaaucgagaaaacgaacgaaaaauuccaucaaaucgaaaaagaauucucagaaguagaagggagaauucaggaccucgagaaauauguugaagacacuaaaauagaucucuggucuuacaacgcggagcuucuuguugcccuggagaaccaacauacaauugaucuaacugacucagaaaugaacaaacuguuugaaagaacaaggaagcaacugagggaaaaugcugaggacaugggcaaugguugcuucaaaauauaccacaaaugugacaauaccugcauagggucaaucagaaauggaacuuaugaccaugauguauacagagacgaagcauuaaacaaccgguuccagaucaaagguguugagcugaagucaggauacaaagauuggauccuauggauuuccuuugccauaucaugcuuuuugcuuuguguuguuuugcugggguucaucaugugggccugccaaaaaggcaacauuaggugcaacauuugcauuuga

SEQ ID NO: 32999 - RNA, 1701 nt, Artificial Sequence
  derived and/or modified CDS sequence (wt) from hemagglutinin__InfluenzaA__ABG37274
augaagacuaucauugcuuugagcuacauuuuaugucugguuuucgcucaaaaacuucccggaaaugacaacagcacagcaacgcugugccugggacaccaugcagugccaaacggaacgcuagugaaaacaaucacgaaugaucaaauugaagugacuaaugcuacugagcugguucagaguuccccaacagguagaauaugcgacaguccucaccgaauccuugauggaaagaacugcacacugauagaugcucuauugggagacccucauugugauggcuuccaaaauaaggaaugggaccuuuuuguugaacgcagcaaagcuuacagcaacuguuacccuuaugaugugccggauuaugccucccuuaggucacuaguugccucaucaggcacccuggaguuuaccaacgaaaacuucaauuggacuggagucgcucaggaugggaaaagcuaugcuugcaaaaggggaucuguuaacaguuucuuuaguagauugaauugguugcacaaauuagaauacaaauauccagcgcugaacgugacuaugccaaacaauggcaaauuugacaaauuguacauuugggggguucaccacccgagcacggacagugaccaaaucagccuauauguccgagcaucagggaaagucacagucucuaccaaaagaagccaacaaacuguaaucccggauaucggguauagaccauggguaaggggucuguccaguagaauaagcaucuauuggacaauaguaaaaccgggagacauacuuuugauuaguagcacagggaaucuaauugcuccucgggguuacuucaaaauacgaaaugggaaaagcucaauaaugaggucagaugcacccauuggcaacugcaguucugaaugcaucacuccaaauggaagcauucccaaugacaaaccuuuucaaaauguaaacaggaucacauauggggccugccccagauauguuaagcaaaacacucugaaauuggcaacagggaugcggaauguaccagagaaacaaacuagaggcauauucggcgcaaucgcagguuucauagaaaaugguugggagggaaugguagacgguugguacgguuucaggcaucagaauucugagggcacaggacaagcugcagaucuuaaaagcacucaagcagcaaucgaccaaaucaacgggaaacugaauagguuagucgagaaaacgaacgagaaauuccaucaaaucgaaaaagaauucucagaaguagaagggagaauucaggaccucgagaaauauguugaagacacuaaaauagaucucuggucuuacaaugcggagcuucuuguugcucuggagaaccaacauacaauugaucuaacugacucagaaaugaacaaacuauuugaaagaacaaggaagcaacugagggaaaaugcugaggacaugggcaaugguuguuucaaaauauaccacaaaugugacaaugccugcauagggucaaucagaaauggaacuuaugaccaugauguauacagagacgaagcauuaaacaaccgguuccagaucaaagguguugagcugaagucaggauacaaagauuggauccuauggauuuccuuugccauaucaugcuuuuugcuuuguguuguuuugcuuggguucaucaugugggccugccaaaaaggcaacauuaggugcaacauuugcauuuga

SEQ ID NO: 33000 - RNA, 1701 nt, Artificial Sequence
  derived and/or modified CDS sequence (wt) from hemagglutinin__InfluenzaA__ABG37285
augaagacuaucauugcuuugagcuacauuuuaugucugguuuucgcucaaaaacuucccggaaaugacaacagcacagcaacgcugugccugggacaccaugcagugccaaacggaacgcuagugaaaacaaucacgaaugaucaaauugaagugacuaaugcuacugagcugguucagaguuccccaacagguagaauaugcgacaguccucaccgaauccuugauggaaagaacugcacacugauagaugcucuauugggagacccucauugugauggcuuccaaaauaaggaaugggaccuuuuuguugaacgcagcaaagcuuacagcaacuguuacccuuaugaugugccggauuaugccucccuuaggucacuaguugccucaucaggcacccuggaguuuaccaacgaaaacuucaauuggacuggagucgcucaggaugggaaaagcuaugcuugcaaaaggggaucuguuaacaguuucuuuaguagauugaauugguugcacaaauuagacuacaaauauccagcgcugaacgugacuaugccaaacaauggcaaauuugacaaauuguacauuugggggguucaccacccgagcacggacagugaccaaaccagccuauauguccgagcaucagggaaagucacagucucuaccaaaagaagccaacaaacuguaaucccggauaucggguauagaccauggguaaggggucuguccaguagaauaagcaucuauuggacaauaguaaaaccgggagacauacuuuugauuaauagcacagggaaucuaauugcuccucgggguuacuucaaaauacgaaaugggaaaagcucaauaaugaggucagaugcacccauuggcaacugcaguucugaaugcaucacuccaaauggaagcauucccaaugacaaaccuuuucaaaauguaaacaggaucacauauggggccugccccagauauguuaagcaaaacacucugaaauuggcaacagggaugcggaauguaccagagaaacaaacuagaggcauauucggcgcaaucgcagguuucauagaaaaugguugggagggaaugguagacgguugguacgguuucaggcaucagaauucugagggcacaggacaagcugcagaucuuaaaagcacucaagcagcaaucgaccaaaucaacgggaaacugaauagguuagucgagaaaacgaacgagaaauuccaucaaaucgaaaaagaauucucagaaguagaagggagaauucaggaccucgagaaauauguugaagacacuaaaauagaucucuggucuuacaaugcggagcuucuuguugcucuggagaaccaacauacaauugaucuaacugacucagaaaugaacaaacuauuugaaagaacaaggaagcaacugagggaaaaugcugaggacaugggcaaugguuguuucaaaauauaccacaaaugugacaaugccugcauagggucaaucagaaauggaacuuaugaccaugauguauacagagacgaagcauuaaacaaccgguuccagaucaaagguguugagcugaagucaggauacaaagauuggauccuauggauuuccuuugccauaucaugcuuuuugcuuuguuuuguuuugcuuggguucaucaugugggccugccaaaaaggcaacauuaggugcaacauuugcauuuga

SEQ ID NO: 33001 - RNA, 1701 nt, Artificial Sequence
  derived and/or modified CDS sequence (wt) from hemagglutinin__InfluenzaA__ABG37296
augaagacuaucauugcuuugagcuacauuuuaugucugguuuucgcucaaaaacuucccggaaaugacaacagcacagcaacgcugugccugggacaccaugcagugccaaacggaacgcuagugaaaacaaucacgaaugaucaaauugaagugacuaaugcuacugagcugguucagaguuccucaacagguagaauaugcgacaguccucaccgaauccuugauggaaaaaacugcacacugauagaugcucuauugggagacccucauugugauggcuuccaaaauaaggaaugggaccuuuuuguugaacgcagcaaagcuuacagcaacuguuacccuuaugaugugccggauuaugccucccuuaggucacuaguugccucaucaggcacccuggaguuuaccaaggaaggcuucaauuggacuggagucgcucaggaugggaaaagcuaugcuugcaaaaggggaucuguuaacaguuucuuuaguagauugaauugguugcacaaauuagaauacaaauauccagcacugaacgugacuaugccaaacaaugacaaauuugacaaauuguacauuugggggguucaccacccgagcacggacagugaccaaaccagccuauauguucaagcaucagggagagucacagucucuaccaaaagaagccaacaaacuguaaucccgaauaucgggucuagacccuggguaagggguaucuccaguagaauaagcaucuauuggacaauaguaaaaccgggagacauacuuuugauuaacagcacagggaaucuaauugcuccucgggguuacuucaaaauacgaaaugggaaaagcuccauaaugaggucagaugcacccauuggcaacugcaauucugaaugcaucacuccaaauggaagcauucccaaugacaaaccuuuucaaaauguaaacaggaucacauauggggccugucccagauauguuaagcaaaacacucugaaguuggcaacagggaugcggaauguaccagagaaacaaacuagaggcauauucggcgcaaucgcagguuucauagaaaaugguugggagggaaugguagacgguugguacgguuucaggcaucaaaauucugagggcacaggacaagcagcagaucuuaaaagcacucaagcagcaaucgaccaaaucaacgggaaacugaauagguuaauugagaaaacgaacgagaaauuccaucaaaucgaaaaagaauucucagaaguagaagggagaauucaggaccucgagaaauauguugaagacacuaaaauagaucucuggucuuacaacgcggagcuucuuguugcccuggagaaccaacauacaauugaucuaacugacucagaaaugaacaaacuguuugaaagaacaaggaagcaacugagggaaaaugcugaggacaugggcaaugguugcuucaaaauauaccacaaaugugacaaugccugcauagggucaaucagaaauggaacuuaugaccaugauguauacagagacgaagcauuaaacaaccgguuccagaucaaagguguugagcugaagucaggguacaaagauuggauccuauggauuuccuuugccauaucaugcuuuuugcuuuguguuguuuugcugggguucaucaugugggccugccaaaaaggcaacauuaggugcaacauuugcauuuga

SEQ ID NO: 33002 - RNA, 1701 nt, Artificial Sequence
  derived and/or modified CDS sequence (wt) from hemagglutinin__InfluenzaA__ABG37307
augaagacuaucauugcuuugagcuacauuuuaugucugguuuucgcucaaaaacuucccggaaaugacaacagcacagcaacgcugugccugggacaccaugcagugccaaacggaacgcuagugaaaacaaucacgaaugaucaaauugaagugacuaaugcuacugagcugguucagaguuccccaacagguagaauaugcgacaguccucaccgaauccuugauggaaagaacugcacacugauagaugcucuauugggagacccucauugugauggcuuccaaaauaaggaaugggaccuuuuuguugaacgcagcaaagcuuacagcaacuguuacccuuaugaugugccggauuaugccucccuuaggucacuaguugccucaucaggcacccuugaguuuaccaacgaaaacuucaauuggacuggagucgcucaggaugggaaaagcuaugcuugcaaaaggggaucuguuaacaguuucuuuaguagauugaauugguugcacaaauuagaauacaaauauccagcgcugaacgugacuaugccaaacaauggcaaauuugacaaauuguacauuugggggguucaccacccgagcacggacagugaccaaaccagccuauauguccgagcaucagggaaagucacagucucuaccaaaagaagccaacaaacuguaaucccggauaucggguauagaccauggguaaggggucuguccaguagaauaagcaucuauuggacaauaguaaaaccgggagacauacuuuugauuaauagcacagggaaucuaauugcuccucgggguuacuucaaaauacgaaaugggaaaagcucaauaaugaggucagaugcacccauuggcaacugcaguucugaaugcaucacuccaaauggaagcauucccaaugacaaaccuuuucaaaauguaaacaggaucacauauggggccugccccagauauguuaagcaaaacacucugaaauuggcaacagggaugcggaauguaccagagaaacaaacuagaggcauauucggcgcaaucgcagguuucauagaaaaugguugggagggaaugguagacgguugguacgguuucaggcaucagaauucugagggcacaggacaagcugcagaucuuaaaagcacucaagcagcaaucgaccaaaucaacgggaaacugaauagguuagucgagaaaacgaacgagaaauuccaucaaaucgaaaaagaauucucagaaguagaagggagaauucaggaccucgagaaauauguugaagacacuaaaauagaucucuggucuuacaaugcggagcuucuuguugcucuggagaaccaacauacaauugaucuaacugacucagaaaugaacaaacuauuugaaagaacaaggaagcaacugagggaaaaugcugaggacaugggcaaugguuguuucaaaauauaccacaaaugugacaaugccugcauagggucaaucagaaauggaacuuaugaccaugauguauacagagacgaagcauuaaacaaccgguuccagaucaaagguguugagcugaagucaggauacaaagauuggauccuguggauuuccuuugccauaucaugcuuuuugcuuuguguuguuuugcuuggguucaucaugugggccugccaaaaaggcaacauuaggugcaacauuugcauuuga

SEQ ID NO: 33003 - RNA, 1701 nt, Artificial Sequence
  derived and/or modified CDS sequence (wt) from hemagglutinin__InfluenzaA__ABG37318
augaagacuaucauugcuuugagcuacauuuuaugucugguuuucgcucaaaaacuucccggaaaugacaacagcacagcaacgcugugccugggacaccaugcagugccaaacggaacgcuagugaaaacaaucacgaaugaucaaauugaagugacuaaugcuacugagcugguucagaguuccucaacagguagaauaugcgacaguccucaccgaauccuugauggaaaaaacugcacacugauagaugcucuauugggagacccucauugugauggcuuccaaaauaaggaaugggaccuuuuuguugaacgcagcaaagcuuacagcaacuguuacccuuaugaugugccggauuaugccucccuuaggucacuaguugccucaucaggcacccuggaguuuaccaaggaaggcuucaauuggacuggagucgcucaggaugggaaaagcuaugcuugcaaaaggggaucuguuaacaguuucuuuaguagauugaauugguugcacaaauuagaauacaaauauccagcacugaacgugacuaugccaaacaaugacaaauuugacaaauuguacauuugggggguucaccacccgagcacggacagugaccaaaccagccuauauguucaagcaucagggagagucacagucucuaccaaaagaagccaacaaacuguaaucccgaauaucgggucuagacccuggguaagggguaucuccaguagaauaagcaucuauuggacaauaguaaaaccgggagacauacuuuugauuaacagcacagggaaucuaauugcuccucgggguuacuucaaaauacgaaaugggaaaagcucaauaaugaggucagaugcacccauuggcaacugcaauucugaaugcaucacuccaaauggaagcauucccaaugacaaaccuuuucaaaauguaaacaggaucacauauggggccugucccagauauguuaagcaaaacacucugaaguuggcaacagggaugcggaauguaccagagaaacaaacuagaggcauauucggcgcaaucgcagguuucauagaaaaugguugggagggaaugguagacgguugguacgguuucaggcaucaaaauucugagggcacaggacaagcagcagaucuuaaaagcacucaagcagcaaucgaccaaaucaacgggaagcugaauagguuaaucgagaaaacgaacgaaaaauuccaucaaaucgaaaaagaauucucagaaguagaagggagaauucaggaccucgagaaauauguugaagacacuaaaauagaucucuggucuuacaacgcggagcuucuuguugcccuggagaaccaacauacaauugaucuaacugacucagaaaugaacaaacuguuugaaagaacaaggaagcaacugagggaaaaugcugaggacaugggcaaugguugcuucaaaauauaccacaaaugugacaaugccugcauagggucaaucagaaauggaacuuaugaccaugauguauacagagacgaagcauuaaacaaccgguuccagaucaaagguguugagcugaagucaggauacaaagauuggauccuauggauuuccuuugccauaucaugcuuuuugcuuuguguuguuuugcugggguucaucaugugggccugccaaaaaggcaacauuaggugcaacauuugcauuuga

SEQ ID NO: 33004 - RNA, 1701 nt, Artificial Sequence
  derived and/or modified CDS sequence (wt) from hemagglutinin__InfluenzaA__ABG37329
augaagacuaucauugcuuugagcuacauuuuaugucugguuuucgcucaaaaacuucccgaaaaugacaacagcacagcaacgcugugccugggacaccaugcagugccaaacggaacgcuaguuaaaacaaucacgaaugaucaaauugaagugacuaaugcuacugagcugguucagaguuccccaacagguagaauaugcgacaguccucaccgaauccuugauggaaagaacugcacacugauagaugcucuauugggagacccucauugugauggcuuccaaaauaaggaaugggaccuuuuuguugaacgcagcaaagcuuacagcaacuguuacccuuaugaugugccggauuaugccucccuuaggucacuaguugccucaucaggcacccuggaguuuaccaacgaaaacuucaauuggacuggagucgcucaggaugggaaaagcuaugcuugcaaaaggggaucuguuaacaguuucuuuaguagauugaauugguugcacaaauuagaauacaaauauccagcgcugaacgugacuaugccaaacaauggcaaauuugacaaauuguacauuugggggguucaccacccgagcacggacagugaccaaaccagccuauauguccgagcaucagggaaagucacagucucuaccaaaagaagccaacaaacuguaaucccggauaucggguauagaccauggguaaggggucuguccaguagaauaagcaucuauuggacaauaguaaaaccgggagacauacuuuugauuaauagcacagggaaucuaauugcuccucgggguuacuucaaaauacgaaaugggaaaagcucaauaaugaggucagaugcacccauuggcaacugcaguucugaaugcaucacuccaaauggaagcauucccaaugacaaaccuuuucaaaauguaaacaggaucacauauggggccugccccagauauguuaagcaaaacacucugaaauuggcaacagggaugcggaauguaccagagaaacaaacuagaggcauauucggcgcaaucgcagguuucauagaaaaugguugggagggaaugguagacgguugguacgguuucaggcaucagaauucugagggcacaggacaagcugcagaucuuaaaagcacucaagcagcaaucgaccaaaucaacgggaaacugaauagguuagucgagaaaacgaacgagaaauuccaucaaaucgaaaaagaauucucagaaguagaagggagaauucaggaccucgagaaauauguugaagacacuaaaauagaucucuggucuuacaaugcggagcuucuuguugcucuggagaaccaacauacaauugaucuaacugacucagaaaugaacaaacuauuugaaagaacaaggaagcaacugagggaaaaugcugaggacaugggcaaugguuguuucaaaauauaccacaaaugugacaaugccugcauagggucaaucagaaauggaacuuaugaccaugauguauacagagacgaagcauuaaacaaccgguuccagaucaaagguguugagcugaagucaggauacaaagauuggauccuauggauuuccuuugccauaucaugcuuuuugcuuuguguuguuuugcuuggguucaucaugugggccugccaaaaaggcaacauuaggugcaacauuugcauuuga

SEQ ID NO: 33005 - RNA, 1701 nt, Artificial Sequence
  derived and/or modified CDS sequence (wt) from hemagglutinin__InfluenzaA__ABG37340
augaagacuaucauugcuuugagcuacauuuuaugucugguuuucgcucaaaaacuucccggaaaugacaacagcacagcaacgcugugccugggacaccaugcagugccaaacggaacgcuagugaaaacaaucacgaaugaucaaauugaagugacuaaugcuacugagcugguucagaguuucccaacagguagaauaugcgacaguccucaccgaauccuugauggaaagaacugcacacugauagaugcucuauugggagacccucauugugauggcuuccaaaauaaggaaugggaccuuuuuguugaacgcagcaaagcuuacagcaacuguuacccuuaugaugugccggauuaugccucccuuaggucacuaguugccucaucaggcacccuggaguuuaccaacgaaaacuucaauuggacuggagucgcucaggaugggaaaagcuauucuugcaaaaggggaucuguuaacaguuucuuuaguagauugaauugguugcacaaauuagaauacaaauauccagcgcugaacgugacuaugccaaacaauggcaaauuugacaaauuguacauuugggggguucaccacccgagcacggacagugaccaaaccagccuauauguccgagcaucagggaaagucacagucucuaccaaaagaagccaacaaacuguaaucccggauaucggguauagaccauggguaaggggucuguccaguagaauaagcaucuauuggacaauaguaaaaccgggagacauacuuuugauuaauagcacagggaaucuaauugcuccucgggguuacuucaaaauacgaaaugggaaaagcucaauaaugaggucagaugcacccauuggcaacugcaguucugaaugcaucacuccaaauggaagcauucccaaugacaaaccuuuucaaaauguaaacaggaucacauauggggccugccccagauauguuaagcaaaacacucugaaauuggcaacagggaugcggaauguaccagagaaacaaacuagaggcauauucggcgcaaucgcagguuucauagaaaaugguugggagggaaugguagacgguugguacgguuucaggcaucagaauucugagggcacaggacaagcugcagaucuuaaaagcacucaagcagcaaucgaccaaaucaacgggaaacugaauagguuagucgagaaaacgaacgagaaauuccaucaaaucgaaaaagaauucucagaaguagaagggagaauucaggaccucgagaaauauguugaagacacuaaaauagaucucuggucuuacaaugcggagcuucuuguugcucuggagaaccaacauacaauugaucuaacugacucagaaaugaacaaacuauuugaaagaacaaggaagcaacugagggaaaaugcugaggacaugggcaaugguuguuucaaaauauaccacaaaugugacaaugccugcauagggucaaucagaaauggaacuuaugaccaugauguauacagagacgaagcauuaaacaaccgguuccagaucaaagguguugagcugaagucaggauacaaagauuggauccuauggauuuccuuugccauaucaugcuuuuugcuuuguguuguuuugcuuggguucaucaugugggccugccaaaaaggcaacauuaggugcaacauuugcauuuga

SEQ ID NO: 33006 - RNA, 1701 nt, Artificial Sequence
  derived and/or modified CDS sequence (wt) from hemagglutinin__InfluenzaA__ABG37351
augaagacuaucauugcuuugagcuacauuuuaugucugguuuucgcucaaaaacuucccggaaaugacaacagcacagcaacgcugugccugggacaccaugcggugccaaacggaacgcuagugaaaacaaucacgaaugaucaaauugaagugacuaaugcuacugagcugguucagaguuccucaacagguagaauaugcgacaguccucaccgaauccuugauggaaaaaacugcacacugauagaugcucuauugggagacccucauugugauggcuuccaaaauaaggaaugggaccuuuuuguugaacgcagcaaagcuuacagcaacuguuacccuuaugaugugccggauuaugccucccuuaggucacuaguugccucaucaggcacccuggaguuuaucaaugaagacuucaauuggacuggagucgcucaggaugggaaaagcuaugcuugcaaaaggggaucuguuaacaguuucuuuaguagauugaauugguugcacaaauuagaauacaaauauccagcgcugaacgugacuaugccaaacaauggcaaauuugacaaauuguacauuugggggguucaccacccgagcacggacagugaccaaaccagccuauauguucgagcaucagggagagucacagucucuaccaaaagaagccaacaaacuguaaucccgaauaucggguuuagacccuggguaaggggucuguccaguagaauaagcaucuauuggacaauaguaaaaccgggagacauacuuuugauugauagcacagggaaucuaauugcuccucgggguuacuucaaaauacggaaugggaaaagcucaauaaugaggucagaugcacccauuggcaacugcaguucugaaugcaucacuccaaauggaagcauucccaaugacaaaccuuuucaaaauguaaacaggaucacauauggggccugccccagauauguaaagcaaaacacucugaaguuggcaacagggaugcggaauguaccagagaaacaaacuagaggcauauucggcgcaaucgcagguuucauagaaaaugguugggagggaaugguagacgguugguacgguuucaggcaucaaaauucugagggcacaggacaagcagcagaucuuaaaagcacucaagcagcaaucgaccaaaucaacgggaaacugaauagguuaaucgagaaaacgaacgagaaauuccaucaaaucgaaaaagaauucucagaaguagaagggagaauucaggaccucgagaaauauguugaagacacuaaaauagaucucuggucuuacaacgcggggcuucuuguugcccuggagaaccaacauacaauugaucuaacugacucagaaaugaacaaacuguuugaaagaacaaggaagcaacugagggaaaaugcugaggacaugggcaaugguugcuucaaaauauaccacaaaugugacaaugccugcauagggucaaucagaaauggaacuuaugaccaugauguauacagagacgaagcauuaaacaaccgguuccagaucaaagguguugagcugaagucaggauacaaagauuggauccuauggauuuccuuugccauaucaugcuuuuugcuuuguguuguuuugcugggguucaucaugugggccugccaaaaaggcaacauuaggugcaacauuugcauuuga

SEQ ID NO: 33007 - RNA, 1698 nt, Artificial Sequence
  derived and/or modified CDS sequence (wt) from hemagglutinin__InfluenzaA__ABG37362
augaaaguaaaacuacugguccuguuauguacauuuacagcuacauaugcagacacaauauguauaggguaccaugccaacaacucaaccgacacuguugacacaguacuugagaagaaugugacagugacacacucugucaaccuacuugaggacagucacaauggaaaacuaugucuacuaaaaggaauagccccacuacaauuggguaauugcagcguugccggauggaucuuaggaaacccagaaugcgaauuacugauuuccaaggaaucaugguccuacauuguagaaacaccaaauccugagaauggaacauguuacccaggguauuucgccgacuaugaggaacugagggagcaauugaguucaguaucuucauuugagagauucgaaauauuccccaaagaaagcucauggcccaaccacaccguaaccggaguaucggcaucaugcucccauaaugggaaaagcaguuuuuaccgaaauuugcuauggcugacggggaagaaugguuuguacccaaaccugagcaaguccuaugcaaacaacaaagagaaagaaguccuuguacuaugggguguucaucacccgccuaacauagggaaccaaagggcccucuaucauacagaaaaugcuuaugucucuguagugucuucacauuauagcagaagauucaccccagaaauagccaaaagacccaaaguaagagaucaggaaggaagaaucaacuacuacuggacucugcuggaacccggggauacaauaauauuugaggcaaauggaaauuuaauagcgccaugguaugcuuucgcacugaguagaggcuuuggaucaggaaucaucaccucaaaugcaccaauggaugaaugugaugcgaagugucaaacaccucagggagcuauaaacagcagucuuccuuuccagaauguacacccagucacaauaggagaguguccaaaguaugucaggagugcaaaauuaaggaugguuacaggacuaaggaacaucccauccauucaauccagagguuuguuuggagccauugccgguuucauugaagggggguggacuggaaugguagaugggugguaugguuaucaucaucagaaugagcaaggaucuggcuaugcugcagaucaaaaaagcacacaaaaugccauuaacgggauuacaaacaaggugaauucuguaauugagaaaaugaacacucaauucacagcugugggcaaagaauucaacaaauuggaaagaaggauggaaaacuuaaauaaaaaaguugaugauggguuucuagacauuuggacauauaaugcagaauuguugguucuacuggaaaaugaaaggacuuuggauuuccaugacuccaaugugaagaaucuguaugagaaaguaaaaagccaauuaaagaauaaugccaaagaaauaggaaacggguguuuugaauucuaucacaaguguaacaaugaaugcauggagagugugaaaaauggaacuuaugacuauccaaaauauuccgaagaaucaaaguuaaacagggagaaaauugauggagugaaauuggaaucaaugggagucuaucagauucuggcgaucuacucaacugucgccaguucccugguucuuuuggucucccugggggcaaucagcuucuggauguguuccaaugggucuuugcaguguagaauaugcaucuga

SEQ ID NO: 33008 - RNA, 1698 nt, Artificial Sequence; identical to SEQ ID NO: 32812
  derived and/or modified CDS sequence (wt) from hemagglutinin__InfluenzaA__ABG37384

SEQ ID NO: 33009 - RNA, 1698 nt, Artificial Sequence
  derived and/or modified CDS sequence (wt) from hemagglutinin__InfluenzaA__ABG37395
augaaagcaaaacuacugguccuguuauguacauuuacagcuacauacgcagacacaauauguauaggcuaccaugccaacaacucaaccgacacuguugacacaguacuugagaagaaugugacagugacacacucugucaaccuacuugaggacagucacaauggaaaacuaugucuacuaaaaggaauagccccacuacaauuggguaauugcagcguugccggauggaucuuaggaaacccagaaugcgaauuacugauuuccaaggaaucaugguccuacauuguagaaacaccaaaucccgagaauggaacauguuacccaggguauuucgccgacuaugaggaacugagggagcaauugaguucaguaucuucauuugagagauucgaaauauuccccaaaggaagcucauggcccaaccacaccgugaccggaguaucagcaucaugcucccauaaugggaaaagcaguuuuuacagaaauuugcuauggcugacggggaagaaugguuuguacccaaaccugagcauguccuauguaaacaacaaagagaaagaaguccuugugcuaugggguguucaucacccaccuaacauagggaaccaaagggcccucuaccauacagaaaaugcuuaugucucuguagugucuucacauuauagcagaagauucaccccagaaauagccaaaagacccaaaguaagagaucaggaaggaagaaucaacuacuacuggacucugcuggaacccggggacacaauaauauuugaggcaaauggaaaucuaauagcgccaugguaugcuuucgcacugaguagaggcuuuggaucaggaaucaucaccucaaaugcaccaaugggugaaugugaugcgaagugucaaacaccucagggagcuauaaacaguagucuuccuuuccagaauguacacccaguuacaauaggagaguguccaaaguaugucaggagugcaaaauuaaggaugguuacaggacuaaggaacaucccauccauucaauccagagguuuguuuggagccauugccgguuucauugaagggggguggacuggaaugguagaugggugguaugguuaucaucaucagaaugagcaaggaucuggcuaugcugcagaucaaaaaagcacacaaaaugccauuaacgggauuacaaacaaggugaauucuguaauugagaaaaugaacacucaauucacagcugugggcaaagaauucaacaaauuagaaagaaggauggaaaacuuaaauaagaaaguugaugauggguuucuagacauuuggacauauaaugcagaauuguugguucuacuggaaaaugaaaggacuuuggauuuccaugacuccaaugugaagaaucuguaugagaaaguaaaaagccaauuaaagaauaaugccaaagaaauaggaaacggguguuuugaauucuaucacaaguguaacaaugaaugcauggaaagugugaaaaauggaacuuaugacuauccaaaauauuccgaagaaucaaaguuaaacagggagaaaauugauggaguaaaauuggaaucaaugggagucuaucagauucuggcgaucuacucaacugucgccaguucccugguucuuuuggucucccugggggcaaucagcuucuggauguguuccaaugggucuuugcaguguagaauaugcaucuga

SEQ ID NO: 33010 - RNA, 1701 nt, Artificial Sequence; identical to SEQ ID NO: 32790
  derived and/or modified CDS sequence (wt) from hemagglutinin__InfluenzaA__ABG37406

SEQ ID NO: 33011 - RNA, 1701 nt, Artificial Sequence
  derived and/or modified CDS sequence (wt) from hemagglutinin__InfluenzaA__ABG37428
augaagacuaucauugcuuugagcuacauuuuaugccugguuuucgcucaaaaacuucccggaaaugacaacagcacggcaacgcugugucuggggcaucaugcagugccaaacggaacgcuagugaaaacaaucacgaaugaccaaauugaaguaacuaaugcuacugagcugguucagaguuccucaacagguagaauaugcgacaguccucaccaaauccuugauggagaaaacugcacacuaauagaugcucuauugggagacccucauugugauggcuuccaaaauaaggaaugggaccuuuuuguugaacgcagcaaagccuacagcaacuguuacccuuaugaugugccggauuaugucucccuuaggucacuaguugccucaucaggcacgcuggaguuuaacaaugaaagcuucaauuggacuggagucgcucagaauggaacaagcucugcuugcaaaaggagaucugauaaaaguuucuuuaguagauugaauugguugcaccaauuaaaauacaaauauccagcacugaacgugacuaugccaaacaaugaaaaauuugacaaauuguacauuugggggguucaccacccggguacagacagugaccaaaucagccuauaugcucaagcaucggggagagucacagucucuaccaaaagaagccaacaaacuguaaucccgaauaucggaucuagacccugggugaggggugucuccagcagaauaagcaucuauuggacaauaguaaaaccgggagacauacuuuugauuaacagcacagggaaucuaauugcuccucgggguuacuucaaaauacgaagugggaaaagcucaauaaugaggucagaugcacccauuggcaaaugcaauucugaaugcaucacuccaaauggaagcauucccaaugacaaaccauuucaaaauguaaacaggaucacauauggggccugucccagauauguuaagcaaaacacucugaaauuggcaacagggaugcggaaugugccagagaaacaaacuagaggcauauucggugcaaucgcgggcuucauagaaaaugguugggagggaaugauggacgguugguacgguuucaggcaucaaaauucugagggcacagggcaagcagcagaucuuaaaagcacucaagcagcaaucaaccaaaucaacgggaaacugaauagguuaaucgagaaaacgaacgagaaaucccaucaaauugaaaaagaauucucagaaguagaagggagaauucaggaccucgagaaauauguugaggacacuaaaauagaucucuggucguacaaugcggagcuucuuguugcccuggagaaccaacauacaauugaucuaacugacucagaaaugaacaaacuguuugaaagaacaaagaagcaacugagggaaaaugcugaggauaugggcaaugguuguuucaaaauauaccacaaaugugacaaugccugcauagggucaaucagaaauggaacuuaugaccaugauguauacagagacgaagcauugaacaaccgguuccagaucaaagguguugagcugaagucaggauacaaagauuggguccuauggauuuccuuugccauaucauguuuuuugcuuuguauuguuuugcugggguucaucaugugggccugccaaaaaggcaacauuaggugcaacauuugcauuuga

SEQ ID NO: 33012 - RNA, 1701 nt, Artificial Sequence; identical to SEQ ID NO: 32574
  derived and/or modified CDS sequence (wt) from hemagglutinin__InfluenzaA__ABG37439

SEQ ID NO: 33013 - RNA, 1701 nt, Artificial Sequence
  derived and/or modified CDS sequence (wt) from hemagglutinin__InfluenzaA__ABG37461
augaagacuaucauugcuuugagcuacauuuuaugccugguuuucgcucaaaaacuucccggaaaugacaacagcacggcaacgcugugucuggggcaucaugcagugccaaacggaacgcuagugaaaacaaucacgaaugaccaaauugaaguaacuaaugcuacugagcugguucagaguuccucaacagguagaauaugcgacaguccucaccaaauccuugauggagaaaacugcacacuaauagaugcucuauugggagacccucauugugauggcuuccaaaauaaggaaugggaccuuuuuguugaacgcagcaaagccuacagcaacuguuacccuuaugaugugccggauuaugucucccuuaggucacuaguugccucaucaggcacgcuggaguuuaacaaugaaagcuucaauuggacuggagucgcucagaauggaacaagcucugcuugcaaaaggagaucugauaaaaguuucuuuaguaaauugaauugguugcaccaauuaaaauauaaauauccagcacugaacgugacuaugccaaacaaugaaaaauuugacaaauuguacauuugggggguucaccacccggguacagacagugaccaaaucagccuauaugcucaagcaucagggagagucacagucucuaccaaaagaagccaacaaacuguaaucccgaauaucggaucuagacccuggguaaggggugucuccagcagaauaagcaucuauuggacaauaguaaaaccgggagacauacuuuugauuaacagcacagggaaucuaauugcuccucgggguuacuucaaaauacgaagugggaaaagcucaauaaugaggucagaugcacccauuggcaaaugcaauucugaaugcaucacuccaaauggaagcauucccaaugacaaaccauuucaaaauguaaacaggaucacauauggggccugucccagauauguuaagcaaaacacucugaaauuggcaacagggaugcggaaugugccagagaaacaaacuagaggcauauucggugcaaucgcgggcuucauagaaaaugguugggagggaaugauggacgguugguacgguuucaggcaucaaaauucugagggcacagggcaagcagcagaucuuaaaagcacucaagcagcaaucaaccaaaucaacgggaagcugaauagguuaaucgagaaaacgaaugagaaauuccaucaaauugaaaaagaauucucagaaguagaagggagaauucaggaccucgagaaauauguugaggacacuaaaauagaucucuggucguacaaugcggagcuucuuguugcccuggagaaccaacauacaauugaucuaacugacucagaaaugaacaaacuguuugaaagaacaaagaagcaacugagggaaaaugcugaggauaugggcaaugguuguuucaaaauauaccacaaaugugacaaugccugcauagggucaaucagaaauggaacuuaugaccaugauguauacagagacgaagcauugaacaaccgguuccagaucaaagguguugagcugaagucaggauacaaagauuggguccuauggauuuccuuugccauaucauguuuuuugcuuuguauuguuuugcugggguucaucaugugggccugccaaaaaggcaacauuaggugcaacauuugcauuuga

SEQ ID NO: 33014 - RNA, 1701 nt, Artificial Sequence
  derived and/or modified CDS sequence (wt) from hemagglutinin__InfluenzaA__ABG37472
augaagacuaucauugcuuugagcuacauuuuaugucugguuuucgcucaaaaacuucccggaaaugacaacagcacggcaacgcugugccuggggcaccaugcagugccaaacggaacgcuagugaaaacaaucacgaaugaccaaauugaagugacuaaugcuacugagcugguucagaguuccucaacagguagaauaugcgacaguccucaccaaguccuugauggagaaaacugcacacuaauagaugcucuauugggagacccucauugugauggcuuccaaaauaaggaaugggaccuuuuuguugaacgcagcaaagccuacagcaacuguuacccuuaugaugugccggauuaugucucccuuaggucacuaguugccucaucaggcacgcuggaguuuaacaaugaaagcuucaauuggacuggagucgcucagaauggaacaagcucugcuugcaaaaggagaucugauaaaaguuucuuuaguagauugaauugguugcaucaauuaaaauacaaauauccagcacugaaugugacuaugccaaacaaugaaaaauuugacaaauuguacauuugggggguucaccacccggguacagacagugaccaaaucagccuauaugcucaagcaucagggagagucacagucucuaccaaaagaagccaacaaacuguaaucccgaauaucggaucuagacccuggguaaggggugucuccagcagaauaagcaucuauuggacaauaguaaaaccgggagacauacuuuugauuaacagcacagggaaucuaauugcuccucgggguuacuucaaaauacgaagugggaaaagcucaauaaugaggucagaugcacccauuggcaaaugcaauucugaaugcaucacuccaaauggaagcauucccaaugacaaaccauuucaaaauguaaacaggaucacauaugggcccugucccagauauguuaagcaaaacacucugaaauuggcaacagggaugcggaaugugccagagaaacaaacuagaggcauauucggugcaaucgcgggcuucauagaaaaugguugggagggaaugauggacgguugguacgguuucaggcaucaaaauucugagggcacagggcaagcagcagaucuuaaaagcacucaagcagcaaucaaccaaaucaacgggaaacugaauagguuaaucgagaaaacgaacgagaaauuccaucaaauugaaaaagaauucucagaaguagaagggagaauucaggaccucgagaaauauguugaggacacuaaaauagaucucuggucguacaaugcggagcuucuuguugcccuggagaaccaacauacaauugaucuaacugacucagaaaugaacaaacuguuugaaagaacaaagaagcaacugagggaaaaugcugaggauaugggcaaugguuguuucaaaauauaccacaaaugugacaaugccugcauagggucaaucagaaauggaacuuaugaccaugauguauacagagacgaagcauugaacaaccgguuccagaucaaagguguugagcugaagucaggauacaaagauuggauccuauggauuuccuuugccauaucauguuuuuugcuuuguauuguuuugcugggguucaucaugugggccugccaaaaaggcaacauuaggugcaacauuugcauuuga

SEQ ID NO: 33015 - RNA, 1701 nt, Artificial Sequence
  derived and/or modified CDS sequence (wt) from hemagglutinin__InfluenzaA__ABG37483
augaagacuaucauugcuuugagcuauauuuuaugccugguuuucgcucaaaaacuucccggaaaugacaacagcacggcaacgcugugucuggggcaucaugcagugccaaacggaacgcuagugaaaacaaucacgaaugaccaaauugaaguaacuaaugcuacugagcugguucagaguuccucaacagguagaauaugcgacaguccucaccaaauccuugauggagaaaacugcacacuaauagaugcucuauugggagacccucauugugauggcuuccaaaauaaggaaugggaccuuuuuguugaacgcagcaaagccuacagcaacuguuacccuuaugaugugccggauuaugucucccuuaggucacuaguugccucaucaggcacgcuggaguuuaacaaugaaagcuucaauuggacuggagucgcucagaauggaacaagcucugcuugcaaaaggagaucugauaaaaguuucuuuaguagauugaauugguugcaccaauuaaaauacaaauauccagcacugaacgugacuaugccaaacaaugaaaaauuugacaaauuguacauuugggggguucaccacccggguacagacagugaccaaauuagccuauaugcucaagcaucggggagagucacagucucuaccaaaagaagccaacaaacuguaaucccgaauaucggaucuagacccuggguaaggggugucuccagcagaauaagcaucuauuggacaauaguaaaaccgggagacauacuuuugauuaacagcacagggaaucuaauugcuccucgggguuacuucaaaauacgaagugggaaaagcucaauaaugaggucagaugcacccauuggcaaaugcaauucugaaugcaucacuccaaauggaagcauucccaaugacaaaccauuucaaaauguaaacaggaucacauauggggccugucccagauauguuaagcaaaacacucugaaauuggcaacagggaugcggaaugugccagagaaacaaacuagaggcauauucggugcaaucgcgggcuucauagaaaaugguugggagggaaugauggacgguugguacgguuucaggcaucaaaauucugagggcacagggcaagcagcagaucuuaaaagcacucaagcagcaaucaaccaaaucaacgggaaacugaauagguuaaucgagaaaacgaacgagaaauuccaucaaauugaaaaagaauucucagaaguagaagggagaauucaggaccucgagaaauauguugaggacacuaaaauagaucucuggucguacaaugcggagcuucuuguugcccuggagaaccaacauacaauugaucuaacugacucagaaaugaacaaacuguuugaaagaacaaagaagcaacugagggaaaaugcugaggauaugggcaaugguuguuucaaaauauaccacaaaugugacaaugccugcauagggucaaucagaaauggaacuuaugaccaugauguauacagagacgaagcauugaacaaccgguuccagaucaaagguguugagcugaagucaggauacaaagauuggguccuauggauuuccuuugccauaucauguuuuuugcuuuguauuguuuugcugggguucaucaugugggccugccaaaaaggcaacauuaggugcaacauuugcauuuga

SEQ ID NO: 33016 - RNA, 1701 nt, Artificial Sequence
  derived and/or modified CDS sequence (wt) from hemagglutinin__InfluenzaA__ABG37494
augaagacuaucauugcuuugagcuacauuuuaugccugguuuucgcucaaaaacuucccggaaaugacaacagcacggcaacgcugugucuggggcaucaugcagugccaaacggaacgcuagugaaaacaaucacgaaugaccaaauugaaguaacuaaugcuacugagcugguucagaguuccucaacagguagaauaugcgacaguccucaccaaauccuugauggagaaaacugcacacuaauagaugcucuauugggagacccucauugugauggcuuccaaaauaaggaaugggaccuuuuuguugaacgcagcaaagccuacagcaacuguuacccuuaugaugugccggauuaugucucccuuaggucacuaguugccucaucaggcacgcuggaguuuaacaaugaaagcuucaauuggacuggagucgcucagaauggaacaagcucugcuugcaaaaggagaucugauaaaaguuucuuuaguaaauugaauugguugcaccaauuaaaauauaaauauccagcacugaacgugacuaugccaaacaaugaaaaauuugacaaauuguacauuugggggguucaccacccggguacagacagugaccaaaucagccuauaugcucaagcaucagggagagucacagucucuaccaaaagaagccaacaaacuguaaucccgaauaucggaucuagacccuggguaaggggugucuccagcagaauaagcaucuauuggacaauaguaaaaccgggagacauacuuuugauuaacagcacagggaaucuaauugcuccucgggguuacuucaaaauacgaagugggaaaagcucaauaaugaggucagaugcacccauuggcaaaugcaauucugaaugcaucacuccaaauggaagcauucccaaugacaaaccauuucaaaauguaaacaggaucacauauggggccugucccagauauguuaagcaaaacacucugaaauuggcaacagggaugcggaaugugccagagaaacaaacuagaggcauauucggugcaaucgcgggcuucauagaaaaugguugggagggaaugauggacgguugguacgguuucaggcaucaaaauucugagggcacagggcaagcagcagaucuuaaaagcacucaagcagcaaucaaccaaaucaacgggaagcugaauagguuaaucgagaaaacgaacgagaaauuccaucaaauugaaaaagaauucucagaaguagaagggagaauucaggaccucgagaaauauguugaggacacuaaaauagaucucuggucguacaaugcggagcuucuuguugcccuggagaaccaacauacaauugaucuaacugacucagaaaugaacaaacuguuugaaagaacaaagaagcaacugagggaaaaugcugaggauaugggcaaugguuguuucaaaauauaccacaaaugugacaaugccugcauagggucaaucagaaauggaacuuaugaccaugauguauacagagacgaagcauugaacaaccgguuccagaucaaagguguugagcugaagucaggauacaaagauuggguccuauggauuuccuuugccauaucauguuuuuugcuuuguauuguuuugcugggguucaucaugugggccugccaaaaaggcaacauuaggugcaacauuugcauuuga

SEQ ID NO: 33017 - RNA, 1701 nt, Artificial Sequence
  derived and/or modified CDS sequence (wt) from hemagglutinin__InfluenzaA__ABG37505
augaagacuaucauugcuuugagcuacauuuuaugucugguuuucgcucaaaaacuucccggaaaugacaacagcauggcaacgcugugccuggggcaccaugcagugccaaacggaacgcuagugaaaacaaucacgaaugaccaaauugaagugacuaaugcuacugagcugguucagaguuccucaacagguagaauaugcgacaguccucaccaaauccuugauggagaaaacugcacacuaauagaugcucuauugggagacccucauugugauggcuuccaaaauaaggaaugggaccuuuuuguugaacgcagcaaagccuacagcaacuguuacccuuaugaugugccggauuaugucucccuuaggucacuaguugccucaucaggcacgcuggaguuuaacaaugaaagcuucaauuggacuggagucgcucagaauggaacaagcucugcuugcaaaaggagaucugauaaaaguuucuuuaguagauugaauugguugcaccaauuaaaauacaaauauccagcacugaacgugacuaugccaaacaaugaaaaauuugacaaauuguacauuugggggguucaccacccggguacagacagugaccaaaucagccuauaugcucaagcaucagggagagucacagucucuaccaaaagaagccaacaaacuguaaucccgaauaucggaucuagacccuggguaaggggugucuccagcagaauaagcaucuauuggacaauaguaaaaccgggagacauacuuuugauuaacagcacagggaaucuaauugcuccucgggguuacuucaaaauacgaagugggaaaagcucaauaaugaggucagaugcacccauugacaaaugcaauucugaaugcaucacuccaaauggaagcauucccaaugacaaaccauuucaaaauguaaacaggaucacauaugggcucugucccagauauguuaagcaaaacacucugaaauuggcaacagggaugcggaaugugccagagaaacaaacuagaggcauauucggugcaaucgcgggcuucauagaaaaugguugggagggaaugauggacgguugguacgguuucaggcaucaaaauucugagggcacagggcaagcagcagaucuuaaaagcacucaagcagcaaucaaccaaaucaacgggaaacugaauagguuaaucgaaaaaacgaacgagaaauuccaucaaauugaaaaagaauucucagaaguagaagggagaauucaggaccucgagaaauauguugaggacacuaaaauagaucucuggucguacaaugcggagcuucuuguugcccuggagaaccaacauacaauugaucuaacugacucagaaaugaacaaacuguuugaaagaacaaagaagcaacugagggaaaaugcugaggauaugggcaaugguuguuucaaaauauaccacaaaugugacaaugccugcauagggucaaucagaaauggaacuuaugaccaugauguauacagagacgaagcauugaacaaccgguuccagaucaaagguguugagcugaagucaggauacaaagauuggauccuauggauuuccuuugccauaucauguuuuuugcuuuguauuguuuugcugggguucaucaugugggccugccaaaaaggcaacauuaggugcaacauuugcauuuga

SEQ ID NO: 33018 - RNA, 1701 nt, Artificial Sequence; identical to SEQ ID NO: 32532
  derived and/or modified CDS sequence (wt) from hemagglutinin__InfluenzaA__ABG37516

SEQ ID NO: 33019 - RNA, 1701 nt, Artificial Sequence; identical to SEQ ID NO: 32532
  derived and/or modified CDS sequence (wt) from hemagglutinin__InfluenzaA__ABG37527

SEQ ID NO: 33020 - RNA, 1701 nt, Artificial Sequence; identical to SEQ ID NO: 32532
  derived and/or modified CDS sequence (wt) from hemagglutinin__InfluenzaA__ABG37538

SEQ ID NO: 33021 - RNA, 1701 nt, Artificial Sequence; identical to SEQ ID NO: 32532
  derived and/or modified CDS sequence (wt) from hemagglutinin__InfluenzaA__ABG37549

SEQ ID NO: 33022 - RNA, 1701 nt, Artificial Sequence
  derived and/or modified CDS sequence (wt) from hemagglutinin__InfluenzaA__ABG37560
augaagacuaucauugcuuugagcuacauucuaugucugguuuucgcucaaaaacuucccggaaaugacaacagcacggcaacgcugugccuugggcaccaugcaguaccaaacggaacgauagugaaaacaaucacaaaugaccaaauugaaguuacuaaugcuacugagcugguucagaguuccucaacagguggaauaugcgacaguccucaucagauccuugauggagaaaacugcacacuaauagaugcucuauugggagacccucagugugauggcuuccaaaauaagaaaugggaccuuuuuguugaacgcagcaaagccuacagcaacuguuacccuuaugaugugccggaucaugccucccuuaggucacuaguugccucauccggcacacuggaguuuaacaaugaaagcuucgauuggacuggagucacucagaauggaacaagcucugcuugcaaaaggagaucuaauaaaaguuucuuuaguagauugaauugguugacccacuuaaaauacaaauacccagcauugaacgugacuaugccaaacaaugaaaaauuugacaaauuguacauuugggggguucaccacccggguacggacagugaccaaaucagccuauaugcucaagcaucaggaagaaucacagucucuaccaaaagaagccaacaaacuguaaucccgaauaucggaucuagacccaggguaagggaugucuccagccgaauaagcaucuauuggacaauaguaaaaccgggagacauacuuuugauuaacagcacagggaaucuaauugcuccucgggguuacuucaaaauacgaagugggaaaagcucaauaaugagaucagaugcacccauuggcaaaugcaauucugaaugcaucacuccaaauggaagcauucccaaugacaaaccauuucaaaauguaaacaggaucacauauggggccugccccagauauguuaagcaaaacacucugaaguuggcaacagggaugcgaaauguaccagagaaacaaacuagaggcauauuuggcgcaaucgcggguuucauagaaaaugguugggagggaaugguggacgguugguacgguuucaggcaucaaaauucugagggcacaggacaagcagcagaucucaaaagcacucaagcagcaaucaaccaaaucaaugggaaacugaauagguuaaucgggaaaacaaacgagaaauuccaucagauugaaaaagaauucucagaaguagaagggagaauucaggaccucgagaaauauguugaggacacuaaaauagaucucuggucauacaacgcggagcuucuuguugcccuggagaaccaacauacaauugaucuaacugacucagaaaugaacaaacuguuugaaagaacaaagaagcaacugagggaaaaugcugaggauaugggcaaugguuguuucaaaauauaccacaaaugugacaaugccugcauagggucaaucagaaauggaacuuaugaccaugauguguacagagaugaagcauuaaacaaccgguuccagaucaaagguguugagcugaagucaggauauaaagauuggauccuauggauuuccuuugccauaucauguuuuuugcuuuguguugcuuuguugggguucaucaugugggccugccaaaaaggcaacauuaggugcaacauuugcauuuga

SEQ ID NO: 33023 - RNA, 1701 nt, Artificial Sequence; identical to SEQ ID NO: 32532
  derived and/or modified CDS sequence (wt) from hemagglutinin__InfluenzaA__ABG37571

SEQ ID NO: 33024 - RNA, 1701 nt, Artificial Sequence
  derived and/or modified CDS sequence (wt) from hemagglutinin__InfluenzaA__ABG37582
augaagacuaucauugcuuugagcuacauucuaugucugguuuucgcucaaaaacuucccggaaaugacaacagcacggcaacgcugugccuugggcaccaugcaguaccaaacggaacgauagugaaaacaaucacaaaugaccaaauugaaguuacuaaugcuacugagcugguucagauuuccucaacagguggaauaugcgacaguccucaucagauccuugauggagaaaacugcacacuaauagaugcucuauugggagacccucagugugauggcuuccaaaauaagaaaugggaccuuuuuguugaacgcagcaaagccuacagcaacuguuacccuuaugaugugccggaucaugccucccuuaggucacuaguugccucauccggcacacuggaguuuaacaaugaaagcuucgauuggacuggagucacucagaauggaacaagcucugcuugcaaaaggagaucuaauaaaaguuucuuuaguagauugaauugguugacccacuuaaaauacaaauacccagcauugaacgugacuaugccaaacaaugaaaaauuugacaaauuguacauuugggggguucaccacccggguacggacagugaccaaaucagccuauaugcucaagcaucaggaagaaucacagucucuaccaaaagaagccaacaaacuguaaucccgaauaucggaucuagacccaggguaagggaugucuccagccgaauaagcaucuauuggacaauaguaaaaccgggagacauacuuuugauuaacagcacagggaaucuaauugcuccucgggguuacuucaaaauacgaagugggaaaagcucaauaaugagaucagaugcacccauuggcaaaugcaauucugaaugcaucacuccaaauggaagcauucccaaugacaaaccauuucaaaauguaaacaggaucacauauggggccugucccagauauguuaagcaaaacacucugaaauuggcaacagggaugcgaaauguaccagagaaacaaacuagaggcauauuuggcgcaaucgcggguuucauagaaaaugguugggagggaaugguggacgguugguacgguuucaggcaucaaaauucugagggcacaggacaagcagcagaucucaaaagcacucaagcagcaaucaaccaaaucaaugggaaacugaauagguuaaucgggaaaacaaacgagaaauuccaucagauugaaaaagaauucucagaaguagaagggagaauucaggaccucgagaaauauguugaggacacuaaaauagaucucuggucauacaacgcggagcuucuuguugcccuggagaaccaacauacaauugaucuaacugacucagaaaugaacaaacuguuugaaagaacaaagaagcaacugagggaaaaugcugaggauaugggcaaugguuguuucaaaauauaccacaaaugugacaaugccugcauagggucaaucagaaauggaacuuaugaccaugauguguacagagaugaagcauuaaacaaccgguuccagaucaaagguguugagcugaagucaggauauaaagauuggauccuauggauuuccuuugccauaucauguuuuuugcuuuguguugcuuuguugggguucaucaugugggccugccaaaaaggcaacauuaggugcaacauuugcauuuga

SEQ ID NO: 33025 - RNA, 1701 nt, Artificial Sequence
  derived and/or modified CDS sequence (wt) from hemagglutinin__InfluenzaA__ABG37604
augaagacuaucauugcuuugagcuacauucuaugucugguuuucgcucaaaaacuucccggaaaugacaacagcacggcaacgcugugccuugggcaccaugcaguaccaaacggaacgauagugaaaacaaucacaaaugaccaaauugaaguuacuaaugcuacugagcugguucagaguuccucaacagguggaauaugcgacaguccucaucagauccuugauggagaaaacugcacacuaauagaugcucuauugggagacccucagugugauggcuuccaaaauaagaaaugggaccuuuuuguugaacgcagcaaagccuacagcaacuguuacccuuaugaugugccggaucaugccucccuuaggucacuaguugccucauccggcacacuggaguuuaacaaugaaagcuucgauuggacuggagucacucagaauggaacaagcucugcuugcaaaaggagaucuaauaaaaguuucuuuaguagauugaauugguugacccacuuaaaauacaaauacccagcauugaacgugacuaugccaaacaaugaaaaauuugacaaauuguacauuugggggguucaccacccggguacggacagugaccaaaucagccuauaugcucaagcaucaggaagaaucacagucucuaccaaaagaagccaacaaacuguaaucccgaauaucggaucuagacccaggguaagggaugucuccagccgaauaagcaucuauuggacaauaguaaaaccgggagacauacuuuugauuaacagcacagggaaucuaauugcuccucgggguuacuucaaaauacgaagugggaaaagcucaauaaugagaucagaugcacccauuggcaaaugcaauucugaaugcaucacuccaaauggaagcauucccaaugacaaaccauuucaaaauguaaacaggaucacauauggggccugccccagauauguuaagcaaaacacucugaaauuggcaacagggaugcgaaauguaccagagaaacaaacuagaggcauauuuggcgcaaucgcggguuucauagaaaaugguugggagggaaugguggacgguugguacgguuucaggcaucaaaauucugagggcacaggacaagcagcagaucucaaaagcacucaagcagcaaucaaccaaaucaaugggaaacugaauagguuaaucgggaaaacaaacgagaaauuccaucagauugaaaaagaauucucagaaguagaagggagaauucaggaccucgagaaauauguugaggacacuaaaauagaucucuggucauacaacgcggagcuucuuguugcccuggagaaccaacauacaauugaucuaacugacucagaaaugaacaaacuguuugaaagaacaaagaagcaacugagggaaaaugcugaggauaugggcaaugguuguuucaaaauauaccacaaaugugacaaugccugcauagggucaaucagaaauggaacuuaugaccaugauguguacagagaugaagcauuaaacaaccgguuccagaucaaagguguugagcugaagucaggauauaaagauuggauccuauggauuuccuuugccauaucauguuuuuugcuuuguguugcuuuguugggguucaucaugugggccugccaaaaaggcaacauuaggugcaacauuugcauuuga

SEQ ID NO: 33026 - RNA, 1701 nt, Artificial Sequence; identical to SEQ ID NO: 32532
  derived and/or modified CDS sequence (wt) from hemagglutinin__InfluenzaA__ABG37615

SEQ ID NO: 33027 - RNA, 1698 nt, Artificial Sequence; identical to SEQ ID NO: 32754
  derived and/or modified CDS sequence (wt) from hemagglutinin__InfluenzaA__ABG47807

SEQ ID NO: 33028 - RNA, 1698 nt, Artificial Sequence; identical to SEQ ID NO: 32753
  derived and/or modified CDS sequence (wt) from hemagglutinin__InfluenzaA__ABG47818

SEQ ID NO: 33029 - RNA, 1701 nt, Artificial Sequence
  derived and/or modified CDS sequence (wt) from hemagglutinin__InfluenzaA__ABG47829
augaaagcaaaacuacuaguccuguugugugcauuuacagcuacauaugcagacacaauauguauaggcuaccaugcgaacaacucaaccgacacuguugacacaguacuugagaagaacgugacagugacacacucugucaaccuacuugaggacagucacaacggaaaacuaugccgacuaaaaggaacagccccacuacaauuggguaauugcagcguugccggauggaucuuaggaaacccagaaugcgaaucacuguuuucuaaggaaucaugguccuacauugcagaaacaccaaacccugagaauggaacauguuacccaggguauuucgccgacuaugaggaacugagggagcaauugagcucaguaucaucauucgagagauucgaaauauuccccaaggaaagcucauggcccaaccacaccguaaccaaaggagugacggcaucaugcucacauaaugggaaaagcaguuuuuacaaaaauuugcuauggcugacggaaaagaauggcuuguacccaaaucugagcaaguccuauguaaacaacaaggagaaagaaguccuuguacuaugggguguucaucacccgucuaacauaggggaccaaagggccaucuaucauacagaaaaugcuuaugucucuguagugucuucacauuauagcagaagauucaccccagaaauaacaaaaagacccaaaguaagaaaucaagaagggagaauuaacuacuacuggacucugcuggaacccggggacacaauaauauuugaggcaaauggaaaucuaauagcgccaugguacgcuuucgcacugaguagaggcuuugggucaggaaucaucaccucaaacgcaucaaugggugaaugugacgcuaagugucaaacaccccaaggagcuauaaacaguagucuuccuuuccagaauguacacccagucacaauaggagagugucccaaguaugucaggaguacaaaauuaaggaugguuacaggacuaagaaacaucccauccauucaaucuagagguuuguuuggagccauugccgguuucauugaagggggguggacuggaaugauagauggaugguaugguuaccaucaucagaaugaacaaggaucuggcuaugcugcagaccaaaaaagcacacaaaaugccauugaugggauuacaaacaaggugaauucuguaaucgagaaaaugaacacucaauucacagcuguaggcaaagaauucaacaaauuagagagaaggauggaaaacuuaaauaagaaaguugaugauggguuucuggacauuuggacauauaaugcagaguuguugguucuccuggaaaaugaaaggacuuuggauuuucaugacucaaaugugaagaaucuguaugagaaaguaaaaacccaauugaagaauaaugccaaagaaaucgggaacggguguuuugaauucuaucacaaguguaacaaugaaugcauggaaagugugaaaaauggaacuuaugacuauccaaaauauuccgaagaaucaaaguuaaacagggaaaaaauugauggagugaaauuggaaucaaugggagucuaucagauucuggcgaucuacucaacugucgccaguucacuggugcuuuuggucucccugggggcaaucaguuucuggauguguucuaaugggucuuugcaguguagaauaugcaucuga

SEQ ID NO: 33030 - RNA, 1701 nt, Artificial Sequence
  derived and/or modified CDS sequence (wt) from hemagglutinin__InfluenzaA__ABG47840
augaaaguaaaacuacuaguccuguugugugcauuuacagcuacauaugcagacacaauauguauaggcuaccaugcgaacaacucaaccgacacuguugacacaguacuugagaagaacgugacagugacacacucugucaaccuacuugaggacagucacaacggaaaacuaugccgacuaaaaggaacagccccacuacaauuggguaauugcagcguugccggauggaucuuaggaaacccagaaugcgaaucacuguuuucuaaggaaucaugguccuacauugcagaaacaccaaacccugagaauggaacauguuacccaggguauuucgccgacuaugaggaacugagggagcaauugagcucaguaucaucauucgagagauucgaaauauuccccaaggaaagcucauggcccaaccacaccguaaccaaaggagugacggcaucaugcucccauaaugggaaaagcaguuuuuacaaaaauuugcuauggcugacggaaaagaauggcuuguacccaaaucugagcaaguccuauguaaacaacaaggagaaagaaguccuuguacuaugggguguucaucacccgucuaacauaggggaccaaagggccaucuaucauacagaaaaugcuuaugucucuguagugucuucacauuauagcagaagauucaccccagaaauagcaaaaagacccaaaguaagagaucaagaagggagaauuaacuacuacuggacucugcuggaacccggggacacaauaauauuugaggcaaauggaaaucuaauagcgccaugguacgcuuucgcacugaguagaggcuuugggucaggaaucaucaccucaaacgcaucaaugagugaaugugacgcuaagugucaaacaccccaaggagcuauaaacaguagucuuccuuuccagaauguacacccagucacaauaggagagugucccaaguaugucaggaguacaaaauuaaggaugguuacaggacuaagaaacaucccauccauucaaucuagagguuuguuuggagccauugccgguuucauugaagggggguggacuggaaugauagauggaugguaugguuaucaucaucagaaugaacaaggaucuggcuaugcugcagaccaaaaaagcacacaaaaugccauugaugggauuacaaacaaggugaauucuguaauugagaaaaugaacacucaauucacggcuguaggcaaagaauucaacaaauuagagagaaggauggaaaacuuaaauaagaaaguugaugauggauuucuggacauuuggacauauaaugcagaguuguugguucuccuggaaaaugaaaggacuuuggauuuucaugacucaaaugugaagaaucuguaugagaaaguaaaaaaccaauugaagaauaaugccaaagaaaucgggaacggguguuuugaauucuaucacaaguguaacaaugaaugcauggaaagugugaaaaauggaacuuaugacuauccaaaauauuccgaagaaucaaaguuaaacagggaaaaaauugauggagugaaauuggaaucaaugggcgucuaucagauucuggcgaucuacucaacugucgccaguucacuggugcuuuuggucucccugggggcaaucaguuucuggauguguucuaaugggucuuugcaguguagaauaugcaucuga

SEQ ID NO: 33031 - RNA, 1701 nt, Artificial Sequence
  derived and/or modified CDS sequence (wt) from hemagglutinin__InfluenzaA__ABG47851
augaagacuaucauugcuuugagcuacauuuuaugucugguuuucgcucaaaaacuucccggaaaugacaacagcacagcaacgcugugccugggacaucaugcagugccaaacggaacgcuagugaaaacaaucacgaaugaucaaauugaagugacuaaugcuacugagcugguucagaguuccucaacagguagaauaugcgacaguccucaccgaauccuugauggaaaaaacugcacacugauagaugcucuauugggagacccucauugugauggcuuccaaaauaaggaaugggaccuuuuuguugaacgcagcaaagcuuacagcaacuguuacccuuaugaugugccggauuaugccucccuuaggucacuaguugccucaucaggcacccuggaguuuaccaaugaaggcuucaauuggacuggagucgcucaggaugggaaaagcuaugcuugcaaaaggggaucuguuaacaguuucuuuaguagauugaauugguugcacaaauuagaauacaaauauccagcacugaacgugacuaugccaaacaaugacaaauuugacaaacuguacauuugggggguucaccacccgagcacggacagugaccaaaccagccuauauguucaagcaucagggagagucacagucucuaccaaaagaagccaacaaacuguaaucccgaauaucggguccagacccugggugaggggcaucuccaguagaauaagcaucuauuggacaauaguaaaaccgggagacauacuuuugauuaacagcacagggaaucuaauugcuccucgggguuacuucaaaauacgaaaugggaaaagcucaauaaugaggucagaugcacccauugacaacugcaauucugaaugcaucacuccaaauggaagcauucccaaugacaaaccuuuucaaaauguaaacaggaucacauauggggccugucccagauauguuaagcaaaacacucugaaauuggcaacagggaugcggaauguaccagagaaacaaacuagaggcauauucggcgcaaucgcagguuucauagaaaaugguugggagggaaugguagacgguugguacgguuucaggcaucaaaauucugagggcacaggacaagcagcagaucuuaaaagcacucaagcagcaaucgaucaaaucaacgggaaacugaauagguuaaucgagaaaacgaacgagaaauuccaucaaaucgaaaaagaauucucagaaguggaagggagaauucaggaccucgagaaauauguugaagacacuaaaauagaucucuggucuuacaacgcggagcuucuuguugcccuggagaaucaacauacaauugaucuaacugacucagaaaugaacaaacuguuugaaagaacaaggaagcaacugagggaaaaugcugaggacaugggcaaugguugcuucaaaauauaccacaaaugugacaaugccugcauagggucaaucagaaauggaacuuauaaccaugauguauacagagacgaagcauuaaacaaccgguuccagaucaaagguguugagcugaagucaggauacaaagauuggauccuauggauuuccuuugccauaucaugcuuuuugcuuuguguuguuuugcugggguucaucaugugggccugccaaaaaggcaacauuaggugcagcauuugcauuuga

SEQ ID NO: 33032 - RNA, 1701 nt, Artificial Sequence
  derived and/or modified CDS sequence (wt) from hemagglutinin__InfluenzaA__ABG47862
augaggacuaucauugcuuugagcuacauuuuaugucugguuuucgcucaaaaacuucccggaaaugacaacagcacggcaacgcugugccugggacaccaugcagugccaaacggaacgcuagugaaaacaaucacgaaugaccaaauugaagugacuaaugcuacugagcugguucagaguuccucaacagguagaauaugcaacaguccucaucgaauccuugauggaaaaaacugcacacugauagaugcucuauugggagacccucauugugauggcuuccaaaauaaggaaugggaccuuuuuguugaacgcagcaaagcuuacagcaacuguuacccuuaugaugugccggauuaugcuucccuuaggucacuaauugccucauccggcacccuggaguuuaccaaugaaggcuucaauuggacuggagucgcucaggauggaacaagcuaugcuugcaaaaggggaucuguuaaaaguuucuuuaguagauugaauugguugcacaaauuagaauacaaauauccagcacugaacgugacuaugccaaacaaugacaaauuugacaaauuguacauuugggggguucaccacccgaguacggacagugaccaaaccagccuauauguucaagcaucagggagagucacagucucuaccaaaagaagccaacaaacuguaaucccgaauaucgggucuagacccuggguaagggguguuuccagcaggauaagcaucuauuggacaauaguaaaaccgggagacauacuuuugauuaacagcacagggaaucuaauugcuccucgggguuacuucaaaauacgaagugggaaaagcucaauaaugaggucagaugcacccauuggcaacugcaauucugaaugcaucacuccaaauggaagcauucccaaugacaaaccuuuucaaaauguaaacaggaucacauauggggccugucccagauauguuaagcaaaacacucugaaauuggcaacagggaugcggaauguaccagagaaacaaacuagaggcauauucggcgcaaucgcagguuucauagaaaaugguugggagggaaugguagacgguugguacgguuucaggcaucaaaauucugagggcacaggacaagcagcagaucuuaaaagcacucaagcagcaaucaaccaaaucaacgggaaacugaauagguuaaucgagaaaacaaacgagaaauuccaucaaaucgaaaaagaauucucagaaguagaagggagaauucaggaccucgagaaauauguugaagacacuaaaauagaccucuggucuuacaacgcggagcuucuuguugcccuggagaaccaacauacaauugaucuaacugacucagaaaugaacaaacuguuugaaagaacaaggaagcaacugagggaaaaugcugaggacaugggcaaugguugcuucaaaauauaccacaaaugugacaaugccugcauagggucaaucagaaauggaacuuaugaccaugauguauacagagacgaagcauuaaacaaccgguuccagaucaaagguguugagcugaagucaggauacaaagauuggauccuauggauuuccuuugccauaucaugcuuuuugcuuuguguuguuuugcugggguucaucaugugggccugccaaaaaggcaacauuaggugcaacauuugcauuuga

SEQ ID NO: 33033 - RNA, 1701 nt, Artificial Sequence
  derived and/or modified CDS sequence (wt) from hemagglutinin__InfluenzaA__ABG47873
augaagacuaucauugcuuugagcuacauuuuaugucugguuuucgcucaaaaacuucccggaaaugacaacagcacagcaacgcugugccugggacaccaugcagugccaaacggaacgcuagugaaaacaaucacgaaugaucaaauugaagugacuaaugcuacugagcugguucagaguuccccaacagguagaauaugcgacaguccucaccgaauccuugauggaaagaacugcacacugauagaugcucuauugggagacccucauugugauggcuuccaaaauaaggaaugggaccuuuuuguugaacgcagcaaagcuuacagcaacuguuacccuuaugaugugccggauuaugccucccuuaggucacuaguugccucaucaggcacccuggaguuuaccaacgaaaacuucaauuggacuggagucgcucaggaugggaaaagcuaugcuugcaaaaggggaucuguuaacaguuucuuuaguagauugaauugguugcacaaauuagaauacaaauauccagcgcugaacgugacuaugccaaacaauggcaaauuugacaaauuguacauuugggggguucaccacccgagcacggacagugaccaaaccagccuauauguccgagcaucagggaaagucacagucucuaccaaaagaagccaacaaacuguaaucccggauaucggguauagaccauggguaaggggucuguccaguagaauaagcaucuauuggacaauaguaaaaccgggagacauacuuuugauuaauagcacagggaaucuaauugcuccucgggguuacuucaaaauacgaaaugggaaaagcucaauaaugaggucagaugcacccauuggcaacugcaguucugaaugcaucacuccaaauggaagcauucccaaugacaaaccuuuucaaaauguaaacaggauaacauauggggccugccccagauauguuaagcaaaacacucugaaauuggcaacagggaugcggaauguaccagagaaacaaacuagaggcauauucggcgcaaucgcagguuucauagaaaaugguugggagggaaugguagacgguugguacgguuucaggcaucagaauucugagggcacaggacaagcugcagaucuuaaaagcacucaagcagcaaucgaccaaaucaacgggaaacugaauagguuagucgagaaaacgaacgagaaauuccaucaaaucgaaaaagaauucucagaaguagaagggagaauucaggaccucgagaaauauguugaagacacuaaaauagaucucuggucuuacaaugcggagcuucuuguugcucuggagaaccaacauacaauugaucuaacugacucagaaaugaacaaacuauuugaaagaacaaggaagcaacugagggaaaaugcugaggacaugggcaaugguuguuucaaaauauaccacaaaugugacaaugccugcauagggucaaucagaaauggaacuuaugaccaugauguauacagagacgaagcauuaaacaaccgguuccagaucaaagguguugagcugaagucaggauacaaagauuggauccuauggauuuccuuugccauaucaugcuuuuugcuuugugugguuuugcuuggguucaucaugugggccugccaaaaaggcaacauuaggugcaacauuugcauuuga

SEQ ID NO: 33034 - RNA, 1701 nt, Artificial Sequence; identical to SEQ ID NO: 33003
  derived and/or modified CDS sequence (wt) from hemagglutinin__InfluenzaA__ABG47895

SEQ ID NO: 33035 - RNA, 1701 nt, Artificial Sequence
  derived and/or modified CDS sequence (wt) from hemagglutinin__InfluenzaA__ABG47906
augaagacuaucauugcuuugagcuacauuuuaugucugguuuucgcucaaaaacuucccggaaaugacaacagcacagcaacgcugugccugggacaccaugcagugccaaacggaacgcuagugaaaacaaucacgaaugaucaaauugaagugacuaaugcuacugagcugguucagaguuccccaacagguagaauaugcgacaguccucaccgaauccuugauggaaagaacugcacacugauagaugcucuauugggagacccucauugugauggcuuccaaaauaaggaaugggaccuuuuuguugaacgcagcaaagcuuacagcaacuguuacccuuaugaugugccggauuaugccucccuuaggucacuaguugccucaucaggcacccuggaguuuaccaacgaaaacuucaauuggacuggagucgcucaggaugggaaaagcuaugcuugcaaaaggggaucuguuaacaguuucuuuaguagauugaauugguugcacaaauuagaauacaaauauccagcgcugaacgugacuaugccaaacaauggcaaauuugacaaauuguacauuugggggguucaccacccgagcacggacagugaccaaaccagccuauauguccgagcaucagggaaagucacagucucuaccaaaagaagccaacaaacuguaaucccggauaucggguauagaccauggguaaggggucuguccaguagaauaagcaucuauuggacaauaguaaaaccgggagacauacuuuugauuaauagcacagggaaucuaauugcuccucgggguuacuucaaaauacgaaaugggaaaagcucaauaaugaggucagaugcacccauuggcaacugcaguucugaaugcaucacuccaaauggaagcauucccaaugacaaaccuuuucaaaauguaaacaggaucacauauggggccugccccagauauguuaagcaaaacacucugaaauuggcaacagggaugcggaauguaccagagaaacaaacuagaggcauauucggcgcaaucgcagguuucauagaaaaugguugggagggaaugguagacgguugguacgguuucaggcaucagaauucugagggcacaggacaagcugcagaucuuaaaagcacucaagcagcaaucgaccaaaucaacgggaaacugaauagguuagucgagaaaacgaacgagaaauuccaucaaaucgaaaaagaauucucagaaguagaagggagaauucaggaccucgagaaauauguugaagacacuaaaauagaucucuggucuuacaaugcggagcuucuuguugcucuggagaaccaacauacaauugaucuaacugacucagaaaugaacaaacuauuugaaagaacaaggaagcaacugagggaaaaugcugaggacaugggcaaugguuguuucaaaauauaccacaaaugugacaaugccugcauagggucaaucagaaauggaacuuaugaccaugauguauacagagacgaagcauuaaacaaccgguuccagaucaaagguguugagcugaagucaggauacaaagauuggauccuauggauuuccuuugccauaucaugcuuuuugcuuuguguuguuuugcuuggguucaucaugugggccugccaaaaaggcaacauuaggugcaacauuugcauuuga

SEQ ID NO: 33036 - RNA, 1701 nt, Artificial Sequence
  derived and/or modified CDS sequence (wt) from hemagglutinin__InfluenzaA__ABG47917
augaagacuaucauugcuuugagcuacauuuuaugucugguuuucgcucaaaaacuucccggaaaugacaacagcacagcaacgcugugccugggacaccaugcggugccaaacggaacgcuagugaaaacaaucacgaaugaucaaauugaagugacuaaugcuacugagcugguucagaguuccucaacagguagaauaugcgacaguccucaccgaauccuugauggaaaaaacugcacacugauagaugcucuauugggagacccucauugugauggcuuccaaaauaaggaaugggaccuuuuuguugaacgcagcaaagcuuacagcaacuguuacccuuaugaugugccggauuaugccucccuuaggucacuaguugccucaucaggcacccuggaguuuaucaaugaagacuucaauuggacuggagucgcucaggaugggaaaagcuaugcuugcaaaaggggaucuguuaacaguuucuuuaguagauugaauugguugcacaaauuagaauacaaauacccagcgcugaacgugacuaugccaaacaauggcaaauuugacaaauuguacauuugggggguucaccacccgagcacggacagugaccaaaccagccuauauguucgagcaucagggagagucacagucucuaccaaaagaagccaacaaacuguaaucccgaauaucggguuuagacccuggguaaggggucuguccaguagaauaagcaucuauuggacaauaguaaaaccgggagacauacuuuugauuaauagcacagggaaucuaauugcuccucgggguuacuucaaaauacggaaugggaaaagcucaauaaugaggucagaugcacccauuggcaacugcaguucugaaugcaucacuccaaauggaagcauucccaaugacaaaccuuuucaaaauguaaacaggaucacauauggggccugccccagauauguuaagcaaaacacucugaaguuggcaacagggaugcggaauguaccagagaaacaaacuagaggcauauucggcgcaaucgcagguuucauagaaaaugguugggagggaaugguagacgguugguacgguuucaggcaucaaaauucugagggcacaggacaagcagcagaccuuaaaagcacucaagcagcaaucgaccaaaucaacgggaaacugaauagguuaaucgagaaaacgaacgagaaauuccaucaaaucgaaaaagaauucucagaaguagaagggagaauucaggaccucgagaaauauguugaagacacuaaaauagaucucuggucuuacaacgcggggcuucuuguugcccuggagaaccaacauacaauugaucuaacugacucagaaaugaacaaacuguuugaaagaacaaggaagcaacugagggaaaaugcugaggacaugggcaaugguugcuucaaaauauaccacaaaugugacaaugccugcauagggucaaucagaaauggaacuuaugaccaugauguauacagagacgaagcauuaaacaaccgguuccagaucaaagguguugagcugaagucaggauacaaagauuggauccuauggauuuccuuugccauaucaugcuuuuugcuuuguguuguuuugcugggguucaucaugugggccugccaaaaaggcaacauuaggugcaacauuugcauuuga

SEQ ID NO: 33037 - RNA, 1701 nt, Artificial Sequence
  derived and/or modified CDS sequence (wt) from hemagglutinin__InfluenzaA__ABG47928
augaagacuaucauugcuuugagcuacauuuuaugucugguuuucgcucaaaaacuucccggaaaugacaacagcacagcaacgcugugccugggacaccaugcagugccaaacggaacgcuagugaaaacaaucacgaaugaucaaauugaagugacuaaugcuacugagcugguucagaguuccucaacagguagaauaugcgacaguccucaccgaauccuugauggaaaaaacugcacacugauagaugcucuauugggagacccucauugugauggcuuccaaaauaaggaaugggaccuuuuuguugaacgcagcaaagcuuacagcaacuguuacccuuaugaugugccggauuaugccucccuuaggucacuaguugccucaucaggcacccuggaguuuaucaaugaagacuucaauuggacuggagucgcucaggaugggaaaagcuaugcuugcaaaaggggaucuguuaacaguuucuuuaguagauugaauugguugcacaaauuagaauacaaauauccagcgcugaacgugacuaugccaaacaauggcaaauuugacaaauuguacauuugggggguucaccacccgagcacggacagugaccaaaccagccuauauguucgagcaucagggagagucacagucucuaccaaaagaagccaacaaacuguaaucccgaauaucggguuuagacccuggguaaggggucuguccaguagaauaagcaucuauuggacaauaguaaaaccgggagacauacuuuugauuaauagcacagggaaucuaauugcuccucgggguuacuucaaaauacgaaaugggaaaagcucaauaaugaggucagaugcacccauuggcaacugcaguucugaaugcaucacuccaaauggaagcauucccaaugacaaaccuuuucaaaauguaaacaggaucacauauggggccugccccagauauguuaagcaaaacacucugaaguuggcaacagggaugcggaauguaccagagaaacaaacuagaggcauauucggcgcaaucgcagguuucauagaaaaugguugggagggaaugguagacgguugguacgguuucaggcaucaaaauucugagggcacaggacaagcagcagaucuuaaaagcacucaagcagcaaucgaccaaaucaacgggaaacugaauagguuaaucgagaaaacgaacgagaaauuccaucaaaucgaaaaagaauucucagaaguagaagggagaauucaggaccucgagaaauauguugaagacacuaaaauagaucucuggucuuacaacgcggggcuucuuguugcccuggagaaccaacauacaauugaucuaacugacucagaaaugaacaaacuguuugaaagaacaaggaagcaacugagggaaaaugcugaggacaugggcaaugguugcuucaaaauauaccacaaaugugacaaugccugcauagggucaaucagaaauggaacuuaugaccaugauguauacagagacgaagcauuaaacaaccgguuccagaucaaagguguugagcugaagucaggauacaaagauuggauccuauggauuuccuuugccauaucaugcuuuuugcuuuguguuguuuugcugggguucaucaugugggccugccaaaaaggcaacauuaggugcaacauuugcauuuga

SEQ ID NO: 33038 - RNA, 1701 nt, Artificial Sequence
  derived and/or modified CDS sequence (wt) from hemagglutinin__InfluenzaA__ABG47939
augaagacuaucauugcuuugagcuacauuuuaugucugguuuucgcucaaaaacuucccggaaaugacaacagcacagcaacgcugugccugggacaccaugcagugccaaacggaacgcuagugaaaacaaucacgaaugaucaaauugaagugacuaaugcuacugagcugguucagaguuccucaacagguagaauaugcgacaguccuuaccgaauccuugaugggaaaaacugcacacugauagaugcucuauugggagacccucauugugauggcuuccaaaauaaggaaugggaccuuuuuguugaacgcagcaaagcuuacagcaacuguuacccuuaugaugugccggauuaugccucccuuaggucacuaguugccucaucaggcacccuggaguuuaucaaugaagacuucaauuggacuggagucgcucaggaugggaaaagcuaugcuugcaaaaggggaucuguuaacaguuucuuuaguagauugaauugguugcacaaauuagaauacaaauauccagcgcugaacgugacuaugccaaacaauggcaaauuugacaaauuguacauuugggggguucaccacccgagcacggacagugaccaaaccagccuauauguucgagcaucagggagagucacagucucuaccaaaagaagccaacaaacuguaaucccgaauaucggguuuagacccuggguaaggggucuguccaguagaauaagcaucuauuggacaauaguaaaaccgggagacauacuuuugauuaauagcacagggaaucuaauugcuccucgggguuacuucaaaauacgaaaugggaaaagcucaauaaugaggucagaugcacccauuggcaacugcaguucugaaugcaucacuccaaauggaagcauucccaaugacaaaccuuuucaaaauguaaacaggaucacauauggggccugccccagauauguuaagcaaaacacucugaaguuggcaacagggaugcggaauguaccagagaaacaaacuagaggcauauucggcgcaaucgcagguuucauagaaaaugguugggagggaaugguagacgguugguacgguuucaggcaucaaaauucugagggcacaggacaagcagcagaucuuaaaagcacucaagcagcaaucgaccaaaucaacgggaaacugaauagguuaaucgagaaaacgaacgagaaauuccaucaaaucgaaaaagaauucucagaaguagaagggagaauucaggaccucgagaaauauguugaagacacuaaaauagaucucuggucuuacaacgcggggcuucuuguugcccuggagaaccaacauacaauugaucuaacugacucagaaaugaacaaacuguuugaaagaacaaggaagcaacugagggaaaaugcugaggacaugggcaaugguugcuucaaaauauaccacaaaugugacaaugccugcauagggucaaucagaaauggaacuuaugaccaugauguauacagagacgaagcauuaaacaaccgguuccagaucaaagguguugagcugaagucaggauacaaagauuggauccuauggauuuccuuugccauaucaugcuuuuugcuuuguguuguuuugcugggguucaucaugugggccugccaaaaaggcaacauuaggugcaacauuugcauuuga

SEQ ID NO: 33039 - RNA, 1701 nt, Artificial Sequence
  derived and/or modified CDS sequence (wt) from hemagglutinin__InfluenzaA__ABG47950
augaagacuaucauugcuuugagcuacauucuaugucugguuuucgcucaaaaacuucccggaaaugacaacagcacagcaacgcugugccugggacaccaugcggugccaaacggaacgcuagugaaaacaaucacgaaugaucaaauugaagugacuaaugcuacugagcugguucagaguuccucaacagguagaauaugcgacaguccucaccgaauccuugauggaaaaaacugcacacugauagaugcucuauugggagacccucauugugauggcuuccaaaauaaggaaugggaccuuuuuguugaacgcagcaaagcuuacagcaacuguuacccuuaugaugugccggauuaugccucccuuaggucacuaguugccucauuaggcacccuggaguuuaucaaugaagacuucaauuggacuggagucgcucaggauggaaaaagcuauucuugcaaaaggggaucuguuaacaguuucuuuaguagauugaauugguugcacaaauuagaauacaaauauccagcgcugaacgugacuaugccaaacaauggcaaauuugacaaauuguacauuugggggguucaccacccgagcacggacagugaccaaaccagccuauaugcucgagcaucagggagagucacagucucuaccaaaagaagccaacaaacuguaaucccgaauaucggguuuagacccuggguaaggggucuguccaguagaauaagcaucuauuggacaauaguaaagccgggagacauacuuuugauuaauagcacagggaaucuaauugcuccucgggguuacuucaaaauacggacugggaaaagcucaauaaugaggucagaugcacccauuggcaacugcaguucugaaugcaucacuccaaauggaaacauucccaaugacaaaccuuuucaaaauguaaacaggaucacauauggggccugccccagauauguuaagcaaaacacucugaaguuggcaacagggaugcggaauguaccagagaaacaaacuagaggcauauucggcgcaaucgcagguuucauagaaaaugguugggagggaaugguagacgguugguacgguuucaggcaucaaaauucugagggcacaggacaagcagcagaucuuaaaagcacucaagcagcaaucgaccaaaucaacgggaaacugaauagguuaaucgagaaaacgaacgagaaauuccaucagaucgaaaaagaauucucagaaguagaagggagaauucaggaccucgagaaauauguugaagacacuaaaauagaucucuggucuuacaacgcgggguuucuuguugcccuggagaaccaacauacaauugaucuaacugacucagaaaugaacaaacuguuugaaagaacaaggaagcaacugagggaaaaugcugaggacaugggcaaugguugcuucaaaauauaccacaaaugugacaaugccugcauagggucaaucagaaauggaacuuaugaccaugauguauacagagacgaagcauuaaacaaccgguuccagaucaaagguguugagcugaagucaggauacaaagauuggauccuauggauuuccuuugccauaucaugcuuuuugcuuuguguuguuuuguugggguucaucaugugggccugccaaaaaggcaacauuaggugcaacauuugcauuuga

SEQ ID NO: 33040 - RNA, 1701 nt, Artificial Sequence
  derived and/or modified CDS sequence (wt) from hemagglutinin__InfluenzaA__ABG47961
augaagacuaucauugcuuugagcuacauuuuaugucugguuuucgcucaaaaacuccccggaaaugacaacagcacagcaacgcugugccugggacaccaugcagugccaaacggaacgcuagugaagacaaucacgaaugaucaaauugaagugacuaaugcuacugagcugguucagaguuccucaacagguagaauaugcgacaguccucaccgaauccuugauggaaaaaacugcacacugauagaugcucuauugggagacccucauugugauggcuuccaaaauaaggaaugggaccuuuuuguugaacgcagcaaagcuuacagcaacuguuacccuuaugaugugccggauuaugccucccuuaggucacuaguugccucaucaggcacccuggaguuuaucaaugaagacuucaauuggacuggagucgcucaggaugggaaaagcuauucuugcaaaaggggaucuguuaacaguuucuuuaguagauugaauugguugcacaaauuagaauacaaauauccagcgcugaacgugacuaugccaaacaauggcaaauuugacaaauuguacauuugggggguucaccacccgagcacggacagugaccaaaccagccuauauguucgagcaucagggggagucacagucucuaccaaaagaagccaacaaacuguaaucccgaauaucggguccagacccuggguaaggggucuguccaguagaauaagcaucuauuggacaauaguaaaaccgggagacauacuuuugauuaauagcacagggaaucuaauugcuccucgggguuacuucaaaaugcgaaaugggaaaagcucaauaaugaggucagaugcacccauuggcaacugcaguucugaaugcaucacuccaaauggaagcauucccaaugacaaaccuuuucaaaauguaaacaggaucacauauggggccugccccagauauguuaagcaaaacacucugaaauuggcaacagggaugcggaauguaccagagaaacaaacuagaggcauauucggcgcaaucgcagguuucauagaaaaugguugggagggaaugguagacgguugguacgguuucaggcaucaaaauucugagggcacaggacaagcagcagaucuuaaaagcacucaagcagcaaucgaccaaaucaacgggaaacugaauagguuaaucgguaaaacgaacgagaaauuccaucaaaucgaaaaagaauucucagaaguagaagggagaauucaggaccucgagaaauauguugaagacacuaaaauagaucucuggucuuacaacgcggagcuucuuguugcccuggagaaccaacauacaauugaucuaacugacucagaaaugaacaaacuguuugaaagaacaaggaagcaacugagagaaaaugcugaggacaugggcaaugguugcuucaaaauauaccacaaaugugacaaugccugcauagggucaaucagaaauggaacuuaugaccaugauguauacagagacgaagcauuaaacaaccgguuccagaucaaagguguugagcugaagucaggauacaaagauuggauccuauggauuuccuuugccauaucaugcuuuuugcuuuguguuguuuugcugggguucaucaugugggccugccaaaaaggcaacauuaggugcaacauuugcauuuga

SEQ ID NO: 33041 - RNA, 1701 nt, Artificial Sequence
  derived and/or modified CDS sequence (wt) from hemagglutinin__InfluenzaA__ABG47972
augaagacuaucauugcuuugagcuacauuuuaugucugguuuucgcucaaaaacuucccggaaaugacaacagcacagcaacgcugugccugggacaucaugcagugccaaacggaacgcuagugaaaacaaucacgaaugaucaaauugaagugacuaaugcuacugagcugguucagaguuccucaacagguagaauaugcgacaguccucaccgaauccuugauggaaaaaacugcacacugauagaugcucuauugggagacccucauugugauggcuuccaaaauaaggaaugggaccuuuuuguugaacgcagcaaagcuuacagcaacuguuacccuuaugaugugccggauuaugccucccuuaggucacuaguugccucaucaggcacccuggaguuuaucaaugaagacuucaauuggacuggagucgcucaggaugggaaaagcuaugcuugcaaaaggggaucuguuaacaguuucuuuaguagauugaauugguugcacaaauuagaauacaaauauccagcgcugaacgugacuaugccaaacaauggcaaauuugacaaauuguacauuugggggguucaccacccgagcacggacagugaccaaaccagccuauauguucgagcaucagggagagucacagucucuaccaaaagaagccaacaaacuguaaucccgaauaucggguuuagacccuggguaaggggucuguccaguagaauaagcaucuauuggacaauaguaaaaccgggagacauacuuuugauuaauagcacagggaaucuaauugcuccucgggguuacuucaaaauacgaaaugggaaaagcucaauaaugaggucagaugcacccauuggcaacugcaguucugaaugcaucacuccaaauggaagcauucccaaugacaaaccuuuucaaaauguaaacaggaucacauauggggccugccccagauauguuaagcaaaacacucugaaguuggcaacagggaugcggaauguaccagagaaacaaacuagaggcauauucggcgcaaucgcagguuucauagaaaaugguugggagggaaugguagacgguugguacgguuucaggcaucaaaauucugagggcacaggacaagcagcagaucuuaaaagcacucaagcagcaaucgaccaaaucaacgggaaacugaauagguuaaucgagaaaacgaacgagaaauuccaucaaaucgaaaaagaauucucagaaguagaagggagaauucaggaccucgagaaauauguugaagacacuaaaauagaucucuggucuuacaacgcggggcuucuuguugcccuggagaaccaacauacaauugaucuaacugacucagaaaugaacaaacuguuugaaagaacaaggaagcaacugagggaaaaugcugaggacaugggcaaugguugcuucaaaauauaccacaaaugugacaaugccugcauagggucaaucagaaauggaacuuaugaccaugauguauacagagacgaagcauuaaacaaccgguuccagaucaaagguguugagcugaagucaggauacaaagauuggauccuauggauuuccuuugccauaucaugcuuuuugcuuuguguuguuuugcugggguucaucaugugggccugccaaaaaggcaacauuaggugcaacauuugcauuuga

SEQ ID NO: 33042 - RNA, 1701 nt, Artificial Sequence
  derived and/or modified CDS sequence (wt) from hemagglutinin__InfluenzaA__ABG47983
augaagacuaucauugcuuugagcuacauuuuaugucugguuuucgcucaaaaacuucccggaaaugacaacagcacagcaacgcugugccugggacaccaugcagugccaaacggaacgcuagugaaaacaaucacgaaugaucaaauugaagugacuaaugcuacugagcugguucagaguuccucaacagguagaauaugcgacaguccucaccgaauccuugauggaaaaaacugcacacugauagaugcucuauugggagacccucauugugauggcuuccaaaauaaggaaugggaccuuuuuguugaacgcagcaaagcuuacagcaacuguuacccuuaugaugugccggauuaugccucccuuaggucacuaguugccucaucaggcacccuggaguuuaucaaugaagacuucaauuggacuggagucgcucaggaugggaaaagcuaugcuugcaaaaggggaucuguuaacaguuucuuuaguagauugaauuggcugcacaaauuagaauacaaauauccagcgcugaacgugacuaugccaaacaauggcaaauuugacaaauuguacauuugggggguucaccacccgagcacggacagugaccaaaccagccuauauguucgagcaucagggagagucacagucucuaccaaaagaagccaacaaacuguaaucccgaauaucggguuuagacccuggguaaggggucuguccaguagaauaagcaucuauuggacaauaguaaaaccgggagacauacuuuugauuaauagcacagggaaucuaauugcuccucgggguuacuucaaaauacgaaaugggaaaagcucaauaaugaggucagaugcacccauuggcaacugcaguucugaaugcaucacuccaaauggaagcauucccaaugacaaaccuuuucaaaauguaaacaggaucacauauggggccugccccagauauguuaagcaaaacacucugaaguuggcaacagggaugcggaauguaccagagaaacaaacuagaggcauauucggcgcaaucgcagguuucauagaaaaugguugggagggaaugguagacgguugguacgguuucaggcaucaaaauucugagggcacaggacaagcagcagaucuuaaaagcacucaagcagcaaucgaccaaaucaacgggaaacugaauagguuaaucgagaaaacgaacgagaaauuccaucaaaucgaaaaagaauucucagaaguagaagggagaauucaggaccucgagaaauauguugaagacacuaaaauagaucucuggucuuacaacgcggggcuucuuguugcccuggagaaccaacauacaauugaucuaacugacucagaaaugaacaaacuguuugaaagaacaaggaagcaacugagggaaaaugcugaggacaugggcaaugguugcuucaaaauauaccacaaaugugacaaugccugcauagggucaaucagaaauggaacuuaugaccaugauguauacagagacgaagcauuaaacaaccgguuccagaucaaaggugucgagcugaagucaggauacaaagauuggauccuauggauuuccuuugccauaucaugcuuuuugcuuuguguuguuuugcugggguucaucaugugggccugccaaaaaggcaacauuaggugcaacauuugcauuuga

SEQ ID NO: 33043 - RNA, 1701 nt, Artificial Sequence
  derived and/or modified CDS sequence (wt) from hemagglutinin__InfluenzaA__ABG47994
augaagacuaucauugcuuugagcuacauuuuaugucugguuuucgcucaaaaacuucccggaaaugacaacagcacagcaacgcugugccugggacaccaugcagugccaaacggaacgcuagugaaaacaaucacgaaugaucaaauugaagugacuaaugcuacugagcugguucagaguuccucaacagguagaauaugcgacaguccucaccgaauccuugauggaaaaaacugcacacugauagaugcucuauugggagacccucauugugauggcuuccaaaauaaggaaugggaccuuuuuguugaacgcagcaaagcuuacagcaacuguuacccuuaugaugugccggauuaugccucccuuaggucacuaguugccucaucaggcacccuggaguuuaucaaugaagacuucaauuggacuggagucgcucaggaugggaaaagcuaugcuugcaaaaggggaucuguuaacaguuucuuuaguagauugaauugguugcacaaauuagaauacaaauauccagcgcugaacgugacuaugccaaacaauggcaaauuugacaaauuguacauuugggggguucaccacccgagcacggacagugaccaaaccagccuauauguucgagcaucagggagagucacagucucuaccaaaagaagccaacaaacuguaaucccgaauaucggguuuagacccuggguaaggggucuguccaguagaauaagcaucuauuggacaauaguaaaaccgggagacauacuuuugauuaauagcacagggaaucuaauugcuccucgggguuacuucaaaauacgaaaugggaaaagcucaauaaugaggucagaugcacccauuggcaacugcaguucugaaugcaucacuccaaauggaagcauucccaaugacaaaccuuuucaaaauguaaacaggaucacauauggggccugccccagauauguuaagcaaaacacucugaaguuggcaacagggaugcggaauguaccagagaaacaaacuagaggcauauucggcgcaauugcagguuucauagaaaaugguugggagggaaugguagacgguugguacgguuucaggcaucaaaauucugagggcacaggacaagcagcagaucuuaaaagcacucaagcagcaaucgaccaaaucaacgggaaacugaauagguuaaucgagaaaacgaacgagaaauuccaucaaaucgaaaaagaauucucagaaguagaagggagaauucaggaccucgagaaauauguugaagacacuaaaauagaucucuggucuuacaacgcggggcuucuuguugcccuggagaaccaacauacaauugaucuaacugacucagaaaugaacaaacuguuugaaagaacaaggaagcaacugagggaaaaugcugaggacaugggcaaugguugcuucaaaauauaccacaaaugugacaaugccugcauagggucaaucagaaauggaacuuaugaccaugauguauacagagacgaagcauuaaacaaccgguuccagaucaaagguguugagcugaagucaggauacaaagauuggauccuauggauuuccuuugccauaucaugcuuuuugcuuuguguuguuuugcugggguucaucaugugggccugccaaaaaggcaacauuaggugcaacauuugcauuuga

SEQ ID NO: 33044 - RNA, 1701 nt, Artificial Sequence
  derived and/or modified CDS sequence (wt) from hemagglutinin__InfluenzaA__ABG48005
augaagacuaucauugcuuugagcuacauuuuaugucugguuuucgcucaaaaacuucccggaaaugacaacagcacagcaacgcugugccugggacaccaugcagugccaaacggaacgcuagugaaaacaaucacgaaugaucaaauugaagugacuaaugcuacugagcugguucagaguuccucaacagguagaauaugcgacaguccucaccgaauccuugauggaaaaaacugcacacugauagaugcucuauugggagacccucauugugauggcuuccaaaauaaggaaugggaccuuuuuguugaacgcagcaaagcuuacagcaacuguuacccuuaugaugugccggauuaugccucccuuaggucacuaguugccucaucaggcacccuggaguuuaucaaugaagacuucaauuggacuggagucgcucaggaugggaaaagcuaugcuugcaaaaggggaucuguuaacaguuucuuuaguagauugaauuggcugcacaaauuagaauacaaauauccagcgcugaacgugacuaugccaaacaauggcaaauuugacaaauuguacauuugggggguucaccacccgagcacggacagugaccaaaccagccuauauguucgagcaucagggagagucacagucucuaccaaaagaagccaacaaacuguaaucccgaauaucggguuuagacccuggguaaggggucuguccaguagaauaagcaucuauuggacaauaguaaaaccgggagacauacuuuugauuaauagcacagggaaucuaauugcuccucgggguuacuucaaaauacgaaaugggaaaagcucaauaaugaggucagaugcacccauuggcaacugcaguucugaaugcaucacuccaaauggaagcauucccaaugacaaaccuuuucaaaauguaaacaggaucacauauggggccugccccagauacguuaagcaaaacacucugaaguuggcaacagggaugcggaauguaccagagaaacaaacuagaggcauauucggcgcaaucgcagguuucauagaaaaugguugggagggaaugguagacgguugguacgguuucaggcaucaaaauucugagggcacaggacaagcagcagaucuuaaaagcacucaagcagcaaucaaccaaaucaacgggaaacugaauagguuaaucgagaaaacgaacgagaaauuccaucaaaucgaaaaagaauucucagaaguagaagggagaauucaggaccucgagaaauauguugaagacacuaaaauagaucucuggucuuacaacgcggggcuucuuguugcccuggagaaccaacauacaauugaucuaacugacucagaaaugaacaaacuguuugaaagaacaaggaagcaacugagggaaaaugcugaggacaugggcaaugguugcuucaaaauauaccacaaaugugacaaugccugcauagggucaaucagaaauggaaccuaugaccaugauguauacagagaugaagcauuaaacaaccgguuccagaucaaaggugucgagcugaagucaggauacaaagauuggauccuauggauuuccuuugccauaucaugcuuuuugcuuuguguuguuuugcugggguucaucaugugggccugccaaaaaggcaacauuaggugcaacauuugcauuuga

SEQ ID NO: 33045 - RNA, 1701 nt, Artificial Sequence; identical to SEQ ID NO: 33037
  derived and/or modified CDS sequence (wt) from hemagglutinin__InfluenzaA__ABG48016

SEQ ID NO: 33046 - RNA, 1701 nt, Artificial Sequence; identical to SEQ ID NO: 33037
  derived and/or modified CDS sequence (wt) from hemagglutinin__InfluenzaA__ABG48027

SEQ ID NO: 33047 - RNA, 1698 nt, Artificial Sequence
  derived and/or modified CDS sequence (wt) from hemagglutinin__InfluenzaA__ABG48049
augaaaguaaaacuacugguccuguuauguacauuuacagcuacauaugcagacacaauauguauaggguaccaugccaacaacucaaccgacacuguugacacaguacuugagaagaaugugacagugacacacucugucaacuuacuugaggacagucacaauggaaaacuaugucuacuaaaaggaauagccccacuacaauuggguaauugcagcguugccggauggaucuuaggaaacccagaaugcgaauuacugauuuccaaggaaucaugguccuacauuguagaaacaccaaauccugagaauggaacauguuacccaggguauuucgccgacuaugaggaacugagggagcaauugaguucaguaucuucauuugagagauucgaaauauuccccaaagaaagcucauggcccaaccacaccguaaccggaguaucagcaucaugcucccauaaugggaaaagcaguuuuuacagaaauuugcuauggcugacggggaagaaugguuuguacccaaaccugagcaaguccuaugcaaacaacaaagagaaagaaguccuuguacuaugggguguucaucacccgccuaacauaggggaccaaagggcccucuaucauacagaaaaugcuuaugucucuguagugucuacacauuauagcagaagauucaccccagaaauagccaaaagacccaaaguaagagaucaggaaggaagaaucaacuacuacuggacucugcuggaacccggggauacaauaauauuugaggcaaauggaaaucuaauagcgccacgguaugcuuucgcacugaguagaggcuuuggaucaggaaucaucaccucaaaugcaccaauggaugaaugugaugcgaagugucaaacaccucagggagcuauaaacagcagucuuccuuuucagaacguacacccagucacaauaggagaguguccaaaguaugucaggagugcaaaauuaaggaugguuacaggacuaaggaacaucccauccauucaauccagagguuuguuuggagccauugccgguuucauugaagggggguggacuggaaugguagaugggugguaugguuaucaucaucagaaugagcaaggaucuggcuaugccgcagaucaaaaaagcacacaaaaugccauuaacgggauuacaaacaaggugaauucuguaauugagaaaaugaacacucaauucacagcugugggcaaagaauucaacaaauuggaaagaaggauggaaaacuuaaauaaaaaaguugaugauggguuucuagacauuuggacauauaaugcagaauuguugguucuacuggaaaaugaaaggacuuuggauuuccaugacuccaaugugaagaaucuguaugagaaaguaaaaagccaauuaaagaauaaugccaaagaaauaggaaacggguguuuugaauucuaucacaaguguaacaaugaaugcauggagagugugaaaaauggaacuuaugacuauccaaaauauuccgaagaaucaaaguuaaacagggagaaaauugauggagugaaauuggaaucaaugggagucuaucagauucuggcgaucuacucaacugucgccaguucccugguucuuuuggucucccugggggcaaucagcuucuggauguguuccaaugggucuuugcaguguagaauaugcaucuga

SEQ ID NO: 33048 - RNA, 1701 nt, Artificial Sequence
  derived and/or modified CDS sequence (wt) from hemagglutinin__InfluenzaA__ABG48060
augaagacuaucauugcuuugagcuacauuuuaugucugguuuucgcucaaaaacuucccggaaaugacaacagcacggcaacgcugugccuggggcaccaugcagugccaaacggaacgcuagugaaaacaaucacgaaugaccaaauugaagugaccaaugcuacugagcugguucagaguuccucaacagguggaauaugcgacaguccucaccaaauccuugauggagaaaacugcacacuaauagaugcucuauugggagacccucauugugauggcuuccaaaauaaggaaugggaccuuuuuguugaacgcagcaaagccuacagcaacuguuacccuuaugaugugccggauuaugccucccuuaggucacuaguugccucauccggcacacuggaguuuaacaaugaaagcuucaauuggacuggagucgcucagaauggaacaagcucugcuugcaaaaggagaucuaauaaaaguuucuuuaguagauugaauugguugcaccaauuaaaauacaaauacccagcacugaacgugacuaugccaaacaaugaaaaauuugacaaauuguacauuugggggguucaccacccgaguacggacagugaccaaaucagccuauaugcucaagcaccagggagagucacagucucuaccaaaagaagccaacaaacuguaaucccgaauaucggaucuagacccuggguaaggggugucuccagcagaauaagcaucuauuggacaauaguaaagccgggagacauacuuuugauuaacugcacagggaaucuaauugcuccucgggguuacuucaaaauacgaagugggaaaagcucaauaaugaggucagaugcauccauuggcaaaugcaauucugaaugcaucacuccaaauggaagcauucccaaugacaaaccauuucaaaauguaaacaggaucacauauggggccugucccagauauguuaagcaaaacacucugaaauuggcaacagggaugcggaauguaccagagaaacaaacuagaggcauauucggcgcaaucgcggguuucauagaaaaugguugggagggaaugguggacgguugguacgguuucaggcaucaaaauucugagggcacaggacaagcagcagaucucaaaagcacucaagcagcaaucaaccaaaucaacgggaaacugaauagguuaaucgagaaaacgaacgagaaauuccaucaaauugaaaaagaauucucagaaguggaagggagaauucaggaccucgagaaauauguugaggacacuaaaauagaucucuggucguacaacgcggagcuucuuguugcccuggagaaccagcauacaauugaucuaacugacucagaaaugaacaaacuauuugaaagaacaaagaagcaacugagggaaaaugcugaggauaugggcaaugguuguuucaaaauauaccacaaaugugacaaugccugcauagggucaaucagaaaugggacuuaugaccaugauguauacagagacgaagcauuaaacaaccgguuccagaucaaagguguugagcugaagucaggauacaaagauuggauccuauggauuuccuuugccauaucauguuuuuugcuuuguguugucuugcugggguucaucaugugggccugccaaaaaggcaacauuaggugcaacauuugcauuuga

SEQ ID NO: 33049 - RNA, 1701 nt, Artificial Sequence; identical to SEQ ID NO: 32779
  derived and/or modified CDS sequence (wt) from hemagglutinin__InfluenzaA__ABG48071

SEQ ID NO: 33050 - RNA, 1701 nt, Artificial Sequence
  derived and/or modified CDS sequence (wt) from hemagglutinin__InfluenzaA__ABG48082
augaagacuaucauugcuuugagcuacauuuuaugccugguuuucgcucaaaaacuucccggaaaugacaacagcacggcaacgcugugccuggggcaucaugcagugccaaacggaacgcuagugaaaacaaucacgaaugaccaaauugaaguaacuaaugcuacugagcugguucagaguuccucaacagguagaauaugcgacaguccucaccaaauccuugauggagaaaacugcacacuaauagaugcucuauugggagacccucauugugauggcuuccaaaauaaggaaugggaccuuuuuguugaacgcagcaaagccuacagcaacuguuacccuuaugaugugccggauuaugucucccuuaggucacuaguugccucaucaggcacgcuggaguuuaacaaugaaagcuucaauuggacuggagucgcucagaauggaacaagcucugcuugcaaaaggagaucugauaaaaguuucuuuaguagauugaauugguugcaccaauuaaaauacaaauauccagcacugaacgugacuaugccaaacaaugaaaaauuugacaaauuguacauuugggggguucuccacccggguacagacagugaccaaaucagccuauaugcucaagcaucagggagagucacagucucuaccaaaagaagccaacaaacuguaaucccgaauaucgggucuagacccuggguaaggggugucuccagcagaauaagcaucuauuggacaauaguaaaaccgggagacauacuuuugauuaacagcacagggaaucuaauugcuccucgggguuacuucaaaauacgaagugggaaaagcucaauaaugaggucagaugcacccauuggcaaaugcaauucugaaugcaucacuccaaauggaagcauucccaauggcaaaccauuucaaaauguaaacaggaucacauauggggccugucccagauauguuaagcaaaacacucugaaauuggcaacagggaugcggaaugugccagagaaacaaacuagaggcauauucggugcaaucgcgggcuucauagaaaaugguugggagggaaugauggacgguugguacgguuucaggcaucagaauucugagggcacagggcaagcagcagaucuuaaaagcacucaagcagcaaucaaccaaaucaacgggaaacugaauagguuaaucgagaaaacgaacgagaaauuccaucaaauugaaaaagaauucucagaaguagaagggagaauucaggaccucgagaaauaugucgaggacacuaaaauagaucucuggucguacaaugcggagcuucuuguugcccuggagaaccaacauacaauugaucuaacugacucagaaaugaacaaacuguuugaaagaacaaagaagcaacugagggaaaaugcugaggauaugggcaaugguuguuucaaaauauaccacaaaugugacaaugccugcauagggucaaucagaaauggaacuuaugaccaugauguauacagagacgaagcauugaacaaccgguuccagaucaaagguguugagcugaagucaggauacaaagauuggauccuauggauuuccuuugccauaucauguuuuuugcuuuguauuguuuuacugggguucaucaugugggccugccaaaaaggcaacauuaggugcaacauuugcauuuga

SEQ ID NO: 33051 - RNA, 1701 nt, Artificial Sequence
  derived and/or modified CDS sequence (wt) from hemagglutinin__InfluenzaA__ABG48104
augaagacuaucauugcuuugagcuacauuuuaugucugguuuucgcucaaaaacuucccggaaaugacaacagcacggcaacgcugugccuggggcaccaugcagugccaaacggaacgcuagugaaaacaaucacgaaugaccaaauugaagugacuaaugcuacugagcugguucagaguuccucaacagguagaauaugcgacaguccucaccaaauccuugauggagaaaacugcacacuaauagaugcucuauugggagacccucauugugauggcuuccaaaauaaggaaugggaccuuuuuguugaacgcagcagagccuacagcaacuguuacccuuaugaugugccggauuaugucucccuuaggucacuaguugccucaucaggcacgcuggaguuuaacaaugaaagcuucaauuggacuggagucgcucagaauggaacaagcucugcuugcaaaaggagaucugauaaaaguuucuuuaguagauugaauugguugcaccaauuaaaauacaaauauccagcacugaacgugacuaugccaaacaaugaaaaauuugacaaauuguacauuugggggguucaccacccggguacagacagugaccaaaucagccuauaugcucaagcaucagggagagucacagucucuaccaaaagaagccaacaaacuguaauuccgaauaucggaucuagacccuggguaaggggugucuccagcagaauaagcaucuauuggacaauaguaaaaccgggagacauacuuuugauuaacagcacagggaaucuaauugcuccuagggguuacuucaaaauacgaagugggaaaaguucaauaaugaggucagaugcacccauuggcaaaugcaauucugaaugcaucacuccaaauggaagcauucccaaugacaaaccauuucaaaauguaaacaggaucacauaugggcccugucccagauauguuaagcaaaacacucugaaauuggcaacagggaugcggaaugugccagagaaacaaacuagaggcauauucggugcaauugcggguuucauagaaaaugguugggagggaaugauggacgguugguacgguuucaggcaucaaaauucugagggcacagggcaagcagcagaucuuaaaagcacucaagcagcaaucaaccaaaucaacgggaaacugaauagguuaaucgagaaaacgaacgagaaauuccaucaaauugaaaaagaauucucagaaguagaagggagaauucaggaccucgagaaauauguugaggacacuaaaauagaucucuggucguacaaugcggagcuucuuguugcccuggagaaccaacauacaauugaucuaacugacucagaaaugaacaaacuguuugaaagaacaaagaagcaacugagggaaaaugcugaggauaugggcaaugguuguuucaaaauauaccacaaaugugacaaugccugcauagggucaauuagaaauggaacuuaugaccaugauguauacagagacgaagcauuaaacaaccgguuccagaucaaagguguugagcugaagucaggauacaaagauuggauccuauggauuuccuuugccauaucauguuuuuugcuuuguauuguuuugcugggguucaucaugugggccugccaaaaaggcaacauuaggugcaacauuugcauuuga

SEQ ID NO: 33052 - RNA, 1701 nt, Artificial Sequence; identical to SEQ ID NO: 33016
  derived and/or modified CDS sequence (wt) from hemagglutinin__InfluenzaA__ABG48115

SEQ ID NO: 33053 - RNA, 1701 nt, Artificial Sequence
  derived and/or modified CDS sequence (wt) from hemagglutinin__InfluenzaA__ABG48126
augaagacuaucauugcuuugagcuacauuuuaugccugguuuucgcucaaaaacuucccggaaaugacaacagcacggcaacgcugugucuggggcaucaugcagugccaaacggaacgcuagugaaaacaaucacgaaugaccaaauugaaguaacuaaugcuacugagcugguucagaguuccucaacagguagaauaugcgacaguccucaccaaauccuugauggagaaaacugcacacuaauagaugcucuauugggagacccucauugugauggcuuccaaaauaaggaaugggaccuuuuuguugaacgcagcaaagccuacagcaacuguuacccuuaugaugugccggauuaugucucccuuaggucacuaguugccucaucaggcacgcuggaguuuaacaaugaaagcuucaauuggacuggagucgcucagaauggaacaagcucugcuugcaaaaggagaucugauaaaaguuucuuuaguagauugaauugguugcaccaauuaaaauacaaauauccagcacugaacgugacuaugccaaacaaugaaaaauuugacaaauuguacauuugggggguucaccacccggguacagacagugaccaaaucagccuauaugcucaagcaucggggagagucacagucucuaccaaaagaagccaacaaacuguaaucccgaauaucggaucuagacccuggguaaggggugucuccagcagaauaagcaucuauuggacaauaguaaaaccgggagacauacuuuugauuaacagcacagggaaucuaauugcuccucgggguuacuucaaaauacgaagugggaaaagcucaauaaugaggucagaugcacccauuggcaaaugcaauucugaaugcaucacuccaaauggaagcauucccaaugacaaaccauuucaaaauguaaacaggaucacauauggggccugucccagauauguuaagcaaaacacucugaaauuggcaacagggaugcggaaugugccagagaaacaaacuagaggcauauucggugcaaucgcgggcuucauagaaaaugguugggagggaaugauggacgguugguacgguuucaggcaucaaaauucugagggcacagggcaagcagcagaucuuaaaagcacucaagcagcaaucaaccaaaucaacgggaaacugaauagguuaaucgagaaaacgaacgagaaauuccaucaaauugaaaaagaauucucagaaguagaagggagaauucaggaccucgagaaauauguugaggacacuaaaauagaucucuggucguacaaugcggagcuucuuguugcccuggagaaccaacauacaauugaucuaacugacucagaaaugaacaaacuguuugaaagaacaaagaagcaacugagggaaaaugcugaggauaugggcaaugguuguuucaaaauauaccacaaaugugacaaugccugcauagggucaaucagaaauggaacuuaugaccauaauguauacagagacgaagcauugaacaaccgguuccagaucaaagguguugagcugaagucaggauacaaagauuggguccuauggauuuccuuugccauaucauguuuuuugcuuuguauuguuuugcugggguucaucaugugggccugccaaaaaggcaacauuaggugcaacauuugcauuuga

SEQ ID NO: 33054 - RNA, 1701 nt, Artificial Sequence
  derived and/or modified CDS sequence (wt) from hemagglutinin__InfluenzaA__ABG48148
augaagacuaucauugcuuugagcuauauuuuaugccugguuuucgcucaaaaacuucccggaaaugacaacagcacggcaacgcugugucuggggcaucaugcagugccaaacggaacgcuagugaaaacaaucacgaaugaccaaauugaaguaacuaaugcuacugagcugguucagaguuccucaacagguagaauaugcgacaguccucaccaaauccuugauggagaaaacugcacacuaauagaugcucuauugggagacccucauugugauggcuuccaaaauaaggaaugggaccuuuuuguugaacgcagcaaagccuacagcaacuguuacccuuaugaugugccggauuaugucucccuuaggucacuaguugccucaucaggcacgcuggaguuuaacaaugaaagcuucaauuggacuggagucgcucagaauggaacaagcucugcuugcaaaaggagaucugauaaaaguuucuuuaguagauugaauugguugcaccaauuaaaauacaaauauccagcacugaacgugacuaugccaaacaaugaaaaauuugacaaauuguacauuugggggguucaccacccggguacagacagugaccaaaucagccuauaugcucaagcaucggggagagucacagucucuaccaaaagaagccaacaaacuguaaucccgaauaucggaucuagacccuggguaaggggugucuccagcagaauaagcaucuauuggacaauaguaaaaccgggagacauacuuuugauuaacagcacagggaaucuaauugcuccucgggguuacuucaaaauacgaagugggaaaagcucaauaaugaggucagaugcacccauuggcaaaugcaauucugaaugcaucacuccaaauggaagcauucccaaugacaaaccauuucaaaauguaaacaggaucacauauggggccugucccagauauguuaagcaaaacacucugaaauuggcaacagggaugcggaaugugccagagaaacaaacuagaggcauauucggugcaaucgcgggcuucauagaaaaugguugggagggaaugauggacgguugguacgguuucaggcaucaaaauucugagggcacagggcaagcagcagaucuuaaaagcacucaagcagcaaucaaccaaaucaacgggaaacugaauagguuaaucgagaaaacgaacgagaaauuccaucaaauugaaaaagaauucucagaaguagaagggagaauucaggaccucgagaaauauguugaggacacuaaaauagaucucuggucguacaaugcggagcuucuuguugcccuggagaaccaacauacaauugaucuaacugacucagaaaugaacaaacuguuugaaagaacaaagaagcaacugagggaaaaugcugaggauaugggcaaugguuguuucaaaauauaccacaaaugugacaaugccugcauagggucaaucagaaauggaacuuaugaccaugauguauacagagacgaagcauugaacaaccgguuccagaucaaagguguugagcugaagucaggauacaaagauuggguccuauggauuuccuuugccauaucauguuuuuugcuuuguauuguuuugcugggguucaucaugugggccugccaaaaaggcaacauuaggugcaacauuugcauuuga

SEQ ID NO: 33055 - RNA, 1701 nt, Artificial Sequence
  derived and/or modified CDS sequence (wt) from hemagglutinin__InfluenzaA__ABG48159
augaagacuaucauugcuuugagcuacauuuuaugccugguuuucgcucaaaaacuucccggaaaugacaacagcacggcaacgcugugucuggggcaucaugcagugccaaacggaacgcuagugaaaacaaucacgaaugaccaaauugaaguaacuaaugcuacugagcugguucagaguuccucaacagguagaauaugcgacaguccucaccaaauccuugauggagaaaacugcacacuaauagaugcucuauugggagacccucauugugauggcuuccaaaauaaggaaugggaccuuuuuguugagcgcagcaaagccuacagcaacuguuacccuuaugaugugccggauuaugucucccuuaggucacuaguugccucaucaggcacgcuggaguuuaacaaugaaagcuucaauuggacuggagucgcucagaauggaacaagcucugcuugcaaaaggagaucugauaaaaguuucuuuaguagauugaauugguugcaccaauuaaaauacaaauauccagcacugaacgugacuaugccaaacaaugaaaaauuugacaaauuguacauuugggggguucaccacccggguacagacagugaccaaaucagccuauaugcucaagcaucagggagagucacagucucuaccaaaagaagccaacaaacuguaaucccgaauaucggaucuagacccuggguaaggggugucuccagcagaauaagcaucuauuggacaauaguaaaaccgggagacauacuuuugauuaacagcacagggaaucuaauugcuccucgggguuacuucaaaauacgaagugggaaaagcucaauaaugaggucagaugcacccauuggcaaaugcaauucugaaugcaucacuccaaauggaagcauucccaaugacaaaccauuucaaaauguaaacaggaucacauauggggccugucccagauauguuaagcaaaacacucugaaauuggcaacagggaugcggaaugugccagagaaacaaacuagaggcauauucggugcaaucgcgggcuucauagaaaaugguugggagggaaugauggacgguugguacgguuucaggcaucaaaauucugagggcacagggcaagcagcagaucuuaaaagcacucaagcagcaaucaaccaaaucaacgggaaacugaauagguuaaucgagaaaacgaacgagaaauuccaucaaauugaaaaagaauucucagaaguagaagggagaauucaggaccucgagaaauauguugaggacacuaaaauagaucucuggucguacaaugcggagcuucuuguugcccuggagaaccaacauacaauugaucuaacugacucagaaaugaacaaacuguuugaaagaacaaagaagcaacugagggaaaaugcugaggauaugggcaaugguuguuucaaaauauaccacaaaugugacaaugccugcauagggucaaucagaaauggaacuuaugaccaugauguauacagagacgaagcauugaacaaccgguuccagaucaaagguguugagcuaaagucaggauacaaagauuggguccuauggauuuccuuugccauaucauguuuuuugcuuuguauuguuuugcugggguucaucaugugggccugccaaaaaggcaacauuaggugcaacauuugcauuuga

SEQ ID NO: 33056 - RNA, 1701 nt, Artificial Sequence
  derived and/or modified CDS sequence (wt) from hemagglutinin__InfluenzaA__ABG48170
augaagacuaucauugcuuugagcuacauuuuaugccugguuuuugcucaaaaacuucccggaaaugacaacagcacggcaacgcugugccuggggcaccaugcagugccaaacggaacgcuagugaaaacaaucacgaaugaccaaauugaaguaacuaaugcuacugagcugguucagaguuccucaacagguagaauaugcgacaguccucaccaaauccuugauggagaaaacugcacacuaauagaugcucuauugggagacccucauugugauggcuuccaaaauaaggaaugggaccuuuuuguugaacgcagcaaagccuacagcaacuguuacccuuaugaugugccggauuaugucucccuuaggucacuaguugccucaucaggcacgcuggaguuuaacaaugaaaguuucaauuggacuggagucgcucagaauggaacaagcucugcuugcaaaaggagaucugauaaaaguuucuuuaguagacugaauugguugcaccaauuaaaauacaaauauccagcacugaacgugacuaugccaaacaaugaaaaauuugacaaauuguacauuugggggguucaccacccggguacagacagugaccaaaucagccuauaugcucaagcaucagggagagucacagucucuaccaaaagaagccaacaaacuguaaucccgaauaucggaucuagacccuggguaaggggugucuccagcagaauaagcaucuauuggacaauaguaaaaccgggagacauacuuuugauuaacagcacagggaaucuaauugcuccucgggguuacuucaaaauacgaagugggaaaagcucaauaaugaagucagaugcacccauuggcaaaugcaauuuugaaugcaucacuccaaauggaagcauucccaauggcaaaccauuucaaaauguaaacaggaucacauauggggccugucccagauauguuaagcaaaacacucugaaauuggcaacagggaugcggaaugugccagagaaacaaacuagaggcauauucggugcaaucgcgggcuucauagaaaaugguugggagggaaugauggacgguugguacgguuucaggcaccagaauucugagggcacagggcaagcagcagaucuuaaaagcacucaagcagcaaucaaccaaaucaacgggaaacugaauagguuaaucgagaaaacgaacgagaaauuccaucaaauugaaaaagaauucucagaaguagaagggagaauucaggaccucgagaaauaugucgaggacacuaaaauagaucucuggucguacaaugcggagcuucuuguugcccuggagaaccaacauacaauugaucuaacugacucagaaaugaacaaacuguuugaaagaacaaagaagcaacugagggaaaaugcugaggauaugggcaaugguuguuucaaaauauaccacaaaugugacaaugccugcauagggucaaucagaaauggaacuuaugaccaugauguguacagagaugaagcauuaaacaaccgguuccagaucaaagguguugaacugaagucaggauacaaagauuggauccuauggauuuccuuugccauaucauguuuuuugcuuuguauuguuuuacugggguucaucaugugggccugccaaaaaggcaacauuaggugcaacauuugcauuuga

SEQ ID NO: 33057 - RNA, 1701 nt, Artificial Sequence
  derived and/or modified CDS sequence (wt) from hemagglutinin__InfluenzaA__ABG48181
augaagacuaucauugcuuugagcuacauuuuaugccugguuuucgcucaaaaacuucccggaaaugacaacagcacggcaacgcugugucuggggcaucaugcagugccaaacggaacgcuagugaaaacaaucacgaaugaccaaauugaaguaacuaaugcuacugagcugguucagaguuccucaacagguagaauaugcgacaguccucaccaaauccuugauggagaaaacugcacacuaauagaugcucuauugggagacccucauugugauggcuuccaaaauaaggaaugggaccuuuuuguugaacgcagcaaagccuacagcaacuguuacccuuaugaugugccggauuaugucucccuuaggucacuaguugccucaucaggcacgcuggaguuuaacaaugaaagcuucaauuggacuggagucgcucagaauggaacaagcuaugcuugcaaaaggagaucugauaaaaguuucuuuaguagauugaauugguugcaccaauuaaaauacaaauauccagcacugaacgugacuaugccaaacaaugaaaaauuugacaaauuguacauuugggggguucaccacccggguacagacagugaccaaaucagccuauaugcucaagcaucggggagagucacagucucuaccaaaagaagccaacaaacuguaaucccgaauaucggaucuagacccuggguaaggggugucuccagcagaauaagcaucuauuggacaauaguaaaaccgggagacauacuuuugauuaacagcacagggaaucuaauugcuccucgggguuacuucaaaauacgaagugggaaaagcucaauaaugaggucagaugcacccauuggcaaaugcaauucugaaugcaucacuccaaauggaagcauucccaaugacaaaccauuucaaaauguaaacaggaucacauauggggccugucccagauauguuaagcaaaacacucugaaauuggcaacagggaugcggaaugugccagagaaacaaacuagaggcauauucggugcaaucgcgggcuucauagaaaaugguugggagggaaugauggacgguugguacgguuucaggcaucaaaauucugagggcacagggcaagcagcagaucuuaaaagcacucaagcagcaaucaaccaaaucaacgggaaacugaauagguuaaucgagaaaacgaacgagaaauuccaucaaauugaaaaagaauucucagaaguagaagggagaauucaggaccucgagaaauauguugaggacacuaaaauagaucucuggucguacaaugcggagcuucuuguugcccuggagaaccaacauacaauugaucuaacugacucagaaaugaacaaacuguuugaaagaacaaagaagcaacugagggaaaaugcugaggauaugggcaaugguuguuucaaaauauaccacaaaugugacaaugccugcauagggucaaucagaaauggaacuuaugaccaugauguauacagagacgaagcauugaacaaccgguuccagaucaaagguguugagcugaagucaggauacaaagauuggguccuauggauuuccuuugccauaucauguuuuuugcuuuguauuguuuugcugggguucaucaugugggccugccaaaaaggcaacauuaggugcaacauuugcauuuga

SEQ ID NO: 33058 - RNA, 1701 nt, Artificial Sequence
  derived and/or modified CDS sequence (wt) from hemagglutinin__InfluenzaA__ABG48192
augaagacuaucauugcuuugagcuacauuuuaugccugguuuucgcucaaaaacuucccggaaaugacaacagcacggcaacgcugugucuggggcaucaugcagugccaaacggaacgcuagugaaaacaaucacgaaugaccaaauugaaguaacuaaugcuacugagcugguucagaguuccucaacagguagaauaugcgacaguccucaccaaauccuugauggagaaaacugcacacuaauagaugcucuauugggagacccucauugugauggcuuccaaaauaaggaaugggaccuuuuuguugagcgcagcaaagccuacagcaacuguuacccuuaugaugugccggauuaugucucccuuaggucacuaguugccucaucaggcacgcuggaguuuaacaaugaaagcuucaauuggacuggagucgcucagaauggaacaagcucugcuugcaaaaggagaucugauaaaaguuucuuuaguagauugaauugguuacaccaauuaaaauacaaauauccagcacugaacgugacuaugccaaacaaugaaaaauuugacaaauuguacauuugggggguucaccacccggguacagacagugaccaaaucagccuauaugcucaagcaucagggagagucacagucucuaccaaaagaagccaacaaacuguaaucccgaauaucggaucuagacccuggguaaggggugucuccagcagaauaagcaucuauuggacaauaguaaaaccgggagacauacuuuugauuaacagcacagggaaucuaauugcuccucgggguuacuucaaaauacgaagugggaaaagcucaauaaugaggucagaugcacccauuggcaagugcaauucugaaugcaucacuccaaauggaagcauucccaaugacaaaccauuucaaaauguaaacaggaucacauauggggccugucccagauauguuaagcaaaacacucugaaauuggcaacagggaugcggaaugugccagagaaacaaacuagaggcauauucggugcaaucgcgggcuucauagaaaaugguugggagggaaugauggacgguugguacgguuucaggcaucaaaauucugagggcacagggcaagcagcagaucuuaaaagcacucaagcagcaaucaaccaaaucaacgggaaacugaauagauuaaucgagaaaacgaacgagaaauuccaucaaauugaaaaagaauucucagaaguagaagggagaauucaggaccucgagaaauauguugaggacacuaaaauagaucucuggucguacaaugcggagcuucuuguugcccuggagaaccaacauacaauugaucuaacugacucagaaaugaacaaacuguuugaaagaacaaagaagcaacugagggaaaaugcugaggauaugggcaaugguuguuucaaaauauaccacaaaugugacaaugccugcauagggucaaucagaaauggaacuuaugaccaugauguauacagagacgaagcauugaacaaccgguuccagaucaaagguguugagcuaaagucaggauacaaagauuggguccuauggauuuccuuugccauaucauguuuuuugcuuuguauuguuuugcugggguucaucaugugggccugccaaaaaggcaacauuaggugcaacauuugcauuuga

SEQ ID NO: 33059 - RNA, 1701 nt, Artificial Sequence
  derived and/or modified CDS sequence (wt) from hemagglutinin__InfluenzaA__ABG48203
augaagacuaucauugcuuugagcuacauucuaugucugguuuucgcucaaaaacuucccggaaaugacaacagcacggcaacgcugugccuugggcaccaugcaguaccaaacggaacgauagugaaaacaaucacaaaugaccaaauugaaguuacuaaugcuacugagcugguucagaguuccucaacagguggaauaugcgacaguccucaucagauccuugauggagaaaacugcacacuaauagaugcucuauugggagacccucagugugauggcuuccaaaauaagaaaugggaccuuuuuguugaacgcagcaaagccuacagcaacuguuacccuuaugaugugccggaucaugccucccuuaggucacuaguugccucauccggcacacuggaguuuaacaaugaaagcuucgauuggacuggagucacucagaauggaacaagcucugcuugcaaaaggagaucuaauaaaaguuucuuuaguagauugaauugguugacccacuuaaaauacaaauacccagcauugaacgugacuaugccaaacaaugaaaaauuugacaaauuguacauuugggggguucaccacccggguacggacagugaccaaaucagccuauaugcucaagcaucaggaagaaucacagucucuaccaaaagaagccaacaaacuguaaucccgaauaucggaucuagacccaggguaagggaugucuccagccgaauaagcaucuauuggacaauaguaaaaccgggagacauacuuuugauuaacagcacagggaaucuaauugcuccucgggguuacuucaaaauacgaagugggaaaagcucaauaaugagaucagaugcacccauuggcaaaugcaauucugaaugcaucacuccaaauggaagcauucccaaugacaaaccauuucaaaauguaaacaggaucacauauggggccugucccagauauguuaagcaaaacacucugaaauuggcaacagggaugcgaaauguaccagagaaacaaacuagaggcauauuuggcgcaaucgcggguuucauagaaaaugguugggagggaaugguggacgguugguacgguuucaggcaucaaaauucugagggcacaggacaagcagcagaucucaaaagcacucaagcagcaaucaaccaaaucaaugggaaacugaauagguuaaucgggaaaacaaacgagaaauuccaucagauugaaaaagaauucucagaaguagaagggagaauucaggaccucgagaaauauguugaggacacuaaaauagaucucuggucauacaacgcggagcuucuuguugcccuggagaaccaacauacaauugaucuaacugacucagaaaugaacaaacuguuugaaagaacaaagaagcaacugagggaaaaugcugaggauaugggcaaugguuguuucaaaauauaccacaaaugugacaaugccugcauagggucaaucagaaauggaacuuaugaccaugauguguacagagaugaagcauuaaacaaccgguuccagaucaaagguguugagcugaagucaggauauaaagauuggauccuauggauuuccuuugccauaucauguuuuuugcuuuguguugcuuuguugggguucaucaugugggccugccaaaaaggcaacauuaggugcaacguuugcauuuga

SEQ ID NO: 33060 - RNA, 1701 nt, Artificial Sequence; identical to SEQ ID NO: 32532
  derived and/or modified CDS sequence (wt) from hemagglutinin__InfluenzaA__ABG48214

SEQ ID NO: 33061 - RNA, 1701 nt, Artificial Sequence; identical to SEQ ID NO: 32532
  derived and/or modified CDS sequence (wt) from hemagglutinin__InfluenzaA__ABG48236

SEQ ID NO: 33062 - RNA, 1701 nt, Artificial Sequence
  derived and/or modified CDS sequence (wt) from hemagglutinin__InfluenzaA__ABG48247
augaagacuaucauugcuuugagcuacauucuaugucugguuuucgcucaaaaacuucccggaaaugacaacaacacggcaacgcugugccuugggcaccaugcaguaccaaacggaacgauagugaaaacaaucacaaaugaccaaauugaaguuacuaaugcuacugagcugguucagaguuccucaacagguggaauaugcgacaguccucaucagauccuugauggagaaaacugcacacuaauagaugcucuauugggagacccucagugugauggcuuccaaaauaagaaaugggaccuuuuuguugaacgcagcaaagccuacagcaacuguuacccuuaugaugugccggaucaugccucccuuaggucacuaguugccucauccggcacacuggaguuuaacaaugaaagcuucgauuggacuggagucacucagaauggaacaagcucugcuugcaaaaggagaucuaauaaaaguuucuuuaguagauugaauugguugacccacuuaaaauacaaauacccagcauugaacgugacuaugccaaacaaugaaaaauuugacaaauuguacauuugggggguucaccacccggguacggacagugaccaaaucagccuauaugcucaagcaucaggaagaaucacagucucuaccaaaagaagccaacaaacuguaaucccgaauaucggaucuagacccaggguaagggaugucuccagccgaauaagcaucuauuggacaauaguaaaaccgggagacauacuuuugauuaacagcacagggaaucuaauugcuccucgggguuacuucaaaauacgaagugggaaaagcucaauaaugagaucagaugcacccauuggcaaaugcaauucugaaugcaucacuccaaauggaagcauucccaaugacaaaccauuucaaaauguaaacaggaucacauauggggccugccccagauauguuaagcaaaacacucugaaauuggcaacagggaugcgaaauguaccagagaaacaaacuagaggcauauuuggcgcaaucgcggguuucauagaaaaugguugggagggaaugguggacgguugguacgguuucaggcaucaaaauucugagggcacaggacaagcagcagaucucaaaagcacucaagcagcaaucaaccaaaucaaugggaaacugaauagguuaaucgggaaaacaaacgagaaauuccaucagauugaaaaagaauucucagaaguagaagggagaauucaggaccucgagaaauauguugaggacacuaaaauagaucucuggucauacaacgcggagcuucuuguugcccuggagaaccaacauacaauugaucuaacugacucagaaaugaacaaacuguuugaaagaacaaagaagcaacugagggaaaaugcugaggauaugggcaaugguuguuucaaaauauaccacaaaugugacaaugccugcauagggucaaucagaaauggaacuuaugaccaugauguguacagagaugaagcauuaaacaaccgguuccagaucaaagguguugagcugaagucaggauauaaagauuggauccuauggauuuccuuugccauaucauguuuuuugcuuuguguugcuuuguugggguucaucaugugggccugccaaaaaggcaacauuaggugcaacauuugcauuuga

SEQ ID NO: 33063 - RNA, 1701 nt, Artificial Sequence
  derived and/or modified CDS sequence (wt) from hemagglutinin__InfluenzaA__ABG48269
augaagacuaucauugcuuugagcuacauucuaugucugguuuucgcucaaaaacuucccggaaaugacaacagcacggcaacgcugugccuugggcaccaugcaguaccaaacggaacaauagugaaaacaaucacgaaugaccaaauugaaguuacuaaugcuacugaacugguucagaguuccccaacagguggaauaugcgacaguccucaucagauccuugauggagaaaacugcacacuaauagaugcucuauugggagacccucagugugauggcuuccaaaauaagaaaugggaccuuuuugucgaacgcagcaaagcccacagcaacuguuacccuuaugaugugccggauuaugccucccuuaggucacuaguugccucauccggcacacuggaguuuaacaaugaaagcuucaauuggacuggagucacucaaaauggaacaaguucugcuugcaaaaggagaucuaauaaaaguuucuuuaguagauugaauugguugacccacuuaaaauucaaauacccagcauugaacgugacuaugccaaacaaugaaaaauuugacaaauuguacauuugggggguucaccacccggguacggacaaugaccaaaucagccuauaugcucaagcaucaggaagaaucacagucucuaccaaaagaagccaacaaacuguaaucccgaauaucggaucuagacccaggguaagggauguccccagcagaauaagcaucuauuggacaauaguaaaaccgggagacauacuuuugauuaacagcacagggaaucuaauugcuccucgggguuacuucaaaauacgaagugggaaaagcucaauaaugagaucagaugcacccauuggcaaaugcaauucugaaugcaucacuccaaauggaagcauucccaaugacaaaccauuucaaaacguaaacaggaucacauauggggccugucccagauauguuaagcaaaacacucugaaauuggcaacagggaugcgaaacguaccagagaaacaaacuagaggcauauuuggcgcaaucgcggguuucauagaaaaugguugggagggaaugguggacgguugguacgguuucaggcaucaaaauucugagggaacaggacaagcagcagaucucaaaagcacucaagcagcaaucaaccaaaucaaugggaagcugaauagguugaucgggaaaacaaacgagaaauuccaucaaauugaaaaagaauucucagaaguagaagggagaauucaggaccucgagaaauauguugaggacacuaaaauagaucucuggucauacaacgcggagcuucuuguugcccuggagaaccaacauacaauugaucuaacugacucagaaaugaacaaacuguuugaaagaacaaagaagcaacugagggaaaaugcugaggauaugggcaaugguuguuucaaaauauaccacaaaugugacaaugccugcauagggucaaucagaaauggaacuuaugaccaugauguauacagagaugaagcauuaaacaaccgguuccagaucaaagguguugagcugaagucaggauacaaagauuggauccuauggauuuccuuugccauaucauguuuuuugcuuuguguugcuuuguugggguucaucaugugggccugccaaaaaggcaacauuaggugcaacauuugcauuuga

SEQ ID NO: 33064 - RNA, 1701 nt, Artificial Sequence
  derived and/or modified CDS sequence (wt) from hemagglutinin__InfluenzaA__ABG48291
augaagacuaucauugcuuugagcuacauuuuaugucugguuuucgcucaaaaacuucccggaaaugacaacagcacagcaacgcugugccugggacaucaugcagugccaaacggaacgcuagugaaaacaaucacgaaugaucaaauugaagugacuaaugcuacugagcugguucagaguuccucaacagguagaauaugcgacaguccucaccgaauccuugauggaaaaaacugcacacugauagaugcucuauugggagacccucauugugauggcuuccaaaauaaggaaugggaccuuuuuguugaacgcagcaaagcuuacagcaacuguuacccuuaugaugugccggauuaugccucccuuaggucacuaguugccucaucaggcacccuggaguuuaucaaugaagacuucaauuggacuggagucgcucaggaugggggaagcuaugcuugcaaaaggggaucuguuaacaguuucuuuaguagauugaauugguugcacaaaucagaauacaaauacccagcgcugaacgugucuaugccaaacaauggcaaauuuaacaaauuguacauuugggggguucaccacccgagcacggacagugaccaaaccagccuauauguucgagcaucagggagagucacagucucuaccaaaagaagccaacaaacuguaaccccgaauaucgggucuagacccuggguaaggggucuguccaguagaauaagcaucuauuggacaauaguaaaaccgggagacauacuuuugauuaauagcacagggaaucuaauugcuccucgggguuacuucaaaauacgaaaugggaaaagcucaauaaugaggucagaugcacccauuggcaccugcaguuuugaaugcaucacuccaaauggaagcauucccaaugacaaaccuuuucaaaauguaaacaggaucacauauggggccugccccagauauguuaagcaaaacacucugaaauuggcaacagggaugcggaauguaccagagaaacaaacuagaggcauauucggcgcaaucgcagguuucauagaaaaugguugggagggaaugguagacgguugguacgguuucaggcaucaaaauucugagggcacaggacaagcagcagaucuuaaaagcacucaagcagcaaucgaccaaaucaacgggaaacugaauagguuaaucgagaaaacgaacgagaaauuccaucaaaucgaaaaagaauucucagaaguagaagggagaauucaggaccucgagaaauauguugaagacacuaaaauagaucucuggucuuacaacgcggagcuucuuguugcccuggagaaccaacauacaauugaucuaacugacucagaaaugaacaaacuguuugaaaaaacaaggaagcaacugagggaaaaugcugaggacaugggcaaugguugcuucaaaauauaccacaaaugugacaaugccugcauagggucaaucagaaauggaacuuaugaccaugauguauacagagaugaagcauuaaacaaccgguuccagaucaaagguguugagcugaagucaggauacaaagauuggauccuauggauuuccuuugccauaucaugcuuuuugcuuuguguuguuuugcugggguucaucaugugggccugccaaaaaggcaacauuaggugcaacauuugcauuuga

SEQ ID NO: 33065 - RNA, 1701 nt, Artificial Sequence
  derived and/or modified CDS sequence (wt) from hemagglutinin__InfluenzaA__ABG48335
augaagacuaucauugcuuugagcuacauuuuaugucugguuuucgcucaaaaacuucccggaaaugacaacagcacagcaacgcugugccugggacaccaugcagugccaaacggaacgcuagugaaaacaaucacgaaugaucaaauugaagugacuaaugcuacugagcugguucagaguuccucaacagguagaauaugcgacaguccucaccgaauccuugauggaaaaaacugcacacugauagaugcucuauugggagacccucauugugauggcuuccaaaauaaggaaugggaccuuuuuguugaacgcagcaaagcuuacagcaacuguuacccuuaugaugugccggauuaugccucccuuaggucacuaguugccucaucaggcacccuagaguuuaucaaugaagacuucaauuggacuggaguagcucaggaugggaaaagcuaugcuugcaaaaggggaucuguuaacaguuucuuuaguagauugaauugguugcacaaauuagaauacaaauauccagcgcugaacgugacuaugccaaacaauggcaaauuugacaaauuguacauuugggggguucaccacccgagcacggacagugaccaaaccagccuauauguucgagcaucagggagagucacagucucuaccaaaagaagccaacaaacuguaaucccgaauaucgggucuagacccuggguaaggggucuguccaguagaauaagcaucuauuggacaauaguaaaaccgggagacauacuuuugauuaauagcacagggaaucuaauugcuccucgggguuacuucaaaauacgaaaugggaaaagcucaauaaugaggucagaugcacccauuggcaacugcaguucugaaugcaucacuccaaauggaagcauucccaaugacaaaccuuuucaaaauguaaacaggaucacauauggggccugccccagauauguuaagcaaaacacucugaaauuggcaacagggaugcggaauguaccagagaaacaaacuagaggcauauucggcgcaaucgcagguuucauagaaaaugguugggagggaaugguagacgguugguacgguuucaggcaucaaaauucugagggcacaggacaagcagcagaucuuaaaagcacucaagcagcaaucgaccaaaucaacgggaaacugaauagguuaaucgagaaaacgaacgagaaauuccaucaaaucgaaaaagaauucucagaaguagaagggagaauucaggaccucgagaaauauguugaagacacuaaaauagaucucuggucuuacaacgcggagcuucuuguugcccuggagaaccaacauacaauugaucuaacugacucagaaaugaacaaacuguuugaaagaacaaggaagcaacugagggaaaaugcugaggacaugggcaaugguugcuucaaaauauaccacaaaugugacaaugccugcauagggucaaucagaaauggaacuuaugaccaugauguauacagagacgaagcauuaaacaaccgguuccagaucaaagguguugagcugaagucaggauacaaagauuggauccuauggauuuccuuugccauaucaugcuuuuugcuuuguguuguuuugcugggguucaucaugugggccugccaaaaaggcaacauuaggugcaacauuugcauuuga

SEQ ID NO: 33066 - RNA, 1701 nt, Artificial Sequence
  derived and/or modified CDS sequence (wt) from hemagglutinin__InfluenzaA__ABG48346
augaagacuaucauugcuuugagcuacauuuuaugucugguuuucgcucaaaaacuucccggaaaugacaacagcacagcaacgcugugccugggacaccaugcagugccaaacggaacgcuagugaaaacaaucacgaaugaucaaauugaagugacuaaugcuacugagcugguucagaguuccucaacagguagaauaugcgacaguccucaccgaauccuugauggaaaaaacugcacacugauagaugcucuauugggagacccucauugugauggcuuccaaaauaaggaaugggaccuuuuuguugaacgcaacaaagcuuacagcaacuguuacccuuaugaugugccggauuaugccucccuuaggucacuaguugccucaucaggcacccuagaguuuaucaaugaagacuucaauuggacuggaguagcucaggaugggaaaagcuaugcuugcaaaaggggaucuguuaacaguuucuuuaguagauugaauugguugcacaaauuagaauacaaauauccagcgcugaacgugacuaugccaaacaauggcaaauuugacaaauuguacauuugggggguucaccacccgagcacggacagugaccaaaccagccuauauguucgagcaucagggagagucacagucucuaccaaaagaagccaacaaacuguaaucccgaauaucgggucuagacccuggguaaggggucuguccaguagaauaagcaucuauuggacaauaguaaaaccgggagacauacuuuugauuaauagcacagggaaucuaauugcuccucgggguuacuucaaaauacgaaaugggaaaagcucaauaaugaggucagaugcacccauuggcaacugcaguucugaaugcaucacuccaaauggaagcauucccaaugacagaccuuuucaaaauguaaacaggaucacauauggggccugccccagauauguuaagcaaaacacucugaaauuggcaacagggaugcggaauguaccagagaaacaaacuagaggcauauucggcgcaaucgcagguuucauagaaaaugguugggagggaaugguagacgguugguacgguuucaggcaucaaaauucugagggcacaggacaagcagcagaucuuaaaagcacucaagcagcaaucgaccaaaucaacgggaaacugaauagguuaaucgagaaaacgaacgagaaauuccaucaaaucgaaaaagaauucucagaaguagaagggagaauucaggaccucgagaaauauguugaagacacuaaaauagaucucuggucuuacaacgcggagcuucuuguugcccuggagaaccaacauacaauugaucuaacugacucagaaaugaacaaacuguuugaaagaacaaggaagcaacugagggaaaaugcugaggacaugggcaaugguugcuucaaaauauaccacaaaugugacaaugccugcauagggucaaucagaaauggaacuuaugaccaugauguauacagagacgaagcauuaaacaaccgguuccagaucaaagguguugagcugaagucaggauacaaagauuggauccuauggauuuccuuugccauaucaugcuuuuugcuuuguguuguuuugcugggguucaucaugugggccugccaaaaaggcaacauuaggugcaacauuugcauuuga

SEQ ID NO: 33067 - RNA, 1701 nt, Artificial Sequence
  derived and/or modified CDS sequence (wt) from hemagglutinin__InfluenzaA__ABG48357
augaagacuaucauugcuuugagcuacauuuuaugucugguuuucgcucaaaaacuucccggaaaugacaacagcacagcaacgcugugccugggacaccaugcagugccaaacggaacgcuagugaaaacaaucacgaaugaucaaauugaagugacuaaugcuacugagcugguucagaguuccucaacagguagaauaugcgacaguccucaccgaauccuugauggaaaaaacugcacacugauagaugcucuauugggagacccucauugugauggcuuccaaaauaaggaaugggaccuuuuuguugaacgcagcaaagcuuacagcaacuguuacccuuaugaugugccggauuaugccucccuuaggucacuaguugccucaucaggcacccuggaguuuaucaaugaagacuucaauuggacuggagucgcucaggaugggaaaagcuaugcuugcaaaaggggaucuguuaacaguuucuuuaguagauugaauugguugcacaaauuagaauacaaauauccagcgcugaacgugacuaugccaaacaauggcaaauuugacaaauuguacauuugggggguucaccacccgagcacggacagugaccaaaccagccuauauguucgagcaucagggagagucacagucucuaccaaaagaagccaacaaacuguaaucccgaauaucgggucuagacccuggguaaggggucuguccaguagaauaagcaucuauuggacaauaguaaaaccgggagacauacuuuugauuaauagcacagggaaucuaauugcuccucgggguuacuucaaaauacgaaaugggaaaagcucaauaaugaggucagaugcacccauuggcaacugcaguuccgaaugcaucacuccaaauggaagcauucccaaugacaaaccuuuucaaaauguaaacaggaucacauauggggccugccccagauauguuaagcaaaacacucugaaauuggcaacagggaugcggaauguaccagagaaacaaacuagaggcauauucggcgcaaucgcagguuucauagaaaaugguugggagggaaugguagacgguugguacgguuucaggcaucaaaauucugagggcacaggacaagcagcagaucuuaaaagcacucaagcagcaaucgaccaaaucaacgggaaacugaauagguuaaucgagaaaacgaacgagaaauuccaucaaaucgaaaaagaauucucagaaguagaagggagaauucaggaccucgagaaauauguugaagacacuaaaauagaucucuggucuuacaacgcggagcuucuuguugcccuggagaaccaacauacaauugaucuaacugacucagaaaugaacaaacuguuugaaagaacaaggaagcaacugagggaaaaugcugaggacaugggcaaugguugcuucaaaauauaccacaaaugugacaaugccugcauagggucaaucagaaauggaacuuaugaccaugauguauacagagacgaagcauuaaacaaccgguuccagaucaaagguguugagcugaagucaggauacaaagauuggauccuauggauuuccuuugccauaucaugcuuuuugcuuuguguuguuuugcugggguucaucaugugggccugccaaaaaggcaacauuaggugcaacauuugcauuuga

SEQ ID NO: 33068 - RNA, 1701 nt, Artificial Sequence
  derived and/or modified CDS sequence (wt) from hemagglutinin__InfluenzaA__ABG48368
augaagacuaucauugcuuugagcuacauuuuaugucugguuuucgcucaaaaacuucccggaaaugacaacagcacagcaacgcugugccugggacaccaugcagugccaaacggaacgcuagugaaaacaaucacgaaugaucaaauugaagugacuaaugcuacugagcugguucagaguuccucaacagguagaauaugcgacaguccucaccgaauccuugauggaaaaaacugcacacugauagaugcucuauugggagacccucauugugauggcuuccaaaauaaggaaugggaccuuuuuguugaacgcagcaaagcuuacagcaacuguuacccuuaugaugugccggauuaugccucccuuaggucacuaguugccucaucaggcacccuagaguuuaucaaugaagacuucaauuggacuggaguggcucaggaugggaaaagcuaugcuugcaaaaggggaucuguuaacaguuucuuuaguagauugaauugguugcacaaauuagaauacaaauauccagcgcugaacgugacuaugccaaacaauggcaaauuugacaaauuguacauuugggggguucaccacccgagcacggacagugaccaaaccagccuauauguucgagcaucagggagagucacagucucuaccaaaagaagccaacaaacuguaaucccgaauaucgggucuagacccuggguaaggggucuguccaguagaauaagcaucuauuggacaauaguaaaaccgggagacauacuuuugauuaauagcacagggaaucuaauugcuccucgggguuacuucaaaauaagaaaugggaaaagcucaauaaugaggucagaugcacccauuggcaacugcaguucugaaugcaucacuccaaauggaagcauucccaaugacaaaccuuuucaaaauguaaacaggaucacauauggggccugccccagauauguuaagcaaaacacucugaaauuggcaacagggaugcggaauguaccagagaaacaaacuagaggcauauucggcgcaaucgcagguuucauagaaaaugguugggagggaaugguagacgguugguacgguuucaggcaucaaaauucugagggcacaggacaagcagcagaucuuaaaagcacucaagcagcaaucgaccaaaucaacgggaaacugaauagguuaaucgagaaaacgaacgagaaauuccaucaaaucgaaaaagaauucucagaaguagaagggagaauucaggaccucgagaaauauguugaagacacuaaaauagaucucuggucuuacaacgcggagcuucuuguugcccuggagaaccaacauacaauugaucuaacugacucagaaaugaacaaacuguuugaaagaacaaggaagcaacugagggaaaaugcugaggacaugggcaaugguugcuucaaaguauaccacaaaugugacaaugccugcauagagucaaucagaaauggaacuuaugaccaugauguauacagagacgaagcauuaaacaaccgguuccagaucaaagguguugagcugaagucaggauacaaagauuggauccuauggauuuccuuugccauaucaugcuuuuugcuuuguguuguuuugcugggguucaucaugugggccugccaaaaaggcaacauuaggugcaacauuugcauuuga

SEQ ID NO: 33069 - RNA, 1701 nt, Artificial Sequence
  derived and/or modified CDS sequence (wt) from hemagglutinin__InfluenzaA__ABG67135
augaagacuaucauugcuuugagcuacauuuuaugucugguuuucgcucaaaaacuucccggaaaugacaacagcacggcaacgcugugccugggacaccaugcagugccaaacggaacgcuagugaaaacaaucacgaaugaccaaauugaagugacuaaugcuacugagcugguucagaguuccucaacagguagaauaugcgacaguccucaccgaauccuugauggaaaaaacugcacacugauagaugcucuauugggagacccucauugugauggcuuccaaaauaaggaaugggaccuuuuuguugaacgcagcaaagcuuacagcaacuguuacccuuaugaugugccggauuaugccucccuuaggucacuaguugccucauccggcacccuggaguuuaacaaugaaagcuucaauuggacuggagucgcucagaauggaacaagcuaugcuugcaaaaggagaucuguuaaaaguuucuuuaguagauugaauugguugcacaaauuagaauacaaauauccagcacagaacgugacuaugccaaacaaugacaaauuugacaaauuguacauuugggggguucaccacccgaguacggacagugaccaaaccagccuauauguucaagcaucagggagagucacagucucuaccaaaagaagccaacaaacuguaaucccgaauaucggaucuagacccuggguaaggggugucuccagcagaauaagcaucuauuggacaauaguaaaaccgggagacauacuuuugauuaacagcacagggaaucuaauugcuccucgggguuacuucaaaauacgaagugggaaaagcucaauaaugaggucagaugcacccauuggcaacugcaauucugaaugcaucacuccaaauggaagcauucccaaugacaaaccauuucaaaauguaaacaggaucacauauggggccugucccagauauguuaagcaaaacacucugaaauuggcaacagggaugcggaauguaccagagaaacaaacuagaggcauauucggcgcaaucgcagguuucauagaaaaugguugggagggaaugguagacgguugguacgguuucaggcaucaaaauucugagggcacaggacaagcagcagaucuuaaaagcacucaagcagcaaucaaccaaaucaacgggaaacugaauagguuaaucgagaaaacgaacgagaaauuccaucaaaucgaaaaagaauucucagaaguagaagggagaauucaggaccucgagaaauauguugaagacacuaaaauagaucucuggucguacaacgcggagcuucuuguugcccuggagaaccaacauacaauugaucuaacugacucagaaaugaacaaacuguuugaaagaacaaggaagcaacugagggaaaaugcugaggacaugggcaaugguugcuucaaaauauaccacaaaugugacaaugccugcauagggucaaucagaaauggaacuuaugaccaugauguauacagagacgaagcauuaaacaaccgguuccagaucaaagguguugagcugaagucaggauacaaagauuggauccuauggauuuccuuugccauaucauguuuuuugcuuuguguuguuuugcugggguucaucaugugggccugccaaaaaggcaacauuaggugcaacauuugcauuuga

SEQ ID NO: 33070 - RNA, 1701 nt, Artificial Sequence; identical to SEQ ID NO: 32900
  derived and/or modified CDS sequence (wt) from hemagglutinin__InfluenzaA__ABG67146

SEQ ID NO: 33071 - RNA, 1701 nt, Artificial Sequence
  derived and/or modified CDS sequence (wt) from hemagglutinin__InfluenzaA__ABG67157
augaagacuaucauugcuuugagcuacauuuuaugucugguuuucgcucaaaaacuucccggaaaugacaacagcacagcaacgcugugccugggacaccaugcagugccaaacggaacgcuagugaaaacaaucacgaaugaucaaauugaagugacuaaugcuacugagcugguucagaguuccccaacagguagaauaugcaacaguccucaccggaucauugauggaaagaacugcacacugauagaugcucuauugggagacccucauugugauggcuuccaaaauaaggaaugggaccuuuuuguugaacgcagcaaagcuuacagcaacuguuacccuuaugaugugccggauuaugccucccuuaggucacuaguugccucaucaggcacacuggaguuuaucaacgaaaacuucaauuggacuggagucgcucaggaugggaaaagcuaugcuugcaaaaggggaucuguuaacaguuucuuuaguagauugaauugguugcacaaauuagaauacaaauauccagcgcugaacgugacuaugccaaacaauggcaaauuugacaaauuguacauuugggggguucaccacccgagcacggacagugaccaaaccagccuauauguccgagcaucagggagagucacagucucuaccaaaagaagccaacaaacuguaaucccagauaucggguauagaccauggguaagaggucuguccaguagaauaagcaucuauuggacaauaguaaaaccgggagacauacuuuugauuaauagcacagggaaucuaauugcuccucgggguuacuucaaacuacgaaaugggaaaagcucaauaaugaggucagaugcacccauuggcaacugcaguucugaaugcaucacuccaaauggaagcauucccaaugacaaaccuuuucaaaauguaaacaggaucacuuauggggccugccccagauauauuaagcaaaacacucugaaauuggcaacagggaugcggaauguaccagagaaacaaacuagaggcauauuuggcgcaaucgcagguuucauagaaaaugguugggagggaaugguagacgguugguacgguuucaggcaucaaaauucugagggcacaggacaagcugcagaucuuaaaagcacucaagcagcaaucgaccaaaucaacgggaaacugaauagguuagucgagaaaacgaacgagaaauuccaucaaaucgaaaaagaauucucagaaguagaagggagaauucaggaccucgagaaauauguugaagacacuaaaauagaucucuggucuuacaaugcggagcuucuuguugcucuggagaaccaacauacaauugaucuaacugacucagaaaugaacaaacuguuugaaagaacaaagaagcaacugagggaaaaugcugaggacaugggcaaugguuguuucaaaauauaccacaaaugugacaaugccugcauagggucaaucagaaauggaacuuaugaccaugauguauacagagacgaagcauuaaacaaccgguuccagaucaaagguguugagcugaagucaggauacaaagauuggauccuauggauuuccuuugccauaucaugcuuuuugcuuuguguuguuuugcuuggguucaucaugugggccugccaaaaaggcaacauuaggugcaacauuugcauuuga

SEQ ID NO: 33072 - RNA, 1701 nt, Artificial Sequence
  derived and/or modified CDS sequence (wt) from hemagglutinin__InfluenzaA__ABG67168
augaagacuaucauugcuuugagcuacauuuuaugucugguuuucgcucaaaaacuucccggaaaugacaacagcacagcaacgcugugccugggacaccaugcagugccaaacggaacgcuagugaaaacaaucacgaaugaucaaauugaagugacuaaugcuacugagcugguucagaguuccccaacagguagaauaugcgacaguccucaccgaauccuugauggaaagaacugcacacugauagaugcucuauugggagacccucauugugauggcuuccaaaauaaggaaugggaccuuuuuguugaacgcagcaaagcuuacagcaacuguuacccuuaugaugugccggauuaugccucccuuaggucacuaguugccucaucaggcacccuggaguuuaccaacgaaaacuucaauuggacuggagucgcucaggaugggaaaagcuaugcuugcaaaaggggaucuguuaacaguuucuuuaguagauugaauugguugcacaaauuagaauacaaauauccagcgcugaacgugacuaugccaaacaauggcaaauuugacaaauuguacauuugggggguucaccacccgagcacggacagugaccaaaccagccuauauguccgagcaucagggaaagucacagucucuaccaaaagaagccaacaaacuguaaucccggauaucggguauagaccauggguaaggggucuuuccaguagaauaagcaucuauuggacaauaguaaaaccgggagacauacuuuugauuaauagcacagggaaucuaauugcuccucgggguuacuucaaaauacgaaaugggaaaagcucaauaaugaggucagaugcacccauuggcaacugcaguucugaaugcaucacuccaaauggaagcauucccaaugacaaaccuuuucaaaauguaaacaggaucacauauggggccugccccagauauguuaagcaaaacacucugaaauuggcaacagggaugcggaauguaccagagaaacaaacuagaggcauauucggcgcaaucgcagguuucauagagaaugguugggagggaaugguagacgguugguacgguuucaggcaucagaauucugagggcacaggacaagcugcagaucuuaaaagcacucaagcagcaaucgaccaaaucaacgggaaacugaauagguuagucgagaaaacgaacgagaaauuccaucaaaucgaaaaagaauucucagaaguagaagggagaauucaggaccucgagaaauauguugaagacacuaaaauagaucucuggucuuacaaugcggagcuucuuguugcucuggagaaccaacauacaauugaucuaacugacucagaaaugaacaaacuauuugaaagaacaaggaagcaacugagggaaaaugcugaggacaugggcaaugguuguuucaaaauauaccacaaaugugacaaugccugcauagggucaaucagaaauggaacuuaugaccaugauguauacagagacgaagcauuaaacaaccgguuccagaucaaagguguugagcugaagucaggauacaaagauuggauccuauggauuuccuuugccauaucaugcuuuuugcuuuguguuguuuugcuuggguucaucaugugggccugccaaaaaggcaacauuaggugcaacauuugcauuuga

SEQ ID NO: 33073 - RNA, 1701 nt, Artificial Sequence; identical to SEQ ID NO: 33035
  derived and/or modified CDS sequence (wt) from hemagglutinin__InfluenzaA__ABG67179

SEQ ID NO: 33074 - RNA, 1701 nt, Artificial Sequence
  derived and/or modified CDS sequence (wt) from hemagglutinin__InfluenzaA__ABG67190
augaagacuaucauugcuuugagcuacauuuuaugucugguuuucgcucaaaaacuucccggaaaugacaacagcacagcaacgcugugccugggacaccaugcagugccaaacggaacgcuagugaaaacaaucacgaaugaucaaauugaagugacuaaugcuacugagcugguucagaguuucccaacagguagaauaugcgacaguccucaccgaauccuugauggaaagaacugcacacugauagaugcucuauugggagacccucauugugauggcuuccaaaauaaggaaugggaccuuuuuguugaacgcagcaaagcuuacagcaacuguuacccuuaugaugugccggauuaugccucccuuaggucacuaguugccucaucaggcacccuggaguuuaccaacgaaaacuucaauuggacuggagucgcucaggaugggaaaagcuaugcuugcaaaaggggaucuguuaacaguuucuuuaguagauugaauugguugcacaaauuagaauacaaauauccagcgcugaacgugacuaugccaaacaauggcaaauuugacaaauuguacauuugggggguucaccacccgagcacggacagugaccaaaccagccuauauguccgagcaucagggaaagucacagucucuaccaaaagaagccaacaaacuguaaucccggauaucggguauagaccauggguaaggggucuguccaguagaauaagcaucuauuggacaauaguaaaaccgggagacauacuuuugauuaauagcacagggaaucuaauugcuccucgggguuacuucaaaauacgaaaugggaaaagcucaauaaugaggucagaugcacccauuggcaacugcaguucugaaugcaucacuccaaauggaagcauucccaaugacaaaccuuuucaaaauguaaacaggaucacauauggggccugccccagauauguuaagcaaaacacucugaaauuggcaacagggaugcggaauguaccagagaaacaaacuagaggcauauucggcgcaaucgcagguuucauagaaaaugguugggagggaaugguagacgguugguacgguuucaggcaucagaauucugagggcacaggacaagcugcagaucuuaaaagcacucaagcagcaaucgaccaaaucaacgggaaacugaauagguuagucgagaaaacgaacgagaaauuccaucaaaucgaaaaagaauucucagaaguagaagggagaauucaggaccucgagaaauauguugaagacacuaaaauagaucucuggucuuacaaugcggagcuucuuguugcucuggagaaccaacauacaauugaucuaacugacucagaaaugaacaaacuauuugaaagaacaaggaagcaacugagggaaaaugcugaggacaugggcaaugguuguuucaaaauauaccacaaaugugacaaugccugcauagggucaaucagaaauggaacuuaugaccaugauguauacagagacgaagcauuaaacaaccgguuccagaucaaagguguugagcugaagucaggauacaaagauuggauccuauggauuuccuuugccauaucaugcuuuuugcuuuguguuguuuugcuuggguucaucaugugggccugccaaaaaggcaacauuaggugcaacauuugcauuuga

SEQ ID NO: 33075 - RNA, 1701 nt, Artificial Sequence
  derived and/or modified CDS sequence (wt) from hemagglutinin__InfluenzaA__ABG67212
augaagacuaucauugcuuugagcuacauuuuaugucugguuuucgcucaaaaacuucccggaaaugacaacagcacagcaacgcugugccugggacaccaugcggugccaaacggaacgcuagugaaaacaaucacgaaugaucaaauugaagugacuaaugcuacugagcugguucagaguuccucaacagguagaauaugcgacaguccucaccgaauccuugauggaaaaaacugcacacugauagaugcucuauugggagacccucauugugauggcuuccaaaauaaggaaugggaccuuuuuguugaacgcagcaaagcuuacagcaacuguuacccuuaugaugugccggauuaugccucccuuaggucacuaguugccucaucaggcacccuggaguuuaucaaugaagacuucaauuggacuggagucgcucaggaugggaaaagcuaugcuugcaaaaggggaucuguuaacaguuucuuuaguagauugaauugguugcacaaauuagaauacagauauccagcgcugaacgugacuaugccaaacaauggcaaauuugacaaauuguacauuugggggguucaccacccgagcacggacagugaccaaaccagccuauauguucgagcaucagggagagucacagucucuaccaaaagaagccaacaaacuguaaucccgaauaucggguuuagacccuggguaaggggucuguccaguagaauaagcaucuauuggacaauaguaaaaccgggagacauacuuuugauuaauagcacagggaaucuaauugcuccucgggguuacuucaaaauacggaaugggaaaagcucaauaaugaggucagaugcacccauuggcaacugcaguucugaaugcaucacuccaaauggaagcauucccaaugacaaaccuuuucaaaauguaaacaggaucacauauggggccugccccagauauguuaagcaaaacacucugaaguuggcaacagggaugcggaauguaccagagaaacaaacuagaggcauauucggcgcaaucgcagguuucauagaaaaugguugggagggaaugguagacgguugguacgguuucaggcaucaaaauucugagggcacaggacaagcagcagaucuuaaaagcacucaagcagcaaucgaccaaaucaacgggaaacugaauagguuaaucgagaaaacgaacgagaaauuccaucaaaucgaaaaagaauucucagaaguagaagggagaauucaggaccucgagaaauauguugaagacacuaaaauagaucucuggucuuacaacgcggggcuucuuguugcccuggagaaccaacauacaauugaucuaacugacucagaaaugaacaaacuguuugaaagaacaaggaagcaacugagggaaaaugcugaggacaugggcaaugguugcuucaaaauauaccacaaaugugacaaugccugcauagggucaaucagaaauggaacuuaugaccaugauguauacagagacgaagcauuaaacaaccgguuccagaucaaagguguugagcugaagucaggauacaaagauuggauccuauggauuuccuuugccauaucaugcuuuuugcuuuguguuguuuugcugggguucaucaugugggccugccaaaaaggcaacauuaggugcaacauuugcauuuga

SEQ ID NO: 33076 - RNA, 1701 nt, Artificial Sequence
  derived and/or modified CDS sequence (wt) from hemagglutinin__InfluenzaA__ABG67223
augaagacuaucauugcuuugagcuacauuuuaugucugguuuucgcucaaaaacuucccggaaaugacaacagcacagcaacgcugugccugggacaccaugcagugccaaacggaacgcuagugaaaacaaucacgaaugaucaaauugaagugacuaaugcuacugagcugguucagaguuccucaacagguagaauaugcgacaguccucaccgaauccuugauggaaaaaacugcacacugauagaugcucuauugggagacccucauugugauggcuuccaaaauaaggaaugggaccuuuuuguugaacgcagcaaagcuuacagcaacuguuacccuuaugaugugccggauuaugccucccuuaggucacuaguugccucaucaggcacccuggaguuuaucaaugaagacuucaauuggacuggagucgcucaggaugggaaaagcuaugcuugcaaaaggggaucuguuaacaguuucuuuaguagauugaauugguugcacaaauuagaauacaaauauccagcgcugaacgugacuaugccaaacaauggcaaauuugacaaauuguacauuugggggguucaccacccgagcacggacagugaccaaaccagccuauauguucgagcaucagggagagucacagucucuaccaaaagaagccaacaaacuguaaucccgaauaucggguuuagacccuggguaaggggucuguccaguagaauaagcaucuauuggacaauaguaaaaccgggagacauacuuuugauuaauagcacagggaaucuaauugcuccucgggguuacuucaaaauacgaaaugggaaaagcucaauaaugaggucagaugcacccauuggcaacugcaguucugaaugcaucacuccaaauggaagcauucccaaugacaaaccuuuucaaaauguaaacaggaucacauauggggccugccccagauauguuaagcaaaacacucugaaguuggcaacagggaugcggaauguaccagagaaacaaacuagaggcauauucggcgcaaucgcagguuucauagaaaaugguugggagggaaugguagacgguugguacgguuucaggcaucaaaauucugagggcacaggacaagcagcagaucuuaaaagcacucaagcagcaaucgaccaaaucaacgggaaacugaauagguuaaucgagaaaacgaacgaaaaauuccaucaaaucgaaaaagaauucucagaaguagaagggagaauucaggaccucgagaaauauguugaagacacuaaaauagaucucuggucuuacaacgcggggcuucuuguugcccuggagaaccaacauacaauugaucuaacugacucagaaaugaacaaacuguuugaaagaacaaggaagcaacugagggaaaaugcugaggacaugggcaaugguugcuucaaaauauaccacaaaugugacaaugccugcauagggucaaucagaaauggaacuuaugaccaugauguauacagagacgaagcauuaaacaaccgguuccagaucaaagguguugagcugaagucaggauacaaagauuggauccuauggauuuccuuugccauaucaugcuuuuugcuuuguguuguuuugcugggguucaucaugugggccugccaaaaaggcaacauuaggugcaacauuugcauuuga

SEQ ID NO: 33077 - RNA, 1701 nt, Artificial Sequence
  derived and/or modified CDS sequence (wt) from hemagglutinin__InfluenzaA__ABG67234
augaagacuaucauugcuuugagcuacauuuuaugucugguuuucgcucaaaaacuucccggagaugacaacagcacagcaacgcugugccugggacaccaugcagugccaaacggaacgcuagugaaaacaaucacgaaugaucaaauugaagugacuaaugcuacugagcugguucagaguuccucaacagguagaauaugcgacaguccucaccgaauccuugauggaaaaaacugcacacugauagaugcucuauugggagacccucauugugauggcuuccaaaauaaggaaugggaccuuuuuguugaacgcagcaaagcuuacagcaacuguuacccuuaugaugugccggauuaugccucccuuaggucacuaguugccucaucaggcacccuggaguuuaucaaugaagacuucaauuggacuggagucgcucaggaugggaaaagcuaugcuugcaaaaggggaucuguuaacaguuucuuuaguagauugaauugguugcacaaauuagaauacaaauauccagcgcugaacgugacuaugccaaacaauggcaaauuugacaaauuguacauuugggggguucaccacccgagcacggacagugaccaaaccagccuauauguucgagcaucagggagagucacagucucuaccaaaagaagccaacaaacuguaaucccgaauaucggguuuagacccuggguaaggggucuguccaguagaauaagcaucuauuggacaauaguagaaccgggagacauacuuuugauuaauagcacagggaaucuaauugcuccucgggguuacuucaaaauacgaaaugggaaaagcucaauaaugaggucagaugcacccauuggcaacugcaguucugaaugcaucacuccaaauggaagcauucccaaugacaaaccuuuucaaaauguaaacaggaucacauauggggccugccccagauauguuaagcaaaacacucugaaguuggcaacagggaugcggaauguaccagagaaacaaacuagaggcauauucggcgcaauugcagguuucauagaaaaugguugggagggaaugguagacgguugguacgguuucaggcaucaaaauucugagggcacaggacaagcagcagaucuuaaaagcacucaagcagcaaucgaccaaaucaacgggaaacugaauagguuaaucgagaaaacgaacgagaaauuccaucaaaucgaaaaagaauucucagaaguagaagggagaauucaggaccucgagaaauauguugaagacacuaaaauagaucucuggucuuacaacgcggggcuucuuguugcccuggagaaccaacauacaauugaucuaacugacucagaaaugaacaaacuguuugaaagaacaaggaagcaacugagggaaaaugcugaggacaugggcaaugguugcuucaaaauauaccacaaaugugacaaugccugcauagggucaaucagaaauggaacuuaugaccaugauguauacagagacgaagcauuaaacaaccgguuccagaucaaagguguugagcugaagucaggauacaaagauuggauccuauggauuuccuuugccauaucaugcuuuuugcuuuguguuguuuugcugggguucaucaugugggccugccaaaaaggcaacauuaggugcaacauuugcauuuga

SEQ ID NO: 33078 - RNA, 1701 nt, Artificial Sequence
  derived and/or modified CDS sequence (wt) from hemagglutinin__InfluenzaA__ABG67245
augaagacuaucauugcuuugagcuacauuuuaugucugguuuucgcucaaaaacuucccggaaaugacaacagcacagcaacgcugugccugggacaccaugcagugccaaacggaacgcuagugaaaacaaucacgaaugaucaaauugaagugacuaaugcuacugagcugguucagaguuccucaacagguagaauaugcgacaguccucaccgaauccuugauggaaaaaacugcacacugauagaugcucuauugggagacccucauugugauggcuuccaaaauaaggaaugggaccuuuuuguugaacgcagcaaagcuuacagcaacuguuacccuuaugaugugccggauuaugccucccuuaggucacuaguugccucaucaggcacccuggaguuuaucaaugaagacuucaauuggacuggagucgcucaggaugggaaaagcuaugcuugcaaaaggggaucuguuaacaguuucuuuaguagauugaauugguugcacaaauuagaauacaaauauccagcgcugaacgugacuaugccaaacaauggcaaauuugacaaauuguacauuugggggguucaccacccgagcacggacagugaccaaaccagccuauauguucgagcaucagggagagucacagucucuaccaaaagaagccaacaaacuguaaucccgaauaucggguuuagacccuggguaaggggucuguccaguagaauaagcaucuauuggacaauaguaaaaccgggagacauacuuuugauuaauagcacagggaaucuaauugcuccucgggguuacuucaaaauacgaaaugggaaaagcucaauaaugaggucagaugcacccauuggcaacugcaguucugaaugcaucacuccaaauggaagcauucccaaugacaaaccuuuucaaaauguaaacaggaucacauauggggccugccccagauauguuaagcaaaacacucugaaguuggcaacagggaugcggaauguaccagagaaacaaacuagaggcauauucggcgcaauugcagguuucauagaaaaugguugggagggaaugguagacgguugguacgguuucaggcaucaaaauucugagggcacaggacaagcagcagaucuuaaaagcacucaagcagcaaucgaccaaaucgacgggaaacugaauagguuaaucgagaaaacgaacgagaaauuccaucaaaucgaaaaagaauucucagaaguagaagggagaauucaggaccucgagaaauauguugaagacacuaaaauagaucucuggucuuacaacgcggggcuucuuguugcccuggagaaccaacauacaauugaucuaacugacucagaaaugaacaaacuguuugaaagaacaaggaagcaacugagggaaaaugcugaggacaugggcaaugguugcuucaaaauauaccacaaaugugacaaugccugcauagggucaaucagaaauggaacuuaugaccaugauguauacagagacgaagcauuaaacaaccgguuccagaucaaagguguugagcugaagucaggauacaaagauuggauccuauggauuuccuuugccauaucaugcuuuuugcuuuguguuguuuugcugggguucaucaugugggccugccaaaaaggcaacauuaggugcaacauuugcauuuga

SEQ ID NO: 33079 - RNA, 1698 nt, Artificial Sequence; identical to SEQ ID NO: 32754
  derived and/or modified CDS sequence (wt) from hemagglutinin__InfluenzaA__ABG67477

SEQ ID NO: 33080 - RNA, 1698 nt, Artificial Sequence; identical to SEQ ID NO: 32812
  derived and/or modified CDS sequence (wt) from hemagglutinin__InfluenzaA__ABG67491

SEQ ID NO: 33081 - RNA, 1701 nt, Artificial Sequence
  derived and/or modified CDS sequence (wt) from hemagglutinin__InfluenzaA__ABG67502
augaagacuaucauugcuuugagcuacauuuuaugucugguuuucgcucaaaaacuucccggaaaugacaacagcacggcaacgcugugccuggggcaccaugcagugccaaacggaacgcuagugaaaacaaucacgaaugaccaaauugaagugacuaaugcuacugagcugguucagaguuccucaacagguagaauaugcgacaguccucaccaaauccuugauggagaaaacugcacacuaauagaugcucuauugggagacccucauugugauggcuuccaaaauaaggaaugggaccuuuuuguugaacgcagcaaagccuacagcaacuguuacccuuaugaugugucggauuaugucucccuuaggucacuaguugccucaucaggcacgcuggaguuuaacaaugaaagcuucaauuggacuggagucgcucagaauggaacaagcucugcuugcaaaaggagaucugauaaaaguuucuuuaguagauugaauugguugcaccaauuaaaauacaaauauccagcacugaacgugacuaugccaaacaaugaaaaauuugacaaauuguacauuugggggguucaccacccggguacagacagugaccaaaucagccuauaugcucaagcaucagggagagucacagucucuaccaaaagaagccaacaaacuguaaucccgaauaucggaucuagacccuggguaagggguaucuccagcagaauaagcaucuauuggacaauaguaaaaccgggagacauacuuuugauuaacagcacagggaaucuaauugcuccucgggguuacuucaaaauacgaagugggaaaagcucaauaaugaggucagaugcacccauuggcaaaugcaauucugaaugcaucacuccaaauggaagcauucccaaugacaaaccauuucaaaauguaaacaggaucacauaugggcccugucccagauauguuaagcaaaacacucugaaauuggcaacagggaugcggaaugugccagagaaacaaacuagaggcauauucggugcaaucgcgggcuucauagaaaaugguugggagggaaugauggacgguugguacgguuucaggcaucaaaauucugagggcacagggcaagcagcagaucuuaaaagcacucaagcagcaaucaaccaaaucaacgggaaacugaauagguuaaucgagaaaacgaacgagaaauuccaucaaauugaaaaagaauucucagaaguagaagggagaauucaggaccucgagaaauauguugaggacacuaaaauagaucucuggucguacaaugcggagcuucuuguugcccuggagaaccaacauacaauugaucuaacugacucagaaaugaacaaacuguuugaaagaacaaagaagcaacugagggaaaaugcugaggauaugggcaaugguuguuucaaaauauaccacaaaugugacaaugccugcauagggucaaucagaaauggaacuuaugaccaugauguauacagagacgaagcauugaacaaccgguuccagaucaaagguguugagcugaagucaggauacaaagauuggauccuauggauuuccuuugccauaucauguuuuuugcuuuguauuguuuugcugggguucaucaugugggccugccaaaaaggcaacauuaggugcaacauuugcauuuga

SEQ ID NO: 33082 - RNA, 1701 nt, Artificial Sequence
  derived and/or modified CDS sequence (wt) from hemagglutinin__InfluenzaA__ABG67524
augaagacuaucauugcuuugagcuacauuuuaugucugguuuucgcucaaaaacuucccggaaaugacaacagcacggcaacgcugugccuggggcaccaugcagugccaaacggaacgcuagugaaaacaaucacgaaugaccaaauugaagugacuaaugcuacugagcugguucagaguuccucaacagguagaauaugcgacaguccucaccaaauccuugauggagaaaacugcacacuaauagaugcucuauugggagacccucauugugauggcuuccaaaauaaggaaugggaccuuuuuguugaacgcagcagagccuacagcaacuguuacccuuaugaugugccggauuaugucucccuuaggucacuaguugccucaucaggcacgcuggaguuuaacaaugaaagcuucaauuggacuggagucgcucagaauggaacaagcucugcuugcaaaaggagaucugauaaaaguuucuuuaguagauugaauugguugcaccaauuaaaauacaaauauccagcacugaacgugacuaugccaaacaaugaaaaauuugacaaauuguacauuugggggguucaccacccggguacagacagugaccaaaucagccuauaugcucaagcaucagggagagucacagucucuaccaaaagaagccaacaaacuguaauuccgaauaucggaucuagacccuggguaaggggugucuccagcagaauaagcaucuauuggacaauaguaaaaccgggagacauacuuuugauuaacagcacagggaaucuaauugcuccuagggguuacuucaaaauacgaagugggaaaagcucaauaaugaggucagaugcacccauuggcaaaugcaauucugaaugcaucacuccaaauggaagcauucccaaugacaaaccauuucaaaauguaaacaggaucacauaugggcccugucccagauauguuaagcaaaacacucugaaauuggcaacagggaugcggaaugugccagagaaacaaacuagaggcauauucggugcaaucgcgggcuucauagaaaaugguugggagggaaugauggacgguugguacgguuucaggcaucaaaauucugagggcacagggcaagcagcagaucuuaaaagcacucaagcagcagucaaccaaaucaacgggaaacugaauagguuaaucgagaaaacgaacgagaaauuccaucaaauugaaaaagaauucucagaaguagaagggagaauucaggaccucgagaaauauguugaggacacuaaaauagaucucuggucguacaaugcggagcuucuuguugcccuggagaaccaacauacaauugaucuaacugacucagaaaugaacaaacuguuugaaagaacaaagaagcaacugagggaaaaugcugaggauaugggcaaugguuguuucaaaauauaccacaaaugugacaaugccugcauagggucaauuagaaauggaacuuaugaccaugauguauacagagacgaagcauuaaacaaccgguuccagaucaaagguguugagcugaagucaggauacaaagauuggauccuauggauuuccuuugccauaucauguuuuuugcuuuguauuguuuugcugggguucaucaugugggccugccaaaaaggcaacauuaggugcaacauuugcauuuga

SEQ ID NO: 33083 - RNA, 1701 nt, Artificial Sequence
  derived and/or modified CDS sequence (wt) from hemagglutinin__InfluenzaA__ABG67535
augaagacuaucauugcuuugagcuacauuuuaugccugguuuucgcucaaaaacuucccggaaaugacaacagcacggcaacgcugugucuggggcaucaugcagugccaaacggaacgcuagugaaaacaaucacgaaugaccaaauugaaguaacuaaugcuacugagcugguucagaguuccucaacagguagaauaugcgacaguccucaccaaauccuugauggagaaaacugcacacuaauagaugcucuauugggagacccucauugugauggcuuccaaaauaaggaaugggaccuuuuuguugaacgcaguaaagccuacagcaacuguuacccuuaugaugugccggauuaugucucccuuaggucacuaguugccucaucaggcacgcuggaguuuaacaaugaaagcuucaauuggacuggagucgcucagaauggaacaagcucugcuugcaaaaggagaucugauaaaaguuucuuuaguagauugaauugguugcaccaauuaaaauacaaauauccagcacugaacgugacuaugccaaacaaugaaaaauuugacaaauuguacauuugggggguucaccacccggguacagacagugaccaaaucagccuauaugcucaagcaucggggagagucacagucucuaccaaaagaagccaacaaacuguaaucccgaauaucggaucuagacccuggguaaggggugucuccagcagaauaagcaucuauuggacaauaguaaaaccgggagacauacuuuugauuaacagcacagggaaucuaauugcuccucgggguuacuucaaaauacgaagugggaaaagcucaauaaugaggucagaugcacccauuggcaaaugcaauucugaaugcaucacuccaaauggaagcauucccaaugacaaaccauuucaaaauguaaacaggaucacauauggggccugucccagauauguuaagcaaaacacucugaaauuggcaacagggaugcggaaugugccagagaaacaaacuagaggcauauucggugcaaucgcgggcuucauagaaaaugguugggagggaaugauggacgguugguacgguuucaggcaucaaaauucugagggcacagggcaagcagcagaucuuaaaagcacucaagcagcaaucaaccaaaucaacgggaaacugaauagguuaaucgagaaaacgaacgagaaauuccaucaaauugaaaaagaauucucagaaguagaagggagaauucaggaccucgagaaauauguugaggacacuaaaauagaucucuggucguacaaugcggagcuucuuguugcccuggagaaccaacauacaauugaucuaacugacucagaaaugaacaaacuguuugaaagaacaaagaagcaacugagggaaaaugcugaggauaugggcaaugguuguuucaaaauauaccacaaaugugacaaugccugcauagggucaaucagaaauggaacuuaugaccaugauguauacagagacgaagcauugaacaaccgguuccagaucaaagguguugagcugaagucaggauacaaagauuggguccuauggauuuccuuugccauaucauguuuuuugcuuuguauuguuuugcugggguucaucaugugggccugccaaaaaggcaacauuaggugcaacauuugcauuuga

SEQ ID NO: 33084 - RNA, 1701 nt, Artificial Sequence; identical to SEQ ID NO: 32532
  derived and/or modified CDS sequence (wt) from hemagglutinin__InfluenzaA__ABG67546

SEQ ID NO: 33085 - RNA, 1701 nt, Artificial Sequence
  derived and/or modified CDS sequence (wt) from hemagglutinin__InfluenzaA__ABG67557
augaagacuaucauugcuuugagcuacauucuaugucugguuuucgcucaaaaacuucccggaaaugacaacagcacggcaacgcugugccuugggcaccaugcaguaccaaacggaacgauagugaaaacaaucacaaaugaccaaauugaaguuacuaaugcuacugagcugguucagaguuccucaacagguggaauaugcgacaguccucaucagauccuugauggagaaaacugcacacuaauagaugcucuauugggagacccucagugugauggcuuccaaaauaagaaaugggaccuuuuuguugaacgcagcaaagccuacagcaacuguuacccuuaugaugugccggaucaugccucccuuaggucacuaguugccucauccggcacacuggaguuuaacaaugaaagcuucgauuggacuggagucacucagaauggaacaagcucugcuugcaaaaggagaucuaauaaaaguuucuuuaguagauugaauugguugacccacuuaaaauacaaauacccagcauugaacgugacuaugccaaacaaugaaaaauuugacaaauuguacauuugggggguucaccacccggguacggacagugaccaaaucagccuauaugcucaagcaucaggaagaaucacagucucuaccaaaagaagccaacaaacuguaaucccgaauaucggaucuagacccaggguaagggaugucuccagccgaauaagcaucuauuggacaauaguaaaaccgggagacauacuuuugauuaacagcacagggaaucuaauugcuccucgggguuacuucaaaauacgaagugggaaaagcucaauaaugagaucagaugcacccauuggcaaaugcaauucugaaugcaucacuccaaauggaagcauucccaaugacaaaccauuucaaaauguaaacaggaucacauauggggccugucccagauauguuaagcaaaacacucugaaauuggcaacagggaugcgaaauguaccagagaaacaaacuagaggcauauuuggcgcaaucgcggguuucauagaaaaugguugggagggaaugguggacgguugguacgguuucaggcaucaaaauucugagggcacaggacaagcagcagaucucaaaagcacucaagcaacaaucaaccaaaucaaugggaaacugaauagguuaaucgggaaaacaaacgagaaauuccaucagauugaaaaagaauucucagaaguagaagggagaauucaggaccucgagaaauauguugaggacacuaaaauagaucucuggucauacaacgcggagcuucuuguugcccuggagaaccaacauacaauugaucuaacugacucagaaaugaacaaacuguuugaaagaacaaagaagcaacugagggaaaaugcugaggauaugggcaaugguuguuucaaaauauaccacaaaugugacaaugccugcauagggucaaucagaaauggaacuuaugaccaugauguguacagagaugaagcauuaaacaaccgguuccagaucaaagguguugagcugaagucaggauauaaagauuggauccuauggauuuccuuugccauaucauguuuuuugcuuuguguugcuuuguugggguucaucaugugggccugccaaaaaggcaacauuaggugcaacauuugcauuuga

SEQ ID NO: 33086 - RNA, 1701 nt, Artificial Sequence; identical to SEQ ID NO: 33022
  derived and/or modified CDS sequence (wt) from hemagglutinin__InfluenzaA__ABG67568

SEQ ID NO: 33087 - RNA, 1701 nt, Artificial Sequence
  derived and/or modified CDS sequence (wt) from hemagglutinin__InfluenzaA__ABG67579
augaagacuaucauugcuuugagcuacauucuaugucugguuuucgcucaaaaacuucccggaaaugacaacagcacggcaacgcugugccuugggcaccaugcaguaccaaacggaacgauagugaaaacaaucacaaaugaccaaauugaaguuacuaaugcuacugagcugguucagaguuccucaacagguggaauaugcgacaguccucaucagauccuugauggagaaaacugcacacuaauagaugcucuauugggagacccucagugugauggcuuccaaaauaagaaaugggaccuuuuuguugaacgcagcaaagccuacagcaacuguuacccuuaugaugugccggaucaugccucccuuaggucacuaguugccucauccggcacacuggaguuuaacaaugaaagcuucgauuggacuggagucacucagaauggaacaagcucugcuugcaaaaggagaucuaauaaaaguuucuuuaguagauugaauugguugacccacuuaaaauacaaauacccagcauugaacgugacuaugccaaacaaugaaaaauuugacaaauuguacauuugggggguucaccacccggguacggacagugaccaaaucagccuauaugcucaagcaucaggaagaaucacagucucuaccaaaagaagccaacaaacuguaaucccgaauaucggaucuagacccaggguaagggaugucuccagccgaauaagcaucuauuggacaauaguaaaaccgggagacauacuuuugauuaacagcacagggaaucuaauugcuccucgggguuacuucaaaauacgaagugggaaaagcucaauaaugagaucagaugcacccauuggcaaaugcaauucugaaugcaucacuccaaauggaagcauucccaaugacaaaccauuucaaaauguaaacaggaucacauauggggccugucccagauauguuaagcaaaacacucugaaauuggcaacagggaugcgaaauguaccagagaaacaaacuagaggcauauuuggcgcaaucgcggguuucauagaaaaugguugggagggaaugguggacgguugguacgguuucaggcaucaaaauucugagggcacaggacaagcagcagaucucaaaagcacucaagcagcaaucaaccaaaucaaugggaaacugaauagguuaaucgggaaaacaaacgagaaauuccaucagauugaaaaagaauucucagaaguagaagggagaauucaggaccucgagaaauauguugaggacacuaaaauagaucucuggucauacaacgcagagcuucuuguugcccuggagaaccaacauacaauugaucuaacugacucagaaaugaacaaacuguuugaaagaacaaagaagcaacugagggaaaaugcugaggauaugggcaaugguuguuucaaaauauaccacaaaugugacaaugccugcauagggucaaucagaaauggaacuuaugaccaugauguguacagagaugaagcauuaaacaaccgguuccagaucaaagguguugagcugaagucaggauauaaagauuggauccuauggauuuccuuugccauaucauguuuuuugcuuuguguugcuuuguugggguucaucaugugggccugccaaaaaggcaacauuaggugcaacauuugcauuuga

SEQ ID NO: 33088 - RNA, 1701 nt, Artificial Sequence; identical to SEQ ID NO: 32532
  derived and/or modified CDS sequence (wt) from hemagglutinin__InfluenzaA__ABG67590

SEQ ID NO: 33089 - RNA, 1701 nt, Artificial Sequence; identical to SEQ ID NO: 32550
  derived and/or modified CDS sequence (wt) from hemagglutinin__InfluenzaA__ABG67601

SEQ ID NO: 33090 - RNA, 1701 nt, Artificial Sequence; identical to SEQ ID NO: 33022
  derived and/or modified CDS sequence (wt) from hemagglutinin__InfluenzaA__ABG67612

SEQ ID NO: 33091 - RNA, 1701 nt, Artificial Sequence; identical to SEQ ID NO: 33022
  derived and/or modified CDS sequence (wt) from hemagglutinin__InfluenzaA__ABG67623

SEQ ID NO: 33092 - RNA, 1701 nt, Artificial Sequence
  derived and/or modified CDS sequence (wt) from hemagglutinin__InfluenzaA__ABG67634
augaagacuaucauugcuuugagcuacauucuaugucugguuuucgcucaaaaacuucccggaaaugacaacaacacggcaacgcugugccuugggcaccaugcaguaccaaacggaacgauagugaaaacaaucacaaaugaccaaauugaaguuacuaaugcuacugagcugguucagaguuccucaacagguggaauaugcgacaguccucaucagauccuugauggagaaaacugcacacuaauagaugcucuauugggagacccucagugugauggcuuccaaaauaagaaaugggaccuuuuuguugaacgcagcaaagccuacagcaacuguuacccuuaugaugugccggaucaugccucccuuaggucacuaguugccucauccggcacacuggaguuuaacaaugaaagcuucgauuggacuggagucacucagaauggaacaagcucugcuugcaaaaggagaucuaauaaaaguuucuuuaguagauugaauugguugacccacuuaaaauacaaauacccagcauugaacgugacuaugccaaacaaugaaaaauuugacaaauuguacauuugggggguucaccacccggguacggacagugaccaaaucagccuauaugcucaagcaucaggaagaaucacagucucuaccaaaagaagccaacaaacuguaaucccgaauaucggaucuagacccaggguaagggaugucuccagccgaauaagcaucuauuggacaauaguaaaaccgggagacauacuuuugauuaacagcacagggaaucuaauugcuccucgggguuacuucaaaauacgaagugggaaaagcucaauaaugagaucagaugcacccauuggcaaaugcaauucugaaugcaucacuccaaauggaagcauucccaaugacaaaccauuucaaaauguaaacaggaucacauauggggccugccccagauauguuaagcaaaacacucugaaauuggcaacagggaugcgaaauguaccagagaaacaaacuagaggcauauuuggcgcaaucgcggguuucauagaaaaugguugggagggaaugguggacgguugguacgguuucaggcaucaaaauucugagggcacaggacaagcagcagaucucaaaagcacucaagcagcaaucaaccaaaucaaugggaaacugaauagguuaaucgggaaaacaaacgagaaauuccaucagauugaaaaagaauucucagaaguagaagggagaauucaggaccucgagaaauauguugaggacacuaaaauagaucucuggucauacaacgcggagcuucuuguugcccuggagaaccaacauacaauugaucuaacugacucaaaaaugaacaaacuguuugaaagaacaaagaagcaacugagggaaaaugcugaggauaugggcaaugguuguuucaaaauauaccacaaaugugacaaugccugcauagggucaaucagaaauggaacuuaugaccaugauguguacagagaugaagcauuaaacaaccgguuccagaucaaagguguugagcugaagucaggauauaaagauuggauccuauggauuuccuuugccauaucauguuuuuugcuuuguguugcuuuguugggguucaucaugugggccugccaaaaaggcaacauuaggugcaacauuugcauuuga

SEQ ID NO: 33093 - RNA, 1701 nt, Artificial Sequence
  derived and/or modified CDS sequence (wt) from hemagglutinin__InfluenzaA__ABG67645
augaagacuaucauugcuuugagcuacauucuaugucugguuuucgcucaaaaacuucccggaaaugacaacagcacggcaacgcugugccuugggcaccaugcaguaccaaacggaacgauagugaaaacaaucacaaaugaccaaauugaaguuacuaaugcuacugagcugguucagaguuccucaacagguggaauaugcgacaguccucaucagauccuugauggagaaaacugcacacuaauagaugcucuauugggagacccucagugugauggcuuccaaaauaagaaaugggaccuuuuuguugaacgcagcaaagccuacagcaacuguuacccuuaugaugugccggaucaugccucccuuaggucacuaguugccucauccggcacacuggaguuuaacaaugaaagcuucgauuggacuggagucacucagaauggaacaagcucugcuugcaaaaggagaucuaauaaaaguuucuuuaguagauugaauugguugacccacuuaaaauacaaauacccagcauugaacgugacuaugccaaacaaugaaaaauuugacaaauuguacauuugggggguucaccacccggguacggacagugaccaaaucagccuauaugcucaagcaucaggaagaaucacagucucuaccaaaagaagccaacaaacuguaaucccgaauaucggaucuagacccaggguaagggaugucuccagccgaauaagcaucuauuggacaauaguaaaaccgggagacauacuuuugauuaacagcacagggaaucuaauugcuccucgggguuacuucaaaauacgaagugggaaaagcucaauaaugagaucagaugcacccauuggcaaaugcaauucugaaugcaucacuccaaauggaagcauucccaaugacaaaccauuucaaaauguaaacaggaucacauauggggccugucccagauauguuaagcaaaacacucugaaauuggcaacagggaugcgaaauguaccagagaaacaaacuagaggcauauuuggcgcaaucgcggguuucauagaaaaugguugggagggaaugguggacgguugguacgguuucaggcaucaaaauucugagggcacaggacaagcagcagaucucaaaagcacucaagcagcaaucaaccaaaucaaugggaaacugaauagguuaaucgggaaaacaaacgagaaauuccaucagauugaaaaagaauucucagaaguagaagggagaauucaggaccucgagaaauauguugaggacacuaaaauagaucucuggucauacaacgcggagcuucuuguugcccuggagaaccaacauacaauugaucuaacugauucagaaaugaacaaacuguuugaaagaacaaagaagcaacugagggaaaaugcugaggauaugggcaaugguuguuucaaaauauaccacaaaugugacaaugccugcauagggucaaucagaaauggaacuuaugaccaugauguguacagagaugaagcauuaaacaaccgguuccagaucaaagguguugagcugaagucaggauauaaagauuggauccuauggauuuccuuugccauaucauguuuuuugcuuuguguugcuuuguugggguucaucaugugggccugccaaaaaggcaacauuaggugcaacauuugcauuuga

SEQ ID NO: 33094 - RNA, 1701 nt, Artificial Sequence
  derived and/or modified CDS sequence (wt) from hemagglutinin__InfluenzaA__ABG67656
augaagacuaucauugcuuugagcuacauucuaugucugguuuucgcucaaaaacuucccggaaaugacaacagcacggcaacgcugugccuugggcaccaugcaguaccaaacggaacgauagugaaaacaaucacaaaugaccaaauugaaguuacuaaugcuacugagcugguucagaguuccucaacagguggaauaugcgacaguccucaucagauccuugauggagaaaacugcacacuaauagaugcucuauugggagacccucagugugauggcuuccaaaauaagaaaugggaccuuuuuguugaacgcagcaaagccuacagcaacuguuacccuuaugaugugccggaucaugccucccuuaggucacuaguugccucauccggcacacuggaguuuaacaaugaaagcuucgauugggcuggagucacucagaauggaacaagcucugcuugcaaaaggagaucuaauaaaaguuucuuuaguagauugaauugguugacccacuuaaaauacaaauacccagcauugaacgugacuaugccaaacaaugaaaaauuugacaaauuguacauuugggggguucaccacccggguacggacagugaccaaaucagccuauaugcucaagcaucaggaagaaucacagucucuaccaaaagaagccaacaaacuguaaucccgaauaucggaucuagacccaggguaagggaugucuccagccgaauaagcaucuauuggacaauaguaaaaccgggagacauacuuuugauuaacagcacagggaaucuaauugcuccucgggguuacuucaaaauacgaagugggaaaagcucaauaaugagaucagaugcacccauuggcaaaugcaauucugaaugcaucacuccaaauggaagcauucccaaugacaaaccauuucaaaauguaaacaggaucacauauggggccugucccagauauguuaagcaaaacacucugaaauuggcaacagggaugcgaaauguaccagagaaacaaacuagaggcauauuuggcgcaaucgcggguuucauagaaaaugguugggagggaaugguggacgguugguacgguuucaggcaucaaaauucugagggcacaggacaagcagcagaucucaaaagcacucaagcagcaaucaaccaaaucaaugggaaacugaauagguuaaucgggaaaacaaacgagaaauuccaucagauugaaaaagaauucucagaaauagaagggagaauucaggaccucgagaaauauguugaggacacuaaaauagaucucuggucauacaacgcggagcuucuuguugcccuggagaaccaacauacaauugaucuaacugacucagaaaugaacaaacuguuugaaagaacaaagaagcaacugagggaaaaugcugaggauaugggcaaugguuguuucaaaauauaccacaaaugugacaaugccugcauagggucaaucagaaauggaacuuaugaccaugauguguacagagaugaagcauuaaacaaucgguuccagaucaaagguguugagcugaagucaggauauaaagauuggauccuauggauuuccuuugccauaucauguuuuuugcuuuguguugcuuuguugggguucaucaugugggccugccaaaaaggcaacauuaggugcaacauuugcauuuga

SEQ ID NO: 33095 - RNA, 1701 nt, Artificial Sequence
  derived and/or modified CDS sequence (wt) from hemagglutinin__InfluenzaA__ABG67667
augaagacuaucauugcuuugagcuacauuuuaugucagguuuucgcucaaaaacuucccggaaaugacaacagcacagcaacgcugugccugggacaccaugcagugccaaacggaacgcuagugaaaacaaucacgaaugaucaaauugaagugacuaaugcuacugagcugguucagaguuccucaacagguagaauaugcgacaguccucaccgaauccuugauggaaaaaacugcacacuaauagaugcucuauugggagacccucauugugauggcuuccaaaauaaggaaugggaccuuuuuguugaacgcagcaaagcuuacagcaacuguuacccuuaugaugugccggauuaugccucccuuaggucacuaguugccucaucaggcacccuggaguuuaccaaugaaggcuucaauuggauuggagucgcucaggaugggaaaagcuaugcuugcaaaaggggaucuguuaacaguuucuuuaguagauugaauugguugcacaaauuagaauacaaauauccagcacugaacgugacuaugccaaacaaugacaaauuugacaaauuguacauuugggggguucaccacccgagcacggauagugaccaaaccagccuauauguucaagcaucagggagagucacagucucuaccaaaagaagccaacaaacuguaaucccgaauaucggguccagacccugggugaggggcaucuccaguagaauaagcaucuauuggacaauaguaaaaccgggagacauacuuuugauuaacagcacagggaaucuaauugcuccucgggguuacuucaaaauacgaaaugggaaaagcucaauaaugaggucagaugcacccauugacaacugcaauucugaaugcaucacuccaaauggaagcauucccaaugacaaaccuuuucaaaauguaaacaggaucacauauggggccugucccagauauguuaagcaaaacacucugaaauuggcaacagggaugcggaauguaccagagaaacaaacuagaggcauauucggcgcaaucgcagguuucauagaaaaugguugggagggaaugauagacgguugguacgguuucaggcaucaaaauucugagggcacaggacaagcagcagaucuuaaaagcacucaagcagcaaucgaucaaaucaacgggaaacugaauagguuaaucgagaaaacgaacgagaaauuccaucaaaucgaaaaagaauucucagaaguagaagggagaauucaggaccucgagaaauauguugaagacacuaaaauagaucucuggucuuacaacgcggagcuucuuguugcccuggagaaucaacauacaauugaucuaacugacucagaaaugaacaaacuguuugaaagaacaaggaagcaacugagggaaaaugcugaggacaugggcaaugguugcuucaaaauauaccacaaaugugacaaugccugcauagggucaaucagaaauggaacuuaugaccaugauguauacagagacgaagcauuaaacaaccgguuccagaucaaagguguugagcugaagucgggauacaaagauuggauccuauggauuucuuuugccauaucaugcuuuuugcuuuguguuguuuugcugggguucaucaugugggccugccaaaaaggcaacauuaggugcaacauuugcauuuga

SEQ ID NO: 33096 - RNA, 1701 nt, Artificial Sequence
  derived and/or modified CDS sequence (wt) from hemagglutinin__InfluenzaA__ABG79941
augaagacuaucauugcuuugagcuacauuuuaugucugguuuucgcucaaaaacuucccggaaaugacaacagcacggcaacgcugugccuggggcaccaugcagugccaaacggaacgcuagugaaaacaaucacgaaugaccaaauugaagugacuaaugcuacugagcugguucagaguuccucaacagguggaauaugcgacaguccucaccaaauccuugauggagaaaacugcacacuaauagaugcucuauugggagacccucauugugauggcuuccaaaauaaggaaugggaccuuuuuguugaacgcagcaaagccuacagcaacuguuacccuuaugaugugccggauuaugccucccuuaggucacuaguugccucauccggcacacuggaguuuaacaaugaaagcuucaauuggacuggagucgcucagaauggaacaagcucugcuugcaaaaggagaucuaauaaaaguuucuuuaguagauugaauugguugcaccaauuaaaauacaaauacccagcacugaacgugacuaugccaaacaaugaaaaauuugacaaauuguacauuugggggguucaccacccgaguacggacagugaccaaaucagccuauaugcucaagcaccagggagagucacagucucuaccaaaagaagccaacaaacuguaaucccgaauaucggaucuagacccuggguaaggggugucuccagcagaauaagcaucuauuggacaauaguaaaaccgggagacauacuuuugauuaacugcacagggaaucuaauugcuccucgggguuacuucaaaauacgaagugggaaaagcucaauaaugaggucagaugcauccauuggcaaaugcaauucugaaugcaucacuccaaauggaagcauucccaaugacaaaccauuucaaaauguaaacaggaucacauauggggccugucccagauauguuaagcaaaacacucugaaauuggcaacagggaugcggaauguaccagagaaacaaacuagaggcauauucggcgcaaucgcggguuucauagaaaaugguugggagggaaugguggacgguugguacgguuucaggcaucaaaauucugagggcacaggacaagcagcagaucucaaaagcacucaagcagcaaucaaccaaaucaacgggaaacugaauagguuaaucgagaaaacgaacgagaaauuccaucaaauugaaaaagaauucucagaaguggaagggagaauucaggaccucgagaaauauguugaggacacuaaaauagaucucuggucguacaacgcggagcuucuuguugcccuggagaaccagcauacaauugaucuaacugacucagaaaugaacaaacuguuugaaagaacaaagaagcaacugagggaaaaugcugaggauaugggcaaugguuguuucaaaauauaccacaaaugugacaaugccugcauagggucaaucagaaaugggacuuaugaccaugauguauacagagacgaagcauuaaacaaccgguuccagaucaaagguguugagcugaagucaggauacaaagauuggauccuauggauuuccuuugccauaucauguuuuuugcuuuguguugucuugcugggguucaucaugugggccugccaaaaaggcaacauuaggugcagcauuugcauuuga

SEQ ID NO: 33097 - RNA, 1701 nt, Artificial Sequence; identical to SEQ ID NO: 32933
  derived and/or modified CDS sequence (wt) from hemagglutinin__InfluenzaA__ABG79952

SEQ ID NO: 33098 - RNA, 1701 nt, Artificial Sequence
  derived and/or modified CDS sequence (wt) from hemagglutinin__InfluenzaA__ABG79974
augaagacuaucauugcuuugagcuacauuuuaugccugguuuucgcucaaaaacuucccggaaaugacaacagcacagcaacgcugugccugggacaccaugcagugccaaacggaacgcuagugaaaacaaucacgaaugaucaaauugaagugacuaaugcuacugagcugguucagaguuccccaacagguagaauaugcgacaguccucaccgaauccuugauggaaagaacugcacacugauagaugcucuauugggagacccucauugugauggcuuccaaaauaaggaaugggaccuuuuuguugaacgcagcaaagcuuacagcaacuguuacccuuaugaugugccggauuaugccucccuuaggucacuaguugccucaucaggcacccuggaguuuaccaacgaaaacuucaauuggacuggagucgcucaggaugggaaaagcuaugcuugcaaaaggggaucuguuaacaguuucuuuaguagauugaauugguugcacaaauuagaauacaaauauccagcgcugaacgugacuaugccaaacaauggcaaauuugacaaauuguacauuugggggguucaccacccgagcacggacagugaccaaaccagccuauauguccgagcaucagggaaagucacagucucuaccaaaagaagccaacaaacuguaaucccggauaucggguauagaccauggguaaggggucuguccaguagaauaagcaucuauuggacaauaguaaaaccgggagacauacuuuugauuaauagcacagggaaucuaauugcuccucgggguuacuucaaaauacgaaaugggaaaagcucaauaaugaggucagaugcacccauuggcaacugcaguucugaaugcaucacuccaaauggaagcauucccaaugacaaaccuuuucaaaauguaaacaggaucacauauggggccugccccagauauguuaagcaaaacacucugaaauuggcaacagggaugcggaauguaccagagaaacaaacuagaggcauauucggcgcaaucgcagguuucauagaaaaugguugggagggaaugguagacgguugguacgguuucaggcaucagaauucugagggcacaggacaagcugcagaucuuaaaagcacucaagcagcaaucgaccaaaucaacgggaaacugaauagguuagucgagaaaacgaacgagaaauuccaucaaaucgaaaaagaauucucagaaguagaagggagaauucaggaccucgagaaauauguugaagacacuaaaauagaucucuggucuuacaaugcggagcuucuuguugcucuggagaaccaacauacaauugaucuaacugacucagaaaugaacaaacuauuugaaagaacaaggaagcaacugagggaaaaugcugaggacaugggcaaugguuguuucaaaauauaccacaaaugugacaaugccugcauagggucaaucagaaauggaacuuaugaccaugauguauacagagacgaagcauuaaacaaccgguuccagaucaaagguguugagcugaagucaggauacaaagauuggauccuauggauuuccuuugccauaucaugcuuuuugcuuuguguuguuuugcuuggguucaucaugugggccugccaaaaaggcaacauuaggugcaacauuugcauuuga

SEQ ID NO: 33099 - RNA, 1701 nt, Artificial Sequence; identical to SEQ ID NO: 33035
  derived and/or modified CDS sequence (wt) from hemagglutinin__InfluenzaA__ABG79985

SEQ ID NO: 33100 - RNA, 1701 nt, Artificial Sequence
  derived and/or modified CDS sequence (wt) from hemagglutinin__InfluenzaA__ABG79996
augaagacuaucauugcuuugagcuacauuuuaugucugguuuucgcucaaaaacuucccggaaaugacaacagcacagcaacgcugugccugggacaccaugcagugccaaacggaacgcuagugaaaacaaucacgaaugaucaaauugaagugacuaaugcuacugagcugguucagaguuccccaacagguagaauaugcgacaguccucaccgaauccuugauggaaagaacugcacacugauagaugcucuauugggagacccucauugugauggcuuccaaaauaaggaaugggaccuuuuuguugaacgcagcaaagcuuacagcaacuguuacccuuaugaugugccggauuaugccucccuuaggucacuaguugccucaucaggcacccuggaguuuaccaacgaaaacuucaauuggacuggagucgcucaggaugggaaaagcuauucuugcaaaaggggaucuguuaacaguuucuuuaguagauugaauugguugcacaaauuagaauacaaauauccagcgcugaacgugacuaugccaaacaauggcaaauuugacaaauuguacauuugggggguucaccacccgagcacggacagugaccaaaccagccuauauguccgagcaucagggaaagucacagucucuaccaaaagaagccaacaaacuguaaucccggauaucggguauagaccauggguaaggggucuguccaguagaauaagcaucuauuggacaauaguaaaaccgggagacauacuuuugauuaauagcacagggaaucuaauugcuccucgggguuacuucaaaauacgaaaugggaaaagcucaauaaugaggucagaugcacccauuggcaacugcaguucugaaugcaucacuccaaauggaagcauucccaaugacaaaccuuuucaaaauguaaacaggaucacauauggggccugccccagauauguuaagcaaaacacucugaaauuggcaacagggaugcggaauguaccagagaaacaaacuagaggcauauucggcgcaaucgcagguuucauagaaaaugguugggagggaaugguagacgguugguacgguuucaggcaucagaauucugagggcacaggacaagcugcagaucuuaaaagcacucaagcagcaaucgaccaaaucaacgggaaacugaauagguuagucgagaaaacgaacgagaaauuccaucaaaucgaaaaagaauucucagaaguagaagggagaauucaggaccucgagaaauauguugaagacacuaaaauagaucucuggucuuacaaugcggagcuucuuguugcucuggagaaccaacauacaauugaucuaacugacucagaaaugaacaaacuauuugaaagaacaaggaagcagcugagggaaaaugcugaggacaugggcaaugguuguuucaaaauauaccacaaaugugacaaugccugcauagggucaaucagaaauggaaccuaugaccaugauguauacagagacgaagcauuaaacaaccgguuccagaucaaagguguugagcugaagucaggauacaaagauuggauccuauggauuuccuuugccauaucaugcuuuuugcuuuguguuguuuugcuuggguucaucaugugggccugccaaaaaggcaacauuaggugcaacauuugcauuuga

SEQ ID NO: 33101 - RNA, 1701 nt, Artificial Sequence; identical to SEQ ID NO: 33035
  derived and/or modified CDS sequence (wt) from hemagglutinin__InfluenzaA__ABG80007

SEQ ID NO: 33102 - RNA, 1701 nt, Artificial Sequence; identical to SEQ ID NO: 33035
  derived and/or modified CDS sequence (wt) from hemagglutinin__InfluenzaA__ABG80018

SEQ ID NO: 33103 - RNA, 1701 nt, Artificial Sequence; identical to SEQ ID NO: 33003
  derived and/or modified CDS sequence (wt) from hemagglutinin__InfluenzaA__ABG80029

SEQ ID NO: 33104 - RNA, 1701 nt, Artificial Sequence; identical to SEQ ID NO: 33003
  derived and/or modified CDS sequence (wt) from hemagglutinin__InfluenzaA__ABG80040

SEQ ID NO: 33105 - RNA, 1701 nt, Artificial Sequence
  derived and/or modified CDS sequence (wt) from hemagglutinin__InfluenzaA__ABG80051
augaagacuaucauugcuuugagcuacauuuuaugucugguuuucgcucaaaaacuucccggaaaugacaacagcacagcaacgcugugccugggacaccaugcagugccaaacggaacgcuagugaaaacaaucacgaaugaucaaauugaagugaccaaugcuacugagcugguucagaguuccccaacagguagaauaugcgacaguccucaccgaauccuugauggaaagaacugcacacugauagaugcucuauugggagacccucauugugauggcuuccaaaauaaggaaugggaccuuuuuguugaacgcagcaaagcuuacagcaacuguuacccuuaugaugugccggauuaugccucccuuaggucacuaguugccucaucaggcacccuggaguuuaccaacgaaaacuucaauuggacuggagucgcucaggaugggaaaagcuaugcuugcaaaaggggaucuguuaacaguuucuuuaguagauugaauugguugcacaaauuagaauacaaauauccagcgcugaacgugacuaugccaaacaauggcaaauuugacaaauuguacauuugggggguucaccacccgagcacggacagugaccaaaccagccuauauguccgagcaucagggaaagucacagucucuaccaaaagaagccaacaaacuguaaucccggauaucggguauagaccauggguaaggggucuguccaguagaauaagcaucuauuggacaauaguaaaaccgggagacauacuuuugauuaauagcacagggaaucuaauugcuccucgggguuacuucaaaauacgaaaugggaaaagcucaauaaugaggucagaugcacccauuggcaacugcaguucugaaugcaucacuccaaauggaagcauucccaaugacaaaccuuuucaaaauguaaacaggaucacauauggggccugccccagauauguuaagcaaaacacucugaaauuggcaacagggaugcggaauguaccagagaaacaaacuagaggcauauucggcgcaaucgcagguuucauagaaaaugguugggagggaaugguagacgguugguacgguuucaggcaucagaauucugagggcacaggacaagcugcagaucuuaaaagcacucaagcagcaaucgaccaaaucaacgggaaacugaauagguuagucgagaaaacgaacgagaaauuccaucaaaucgaaaaagaauucucagaaguagaagggagaauucaggaccucgagaaauauguugaagacacuaaaauagaucucuggucuuacaaugcggagcuucuuguugcucuggagaaccaacauacaauugaucuaacugacucagaaaugaacaaacuauuugaaagaacaaggaagcaacugagggaaaaugcugaggacaugggcaaugguuguuucaaaauauaccacaaaugugacaaugccugcauagggucaaucagaaauggaacuuaugaccaugauguauacagagacgaagcauuaaacaaccgguuccagaucaaagguguugagcugaagucaggauacaaagauuggauccuauggauuuccuuugccauaucaugcuuuuugcuuuguguuguuuugcuuggguucaucaugugggccugccaaaaaggcaacauuaggugcaacauuugcauuuga

SEQ ID NO: 33106 - RNA, 1701 nt, Artificial Sequence
  derived and/or modified CDS sequence (wt) from hemagglutinin__InfluenzaA__ABG80062
augaagacuaucauugcuuugagcuacauuuuaugucugguuuucgcucaaaaacuucccggaaaugacaacagcacagcaacgcugugccugggacaccaugcagugccaaacggaacgcuagugaaaacaaucacgaaugaucaaauugaagugacuaaugcuacugagcugguucagaguuccucaacagguagaauaugcgacaguccucaccgaauccuugauggaaaaaacugcacacugauagaugcucuauugggagacccucauugugauggcuuccaaaauaaggaaugggaccuuuuuguugaacgcagcaaagcuuacagcaacuguuacccuuaugaugugccggauuaugccucccuuaggucacuaguugccucaucaggcacccuggaguuuaccaaggaaggcuucaauuggacuggagucgcucaggaugggaaaagcuaugcuugcaaaaggggaucuguuaacaguuucuuuaguagauugaauugguugcacaaauuagaauacaaauauccagcacugaacgugacuaugccaaacaaugacaaauuugacaaauuguacauuugggggguucaccacccgagcacggacagugaccaaaccagccuauauguucaagcaucagggagagucacagucucuaccaaaagaagccaacaaacuguaaucccgaauaucgggucuagacccuggguaagggguaucuccaguagaauaagcaucuauuggacaauaguaaaaccgggagacauacuuuugauuaacagcacagggaaucuaauugcuccucgggguuacuucaaaauacgaaaugggaaaagcucaauaaugaggucagaugcacccauuggcaacugcaauucugaaugcaucacuccaaauggaagcauucccaaugacaaaccuuuucaaaauguaaacaggaucacauauggggccugucccagauauguuaagcaaaacacucugaaguuggcaacagggaugcggaauguaccagagaaacaaacuagaggcauauucggcgcaaucgcagguuucauagaaaaugguugggagggaaugguagacgguugguacgguuucaggcaucaaaauucugagggcacaggacaagcagcagaucuuaaaagcacucaagcagcaaucgaccaaaucaacgggaagcugaauagguuaaucgagaaaacgaacgaaaaauuccaucaaaucgaaaaagaauucucagaaguagaagggagaauucaggaccucgagaaauauguugaagacacuaaaauagaucucuggucuuacaacgcggagcuucuuguugcccuggagaaccaacauacaauugaucuaacugacucagaaaugaacaaacuguuugaaagaacaaggaagcaacugagggaaaaugcugaggacaugggcaaugguugcuucaaaauauaccacaaaugugacaaugccugcauagggucaaucagaaauggaacuuaugaccaugauguauacagagacgaagcauuaaacaaccgguuccagaucaaagguguugagcugaagacaggauacaaagauuggauccuauggauuuccuuugccauaucaugcuuuuugcuuuguguuguuuugcugggguucaucaugugggccugccaaaaaggcaacauuaggugcaacauuugcauuuga

SEQ ID NO: 33107 - RNA, 1701 nt, Artificial Sequence
  derived and/or modified CDS sequence (wt) from hemagglutinin__InfluenzaA__ABG80073
augaagacuaucauugcuuugagcuacauuuuaugucugguuuucgcucaaaaacuucccggaaaugacaacagcacagcaacgcugugccugggacaccaugcagugccaaacggaacgcuagugaaaacaaucacgaaugaucaaauugaagugacuaaugcuacugagcugguucagaguuccucaacagguagaauaugcgacaguccucacagaauccuugaugggaaaaacugcacacugauagaugcucuauugggagacccuaauugugauggcuuccaaaauaaggaaugggaccuuuuuguugaacgcagcaaagcuuacagcaacuguuacccuuaugaugugccggauuaugccucccuuaggucacuaguugccucaucaggcacccuggaguuuaccaaugaagacuucaauuggacuggagucgcucaggaugggggaagcuaugcuugcaaaaggggaucuguuaacaguuucuuuaguagauugaauugguugcacaaauuagaauacaaauauccagcgcugaacgugacuaugccaaacaauggcaaauuugacaaauuguacauuugggggguucaccacccgagcacggacagugaccaaaccagccuauauguucgagcaucagggagagucacagucucuaccaaaagaagccaacaaacuguaaccccgaauaucgggucuagacccuggguaaggggucuguccaguagaauaagcaucuauuggacaauaguaaaaccgggagacauacuuuugauuaauagcacaggaaaucuaauugcuccucgggguuacuucaaaauacgaaaugggaaaagcucaauaaugaggucagaugcacccauuggcaccugcaguucugaaugcaucacuccaaauggaagcauucccaaugacaaaccuuuucaaaauguaaacaggaucacauauggggccugccccagauacguuaagcaaaacacucugaaauuggcaacagggaugcggaauguaccagagaaacaaacuagaggcauauucggcgcaaucgcagguuucauagaaaaugguugggagggaaugguagacgguugguacgguuucaggcaucaaaauucugagggcacaggacaagcagcagaucuuaaaagcacucaagcagcaaucgaccaaaucaacgggaaacugaauagguuaaucgagaaaacgaacgagaaauuccaucaaaucgaaaaagaauucucagaaguagaagggagaauucaggaccucgagaaauauguugaagacacuaaaauagaucucuggucuuacaacgcggagcuucuuguugcccuggagaaccaacauacaauugaucuaacugacucagaaaugaacaaacuguuugaaaaaacaaggaagcaacugagggaaaaugcugaggacaugggcaaugguugcuucaaaauauaccacaaaugugacaaugccugcauagggucaaucagaaaugggacuuaugaccaugauguauacagagacgaagcauuaaacaaccgguuccagaucaaagguguugagcugaagucaggauacaaagauuggauccuauggauuuccuuugccauaucaugcuuuuugcuuuguguuguuuugcugggguucaucaugugggccugccaaaaaggcaacauuaggugcaacauuugcauuuga

SEQ ID NO: 33108 - RNA, 1701 nt, Artificial Sequence
  derived and/or modified CDS sequence (wt) from hemagglutinin__InfluenzaA__ABG80084
augaagacuaucauugcuuugagcuacauuuuaugucugguuuucgcucaaaaacuucccggaaaugacaacagcacagcaacgcugugccugggacaccaugcagugccaaacggaacgcuagugaaaacaaucacgaaugaucaaauugaagugacuaaugcuacugagcugguucagaguuccucaacagguagaauaugcgacaguccucaccgaauccuugaugggaaaaacugcacacugauagaugcucuauugggagacccucauugugauggcuuccaaaauaaggaaugggaccuuuuuguugaacgcagcaaagcuuacagcaacuguuacccuuaugaugugccggauuaugccucccuuaggucacuaguugccucaucaggcacccuggaguuuaucaaugaagacuucaauuggacuggagucgcucaggaugggaaaagcuaugcuugcaaaaggggaucuguuaacaguuucuuuaguagauugaauuggcugcacaaauuagaauacaaauauccagcgcugaacgugacuaugccaaacaauggcaaauuugacaaauuguacauuugggggguucaccacccgagcacggacagugaccaaaccagccuauauguucgagcaucagggagagucacagucucuaccaaaagaagccaacaaacuguaaucccgaauaucggguuuagacccuggguaaggggucuguccaguggaauaagcaucuauuggacaauaguaaaaccgggagacauacuuuugauuaauagcacagggaaucuaauugcuccucgggguuacuucaaaauacgaaaugggaaaagcucaauaaugaggucagaugcacccauuggcaacugcaguucugaaugcaucacuccaaauggaagcauucccaaugacaaaccuuuucaaaauguaaacaggaucacauauggggccugccccagauauguuaagcaaaacacucugaaguuggcaacagggaugcggaauguaccagagaaacaaacuagaggcauauucggcgcaaucgcagguuucauagaaaaugguugggagggaaugguagacgguugguacgguuucaggcaucaaaauucugagggcacaggacaagcagcagaucuuaaaagcacucaagcagcaaucgaccaaaucaacgggaaacugaauagguuaaucgagaaaacgaacgagaaauuccaucaaaucgaaaaagaauucucagaaguagaagggagaauucaggaccucgagaaauauguugaagacacuaaaauagaucucuggucuuacaacgcggggcuucuuguugcccuggagaaccaacauacaauugaucuaacugacucagaaaugaacaaacuguuugaaagaacaagaaagcaacugagggaaaaugcugaggacaugggcaaugguugcuucaaaauauaccacaaaugugacaaugccugcauagggucaaucagaaauggaacuuaugaccaugauauauacagagacgaagcauuaaacaaccgguuccagaucaaaggugucgagcugaagucaggauacaaagauuggauccuauggauuuccuuugccauaucaugcuuuuugcuuuguguuguuuugcugggguucaucaugugggccugccaaaaaggcaacauuaggugcaacauuugcauuuga

SEQ ID NO: 33109 - RNA, 1701 nt, Artificial Sequence
  derived and/or modified CDS sequence (wt) from hemagglutinin__InfluenzaA__ABG80095
augaagacuaucauugcuuugagcuacauuuuaugucugguuuucgcucaaaaacuucccggaaaugacaacagcacagcaacgcugugccugggacaccaugcagugccaaacggaacgcuagugaaaacaaucacgaaugaucaaauugaagugacuaaugcuacugagcugguucagaguuccucaacagguagaauaugcgacaguccucaccgaauccuugauggaaaaaacugcacacugauagaugcucuauugggagacccucauugugauggcuuccaaaauaaggaaugggaccuuuuuguugaacgcagcaaagcuuacagcaacuguuacccuuaugaugugccggauuaugccucccuuaggucacuaguugccucaucaggcacccuggaguuuaucaaugaagacuucaauuggacuggagucgcucaggaugggaaaagcuaugcuugcaaaaggggaucuguuaacaguuucuuuaguagauugaauuggcugcacaaauuagaauacaaauauccagcgcugaacgugacuaugccaaacaauggcaaaguugacaaauuguacauuugggggguucaccacccgagcacggacagugaccaaaccagccuauauguucgagcaucagggagagucacagucucuaccaaaagaagccaacaaacuguaaucccgaauaucggguuuagacccuggguaaggggucuguccaguagaauaagcaucuauuggacaauaguaaaaccgggagacauacuuuugauuaauagcacagggaaucuaauugcuccucgggguuacuucaaaauacgaaaugggaaaagcucaauaaugaggucagaugcacccauuggcaacugcaguucugaaugcaucacuccaaauggaagcauucccaaugacaaaccuuuucaaaauguaaacaggaucacauauggggccugccccagauauguuaagcaaaacacucugaaguuggcaacagggaugcggaauguaccagagaaacaaacuagaggcauauucggcgcaaucgcagguuucauagaaaaugguugggagggaaugguagacgguugguacgguuucaggcaucaaaauucugagggcacaggacaagcagcagaucuuaaaagcacucaagcagcaaucgaccaaaucaacgggaaacugaauagguuaaucgagaaaacgaacgagaaauuccaucaaaucgaaaaagaauucucagaaguagaagggagaauucaggaccucgagaaauauguugaagacacuaaaauagaucucuggucuuacaacgcggggcuucuuguugcccuggagaaccaacauacaauugaucuaacugacucagaaaugaacaaacuguuugaaagaacaaggaagcaacugagggaaaaugcugaggacaugggcaaugguugcuucaaaauauaccacaaaugugacaaugccugcauagggucaaucagaaauggaacuuaugaccaugauguauacagagacgaagcauuaaacaaccgguuccagaucaaaggugucgagcugaagucaggauacaaagauuggauccuauggauuuccuuugccauaucaugcuuuuugcuuuguguuguuuugcugggguucaucaugugggccugccaaaaaggcaacauuaggugcaacauuugcauuuga

SEQ ID NO: 33110 - RNA, 1701 nt, Artificial Sequence
  derived and/or modified CDS sequence (wt) from hemagglutinin__InfluenzaA__ABG80106
augaagacuaucauugcuuugagcuacauuuuaugucugguuuucgcucaaaaacuucccggaaaugacaacagcacagcaacgcugugccugggacaccaugcggugccaaacggaacgcuagugaaaacaaucacgaaugaucaaauugaagugacuaaugcuacugagcugguucagaguuccucaacagguagaauaugcgacaguccucaccgaauccuugauggaaaaaacugcacacugauagaugcccuauugggagacccucauugugauggcuuccaaaauaaggaaugggaccuuuuuguugaacgcagcaaagcuuacagcaacuguuacccuuaugaugugccggauuaugccucccuuaggucacuaguugccucaucaggcacccuggaguuuaucaaugaagacuucaauuggacuggagucgcucaggaugggaaaagcuaugcuugcaaaaggggaucuguuaacaguuucuuuaguagauugaauugguugcacaaauuagaauacaaauauccagcgcugaacgugacuaugccaaacaauggcaaauuugacaaauuguacauuugggggguucaccacccgagcacggacagugaccaaaccagccuauauguucgagcaucagggagagucacagucucuaccaaaagaagccaacaaacuguaaucccgaauaucggguuuagacccuggguaaggggucuguccaguagaauaagcaucuauuggacaauaguaaaaccgggagacauacuuuugauuaauagcacagggaaucuaauugcuccucgggguuacuucaaaauacggaaugggaaaagcucaauaaugaggucagaugcacccauuggcaacugcaguucugaaugcaucacuccaaauggaagcauucccaaugacaaaccuuuucaaaauguaaacaggaucacauauggggccugccccagauauguuaagcaaaacacucugaaguuggcaacagggaugcggaauguaccagagaaacaaacuagaggcauauucggcgcaaucgcagguuucauagaaaaugguugggagggaaugguagacgguugguacgguuucaggcaucaaaauucugagggcacaggacaagcagcagaucuuaaaagcacucaagcagcaaucgaccaaaucaacgggaaacugaauagguuaaucgagaaaacgaacgagaaauuccaucaaaucgaaaaagaauucucagaaguagaagggagaauucaggaccucgagaaauauguugaagacacuaaaauagaucucuggucuuacaacgcggggcuucuuguugcccuggagaaccaacauacaauugaucuaacugacucagaaaugaacaaacuguuugaaagaacaaggaagcaacugagggaaaaugcugaggacaugggcaaugguugcuucaaaauauaccacaaaugugacaaugccugcauagggucaaucagaaauggaacuuaugaccaugauguauacagagacgaagcauuaaacaaccgguuccagaucaaagguguugagcugaagucaggauacaaagauuggauccuauggauuuccuuugccauaucaugcuuuuugcuuuguguuguuuugcugggguucaucaugugggccugccaaaaaggcaacauuaggugcaacauuugcauuuga

SEQ ID NO: 33111 - RNA, 1701 nt, Artificial Sequence
  derived and/or modified CDS sequence (wt) from hemagglutinin__InfluenzaA__ABG80117
augaagacuaucauugcuuugagcuacauuuuaugucugguuuucgcucaaaaacuucccggaaaugacaacagcacagcaacgcugugccugggacaccaugcggugccaaacggaacgcuagugaaaacaaucacgaaugaucaaauugaagugacuaaugcuacugagcugguucagaguuccucaacagguagaauaugcgacaguccucaccgaauccuugauggaaaaaacugcacacugauagaugcucuauugggagacccucauugugauggcuuccaaaauaaggaaugggaccuuuuuguugaacgcagcaaagcuuacagcaacuguuacccuuaugaugugccggauuaugccucccuuaggucacuaguugccucaucaggcacccuggaguuuaucaaugaagacuucaauuggacuggagucgcucaggaugggaaaagcuaugcuugcaaaaggggaucuguuaacaguuucuuuaguagauugaauugguugcacaaauuagaauacaaauacccagcgcugaacgugacuaugccaaacaauggcaaauuugacaaauuguacauuugggggguucaccacccgagcacggacagugaccaaaccagccuauauguucgagcaucagggagagucacagucucuaccaaaagaagccaacaaacuguaaucccgaauaucggguuuagacccuggguaaggggucuguccaguagaauaagcaucuauuggacaauaguaaaaccgggagacauacuuuugauuaauagcacagggaaucuaauugcuccucgggguuacuucaaaauacggaaugggaaaagcucaauaaugaggucagaugcacccauuggcaacugcaguucugaaugcaucacuccaaauggaagcauucccaaugacaaaccuuuucaaaauguaaacaggaucacauauggggccugccccagauauguuaagcaaaacacucugaaguuggcaacagggaugcggaauguaccagugaaacaaacuagaggcauauucggcgcaaucgcagguuucauagaaaaugguugggagggaaugguagacgguugguacgguuucaggcaucaaaauucugagggcacaggacaagcagcagaccuuaaaagcacucaagcagcaaucgaccaaaucaacgggaaacugaauagguuaaucgagaaaacgaacgagaaauuccaucaaaucgaaaaagaauucucagaaguagaagggagaauucaggaccucgagaaauauguugaagacacuaaaauagaucucuggucuuacaacgcggggcuucuuguugcccuggagaaccaacauacaauugaucuaacugacucagaaaugaacaaacuguuugaaagaacaaggaagcaacugagggaaaaugcugaggacaugggcaaugguugcuucaaaauauaccacaaaugugacaaugccugcauagggucaaucagaaauggaacuuaugaccaugauguauacagagacgaagcauuaaacaaccgguuccagaucaaagguguugagcugaagucaggauacaaagauuggauccuauggauuuccuuugccauaucaugcuuuuugcuuuguguuguuuugcugggguucaucaugugggccugccaaaaaggcaacauuaggugcaacauuugcauuuga

SEQ ID NO: 33112 - RNA, 1701 nt, Artificial Sequence
  derived and/or modified CDS sequence (wt) from hemagglutinin__InfluenzaA__ABG80128
augaagacuaucauugcuuugagcuacauuuuaugucugguuuucgcucaaaaacuucccggaaaugacaacagcacagcaacgcugugccugggacaccaugcagugccaaacggaacgcuagugaaaacaaucacgaaugaucgaauugaagugacuaaugcuacugagcugguucagaguuccucaacagguagaauaugcgacaguccucaccgaauccuugauggaaaaaacugcacacugauagaugcucuauugggagacccucauugugauggcuuccaaaauaaggaaugggaccuuuuuguugaacgcagcaaagcuuacagcaacuguuacccuuaugaugugccggauuaugccucccuuaggucacuaguugccucaucaggcacccuggaguuuaucaaugaagacuucaauuggacuggagucgcucaggaugggaaaagcuaugcuugcaaaaggggaucuguuaacaguuucuuuaguagauugaauuggcugcacaaauuagaauacaaauauccagcgcugaacgugacuaugccaaacaauggcaaauuugacaaauuguacauuugggggguucaccacccgagcacggacagugaccaaaccagccuauauguucgagcaucagggagagucacagucucuaccaaaagaagccaacaaacuguaaucccgaauaucggguuuagacccuggguaaggggucuguccaguagaauaagcaucuauuggacaauaguaaaaccgggagacauacuuuugauuaauagcacagggaaucuaauugcuccucgggguuacuucaaaauacgaaaugggaaaagcucaauaaugaggucagaugcacccauuggcaacugcaguucugaaugcaucacuccaaauggaagcauucccaaugacaaaccuuuucaaaauguaaacaggaucacauauggggccugccccagauauguuaagcaaaacacucugaaguuggcaacagggaugcggaauguaccagagaaacaaacuagaggcauauucggcgcaaucgcagguuucauagaaaaugguugggagggaaugguagacgguugguacgguuucaggcaucaaaauucugagggcacaggacaagcagcagaucuuaaaagcacucaagcagcaaucgaccaaaucaacgggaaacugaauagguuaaucgagaaaacgaacgagaaauuccaucaaaucgaaaaagaauucucagaaguagaagggagaauucaggaccucgagaaauauguugaagacacuaaaauagaucucuggucuuacaacgcggggcuucuuguugcccuggagaaccaacauacaauugaucuaacugacucagaaaugaacaaacuguuugaaagaacaaggaagcaacugagggaaaaugcugaggacaugggcaaugguugcuucaaaauauaccacaaaugugacaaugccugcauagggucaaucagaaauggaacuuaugaccaugauguauacagagacgaagcauuaaacaaccgguuccagaucaaaggugucgagcugaagucaggauacaaagauuggauccuauggauuuccuuugccauaucaugcuuuuugcuuuguguuguuuugcugggguucaucaugugggccugccaaaaaggcaacauuaggugcaacauuugcauuuga

SEQ ID NO: 33113 - RNA, 1701 nt, Artificial Sequence
  derived and/or modified CDS sequence (wt) from hemagglutinin__InfluenzaA__ABG80139
augaagacuaucauugcuuugagcuacauuuuaugucugguuuucgcucaaaaacuucccggaaaugacaacagcacagcaacgcugugccugggacaccaugcagugccaaacggaacgcuagugaaaacaaucacgaaugaucaaauugaagugacuaaugcuacugagcugguucagaguuccucaacagguagaauaugcgacaguccucaccgaauccuugauggaaaaaacugcacacuaauagaugcucuauugggagacccucauugugauggcuuccaaaauaaggaaugggaccuuuuuguugaacgcagcaaagcuuacagcaacuguuacccuuaugaugugccggauuaugccucccuuaggucacuaguugccucaucaggcacccuggaguuuaucaaugaagacuucaauuggacuggagucgcucaggaugggaaaagcuaugcuugcaaaaggggaucuguuaacaguuucuuuaguagauugaauugguugcacaaauuagaauacaaauauccagcgcugaacgugacuaugccaaacaauggcaaauuugacaaauuguacauuugggggguucaccacccgagcacggacagugaccaaaccagccuauauguucgagcaucagggagagucacagucucuaccaaaagaagccaacaaacuguaaucccgaauaucggguuuagacccuggguaaggggucuguccaguagaauaagcaucuauuggacaauaguaaaaccgggagacauacuuuugauuaauagcacagggaaucuaauugcuccucgggguuacuucaaaauacgaaaugggaaaagcucaauaaugaggucagaugcaccuauuggcaacugcaguuaugaaugcaucacuccaaauggaagcauucccaaugacaaaccuuuucaaaauguaaacaggaucacauauggggccugccccagauauguuaagcaaaacacucugaaguuggcaacggggaugcggaauguaccagagaaacaaacuagaggcauauucggcgcaaucgcagguuucauagaaaaugguugggagggaaugguagacgguugguacgguuucaggcaucaaaauucugagggcacaggacaagcagcagaucuuaaaagcacucaagcagcaaucgaccaaaucaacgggaaacugaauagguuaaucgagaaaacgaacgagaaauuccaucaaaucgaaaaagaauucucagaaguagaagggagaauucaggaccucgagaaauauguugaagacacuaaaauagaucucuggucuuacaacgcggggcuucuuguugcccuggagaaccaacauacaauugaucuaacugacucagaaaugaacaaacuguuugaaagaacaaggaagcaacugagggaaaaugcugaggacaugggcaaugguugcuucaaaauauaccacaaaugugacaauaccugcauagggucaaucagaaauggaacuuaugaccaugauguauacagagacgaagcauuaaacaaccgguuccagaucaaagguguugagcugaagucaggauacaaagauuggauccuauggauuuccuuugccauaucaugcuuuuugcuuuguguuguuuugcugggguucaucaugugggccugccaaaaaggcaacauuaggugcaacauuugcauuuga

SEQ ID NO: 33114 - RNA, 1701 nt, Artificial Sequence
  derived and/or modified CDS sequence (wt) from hemagglutinin__InfluenzaA__ABG80150
augaagacuaucauugcuuugagcuacauuuuaugucugguuuucgcucaaaaacuucccggaaaugacaacagcacagcaacgcugugccugggacaccaugcagugccaaacggaacgcuagugaaaacaaucacgaaugaucaaauugaagugacuaaugcuacugagcugguucagaguuccucaacagguagaauaugcgacaguccucaccgaauccuugauggaaaaaacugcacacugauagaugcucuauugggagacccucauugugauggcuuccaaaauaaggaaugggaccuuuuuguugaacgcagcaaagcuuacagcaacuguuacccuuaugaugugccggauuaugccucccuuaggucacuaguugccucaucaggcacccuggaguuuaucaaugaaaacuucaauuggacuggagucgcucaggaugggaaaagcuaugcuugcaaaaggggaucuguuaacaguuucuuuaguagauugaauuggcugcauaaauuagaauacaaauauccagcgcugaacgugacuaugccaaacaauggcaaauuugacaaauuguacauuugggggguucaccacccgagcacggacagugaccaaaccagccuauauguucgagcaucagggagagucacagucucuaccaaaagaagccaacaaacuguaaucccgaauaucggguuuagacccuggguaaggggucuguccaguggaauaagcaucuauuggacaauaguaaaaccgggagacauacuuuugauuaauagcacagggaaucuaauugcuccucgggguuacuucaaaauacgaaaugggaaaagcucaauaaugaggucagaugcacccauuggcaacugcaguucugaaugcaucacuccaaauggaagcauucccaaugacaaaccuuuucaaaauguaaacaggaucacauauggggccugccccagauauguuaagcaaaacacucugaaguuggcaacagggaugcggaauguaccagagaaacaaacuagaggcauauucggcgcaaucgcagguuucauagaaaaugguugggagggaaugguagacgguugguacgguuucaggcaucaaaauucugagggcacaggacaagcagcagaucuuaaaagcacucaagcagcaaucgaccaaaucaacggaaaacugaauagguuaaucgagaaaacgaacgagaaauuccaucaaaucgaaaaagaauucucagaaguagaagggagaauucaggaccucgagaaauauguugaagacacuaaaauagaucucuggucuuacaacgcggggcuucuuguugcccuggagaaccaacauacaauugaucuaacugacucagaaaugaacaaacuguuugaaagaacaaggaagcaacugagggaaaaugcugaggacaugggcaaugguugcuucaaaauauaccacaaaugugacaaugccugcauagggucaaucagaaauggaacuuaugaccaugauguauacagagacgaagcauuaaacaaccgguuccagaucaaaggugucgagcugaagucaggauacaaagauuggauccuauggauuuccuuugccauaucaugcuuuuugcuuuguguuguuuugcugggguucaucaugugggccugccaaaaaggcaacauuaggugcaacauuugcauuuga

SEQ ID NO: 33115 - RNA, 1701 nt, Artificial Sequence
  derived and/or modified CDS sequence (wt) from hemagglutinin__InfluenzaA__ABG80161
augaagacuaucauugcuuugagcuacauuucaugucugguuuucgcucaaaaacuucccggaaaugacaacagcacagcaacgcugugccugggacaccaugcggugccaaacggaacgcuagugaaaacaaucacgaaugaucaaauugaagugacuaaugcuacugagcugguucagaguuccucaacagguagaauaugcgacaguccucaucgaauccuugauggaaaaaacugcacacugauagaugcucuauugggagacccucauugugauggcuuccaaaauaaggaaugggaccuuuuugucgaacgcagcaaagcuuacagcaacuguuacccuuaugaugugccggauuaugccucccuuaggucacuaguugccucaucaggcacccuggaguuuaucaaugaagacuucaauuggacuggagucgcucaggaugggaaaagcuaugcuugcaaaaggggaucuguuaacaguuucuuuaguagauugaauugguugcacaaauuagaauacaaauauccagcgcugaacgugacuaugccaaacaauggcaaauuugacaaauuguacauuugggggguucaccacccgagcacggacagugaccaaaccagccuauauguucaagcaucagggagagucacagucucuaccaaaagaagccaacaaacuguaaucccgaauaucggguuuagacccuggguaaggggucuguccaguagaauaagcaucuauuggacaauaguaaaaccgggagacauacuuuugauuaauagcacagggaaucuaauugcuccucgggguuacuucaaaauacggaaugggaaaagcucaauaaugaggucagaugcacccauuggcaacugcaguucugaaugcaucacuccaaauggaagcauucccaaugacaaaccuuuucaaaauguaaacaggaucacauauggggccugccccagauauguuaagcaaaacacucugaaguuggcaacagggaugcggaauguaccagagaaacaaacuagaggcauauucggcgcaaucgcagguuucauagaaaaugguugggagggaaugguagacgguugguacgguuucaggcaucaaaauucugagggcacaggacaagcagcagaucuuaaaagcacucaagcagcaaucgaccaaaucaacgggaaacugaauagguuaaucgagaaaacgaacgagaaauuccaucaaaucgaaaaagaauucucagaaguagaagggagaauucaggaccucgagaaauauguugaagacacuaaaauagaucucuggucuuacaacgcggggcuucuuguugcccuggagaaccaacauacaauugaucuaacugacucagaaaugaacaaacuguuugaaagaacaaggaagcaacugagggaaaaugcugaggacaugggcaaugguugcuucaaaauauaccacaaaugugacaaugccugcauagggucaaucagaaauggaacuuaugaccaugauguauacagagacgaagcauuaaacaaccgguuccagaucaaagguguugagcugaagucaggauacaaagauuggauccuauggauuuccuuugccauaucaugcuuuuugcuuuguguuguuuugcugggguucaucaugugggccugccaaaaaggcaacauuaggugcaacauuugcauuuga

SEQ ID NO: 33116 - RNA, 1698 nt, Artificial Sequence
  derived and/or modified CDS sequence (wt) from hemagglutinin__InfluenzaA__ABG80172
augaaaguaaaacuacugguccuguuauguacauuuacagcuacauaugcagacacaauauguauaggguaccaugccaacaacucaaccgacacuguugacacaguacuugagaagaaugugacagugacacacucugucaaccuacuugaggacagucacaauggaaaacuaugucuacuaaaaggaauagccccacuacaauuggguaauugcagcguugccggauggaucuuaggaaacccagaaugcgaauuacugauuuccaaggaaucaugguccuacauuguagaaacaccaaauccugagaauggaacauguuacccaggguauuucgccgacuaugaggaacugagggagcaauugaguucaguaucuucauuugagagauucgaaauauuccccaaagaaagcucauggcccaaccacaccguaaccggaguaucagcaucaugcucccauaaugggaaaagcaguuuuuacagaaauuugcuauggcugacggggaagaaugguuuguacccaaaccugagcaaguccuaugcaaacaacaaagagaaagaaguccuuguacuaugggguguucaucacccgccuaacauaggggaccaaagggcccucuaucauacagaaaaugcuuaugucucuguagugucuucacauuauagcagaagauucaccccagaaauagccaaaagacccaaaguaagagaucaggaaggaagaaucaacuacuacuggacucugcuggaacccggggauacaauaauauuugaggcaaauggaaaucuaauagcgccacgguaugcuuucgcacugaguagaggcuuuggaucaggaaucaucaccucaaaugcaccaauggaugaaugugaugcgaagugucaaacaccucagggagcuauaaacagcagucuuccuuuccagaacguacacccagucacaauaggagaguguccaaaguaugucaggagugcaaaauuaaggaugguuacaggacuaaggaacaucccauccauucaauccagagguuuguuuggagccauugccgguuucauugaagggggguggacuggaaugguagaugggugguaugguuaucaucaucagaaugagcaaggaucuggcuaugccgcagaucaaaaaagcacacaaaaugccauuaacgggauuacaaacaaggugaauucuguaauugagaaaaugaacacucaauucacagcugugggcaaagaauucaacaaauuggaaagaaggauggaaaacuuaaauaaaaaaguugaugauggguuucuagacauuuggacauauaaugcagaauuguugguucuacuggaaaaugaaaggacuuuggauuuccauaacuccaaugugaagaaucuguaugagaaaguaaaaagccaauuaaagaauaaugccaaagaaauaggaaacggguguuuugaauucuaucacaaguguaacaaugaaugcauggagagugugaaaaauggaacuuaugacuauccaaaauauuccgaagaaucaaaguuaaacagggagaaaauugauggagugaaauuggaaucaaugggagucuaucagauucuggcgaucuacucaacugucgccaguucccugguucuuuuggucucccugggggcaaucagcuucuggauguguuccaaugggucuuugcaguguagaauaugcaucuga

SEQ ID NO: 33117 - RNA, 1698 nt, Artificial Sequence
  derived and/or modified CDS sequence (wt) from hemagglutinin__InfluenzaA__ABG80183
augaaaguaaaacuacugguccuguuauguacauuuacagcuacauaugcagacacaauauguauaggguaccaugccaacaacucaaccgacacuguugacacaguacuugagaagaaugugacagugacacacucugucaaccuacuugaggacagucacaauggaaaacuaugucuacuaaaaggaauagccccacuacaauuggguaauugcagcguugccggauggaucuuaggaaacccagaaugcgaauuacugauuuccaaggaaucaugguccuacauuguagaaacaccaaauccugagaauggaacauguuacccaggguauuucgccgacuaugaggaacugagggagcaauugaguucaguaucuucauuugagagauucgaaauauuccccaaagaaagcucauggcccaaccacaccguaaccggaguaucagcaucaugcucccauaaugggaaaagcaguuuuuacagaaauuugcuauggcugacggggaagaaugguuuguacccaaaccugagcaaguccuaugcaaacaacaaagagaaagaaguccuuguacuaugggguguucaucacccgccuaacauagggggccaaagggcccucuaucauacagaaaaugcuuaugucucuguagugucaucacauuauagcagaagauucaccccagaaauagccaaaagacccaaaguaagagaucaggaaggaagaaucaacuacuacuggacucugcuggaacccggggauacaauaauauuugaggcaaauggaaaucuaauagcgccacgguaugcuuucgcacugaguagaggcuuuggaucaggaaucaucaccucaaaugcaccaauggaugaaugugaugcgaagugucaaacaccucagggagcuauaaacagcagucuuccuuuccagaacguacacccagucacaauaggagaguguccaaaguaugucaggagugcaaaauuaaggaugguuacaggacuaaggaacaucccauccauucaauccagagguuuguuuggagccauugccgguuucauugaagggggguggacuggaaugguagaugggugguaugguuaucaucaucagaaugagcaaggaucuggcuaugccgcagaucaaaaaagcacacaaaaugccauuaacgggauuacaaacaaggugaauucuguaauugagaaaaugaacacucaauucacagcugugggcaaagaauucaacaaauuggagagaaggauggaaaacuuaaauaaaaaaguugaugauggguuucuagacauuuggacauauaaugcagaauuguugguucuacuggaaaaugaaaggacuuuggauuuccaugacuccaaugugaagaaucuguaugagaaaguaaaaagccaauuaaagaauaaugccaaagaaauaggaaacggguguuuugaauucuaucacaaguguaacaaugaaugcauggagagugugaaaaauggaacuuaugacuauccaaaauauuccgaagaaucaaaguuaaacagggagaaaauugauggagugaaauuggaaucaaugggagucuaucagauucuggcgaucuacucaacugucgccaguucccugguucuuuuggucucccugggggcaaucagcuucuggauguguuccaaugggucuuugcaguguagaauaugcaucuga

SEQ ID NO: 33118 - RNA, 1701 nt, Artificial Sequence
  derived and/or modified CDS sequence (wt) from hemagglutinin__InfluenzaA__ABG80194
augaagacuaucauugcuuugagcuacauuuuaugucugguuuucgcucaaaaacuucccguaaaugacaacagcacggcaacgcugugccugggacaccaugcagugccaaacggaacgcuagugaaaacaaucacgaaugaccacauugaagugacuaaugcuacugagcugguucagaguuccucaacagguagaauaugcgacaguccucaccaaauccuugauggagaaaacugcacgcuaauagaugcucuauugggagacccucauugugauggcuuccaaaauaaggaauggaaccuuuuuguugaacgcagcacagccuacagcaacuguuacccuuaugaugugccggauuaugccucccuuaggucacuaguugccucauccggcacacuggaguuuaacaaugaaagcuucaauuggacuggagucgcucagaauggaacaagcucugcuugcaaaaggagaucuauuaaaaguuucuuuaguagauugaauugguugcaccaauuaaaauacaaauauccagcacugaacgugacuaugccaaacaaugaaaaauuugacaaauuguacauuugggggguucaccacccgaguacggacagugaccaaaucagccuauaugcucaagcaucagggagagucacagucucuaccaaaagaagccaacaaacuguaaucccgaauaucggaucuagacccuggguaaggggugucuccagcauaauaagcaucuauuggacaauaguaaaaccgggagacauacuuuugauuaacagcacagggaaucuaauugcuccucgggguuacuuuaaaauacgaagugggaaaagcucaauaaugaggucaaaugcacccauuggcaaaugcaauucugaaugcaucacuccaaauggaagcauucccaaugacaaaccauuucaaaauguaaacaggaucacauauggggccugucccagauauguuaagcaaaacacucugaaauuggcaacagggaugcggaauguaccagagaaacaaacuagaggcauauucggcgcaaucgcggguuucauagaaaaugguugggagggaaugguggacgguugguacgguuucaggcaucaaaauucugagggcacaggacaagcagcagaucuuaaaagcacucaagcagcaaucaaccaaaucaacgggaaacugaauagguuaaucgagaaaacaaacgagaaauuccaucaaauugaaaaagaauucucagaaguagaagggagaauucaggaccucgagaaauauguugaggacacuaaaauagaucucuggucguacaacgcggagcuucuuguugcccuggagaaccaacauacaauugaucuaacugacucagaaaugaacaaacuguuugaaagaacaaggaagcaacugagggaaaaugcugaggauaugggcaaugguuguuucaaaauauaccacaaaugugacaaugccugcauagggucaaucagaaauggaacuuaugaccaugauguauacagagacgaagcauuaaacaaccgguuccagaucaaagguguugagcugaagucaggauacaaagauuggauccuauggauuuccuuugccauaucauguuuuuugcuuuguguuguuuugcugggguucaucaugugggccugccaaaaaggcaacauuaggugcaacauuugcauuuga

SEQ ID NO: 33119 - RNA, 1701 nt, Artificial Sequence
  derived and/or modified CDS sequence (wt) from hemagglutinin__InfluenzaA__ABG80205
augaagacuaucauugcuuugagcuacauuuuaugucugguuuucgcucaaaaacuucccggaaaugacaacagcacggcaacgcugugccuggggcaccaugcagugccaaacggaacgcuagugaaaacaaucacgaaugaccaaauugaagugaccaaugcuacugagcugguucagaguuccucaacagguggaauaugcgacaguccucaccaaauccuugauggagaaaacugcacacuaauagaugcucuauugggagacccucauugugauggcuuccaaaauaaggaaugggaccuuuuuguugaacgcagcaaagccuacagcaacuguuacccuuaugaugugccggauuaugccucccuuaggucacuaguugccucauccggcacacuggaguuuaacaaugaaagcuucaauuggacuggagucgcucagaauggaacaagcucugcuugcaaaaggagaucuaauaaaaguuucuuuaguagauugaauugguugcaccaauuaaaauacaaauacccagcacugaacguggcuaugccaaacaaugaaaaauuugacaaauuguacauuugggggguucaccacccgaguacggacagugaccaaaucagccuauaugcucaagcaccagggagagucacagucucuaccaaaagaagccaacaaacuguaaucccgaauaucggaucuagacccuggguaaggggugucuccagcagaauaagcaucuauuggacaauaguaaaaccgggagacauacuuuugauuaacugcacagggaaucuaauugcuccucgggguuacuucaaaauacgaagugggaaaagcucaauaaugaggucagaugcauccauuggcaaaugcaauucugaaugcaucacuccaaauggaagcauucccaaugacaaaccauuucaaaauguaaacaggaucacauauggggccugucccagauauguuaagcaaaacacucugaaauuggcaacagggaugcggaauguaccagagaaacaaacuagaggcauauucggcgcaaucgcggguuucauagaaaaugguugggagggaaugguggacgguugguacgguuucaggcaucaaaauucugagggcacaggacaagcagcagaucucaaaagcacucaagcagcaaucaaccaaaucaacgggaaacugaauagguuaaucgagaaaacgaacgagaaauuccaucaaauugaaaaagaauucucagaaguggaagggagaauucaggaccucgagaaauauguugaggacacuaaaauaaaucucuggucguacaacgcggagcuucuuguugcccuggagaaccagcauacaauugaucuaacugacucagaaaugaacaaacuauuugaaagaacaaagaagcaacugagggaaaaugcugaggauaugggcaaugguuguuucaaaauauaccacaaaugugacaaugccugcauagggucaaucagaaaugggacuuaugaccaugauguauacagagacgaagcauuaaacaaccgguuccagaucaaagguguugagcugaagucaggauacaaagauuggauccuauggauuuccuuugccauaucauguuuuuugcuuuguguugucuugcugggguucaucaugugggccugccaaaaaggcaacauuaggugcaacauuugcauuuga

SEQ ID NO: 33120 - RNA, 1701 nt, Artificial Sequence
  derived and/or modified CDS sequence (wt) from hemagglutinin__InfluenzaA__ABG80216
augaagacuaucauugcuuugagcuacauuuuaugucugguuuucgcucaaaaacuucccguaaaugacaacagcacggcaacgcugugccugggacaccaugcagugccaaacggaacgcuagugaaaacaaucacgaaugaccacauugaagugacuaaugcuacugagcugguucagaguuccccaacagguagaauaugcgacaguccucaccaaauccuugauggagaaaacugcacacuaauagaugcucuauugggagacccucauugugauggcuuccaaaauaaggaaugggaccuuuuuguugaacgcagcacagccuacagcaacuguuacccuuaugaugugccggauuaugccucccuuaggucacuaguugccucauccggcacacuggaguuuaacaaugaaagcuucaauuggacuggagucgcucagaauggaacaagcucugcuugcaaaaggagaucuauuaaaaguuucuuuaguagauugaauugguugcaccaauuaaaauacaaauauccagcacugaacgugacuaugccaaacaaugaaaaauuugacaaauuguacauuugggggguucaccacccgaguacggacagugaccaaaucagccuauaugcucaagcaccagggagagucacagucucuaccaaaagaagccaacaaacuguaaucccgaauaucggaucuagacccuggguaaggggugucuccagcagaauaagcaucuauuggacaauaguaaaaccgggagacauacuuuugauuaacagcacagggaaucuaauugcuccucgggguuacuucaaaauacgaagugggaaaagcucaauaaugaggucaaauacacccauuggcaaaugcaauucugaaugcaucacuccaaauggaagcauucccaaugacaaaccauuucaaaauguaaacaggaucacauauggggccugucccagauauguuaagcaaaacacucugaaauuggcaacagggaugcggaauguaccagagaaacaaacuagaggcauauucggcgcaauugcggguuucauagaaaaugguugggaaggaaugguggacgguugguacgguuucaggcaucaaaauucugagggcacaggacaagcagcagaucuuaaaagcacucaagcugcaaucaaccaaaucaacgggaaacugaauagguuaaucgagaaaacaaacgagaaauuccaucaaauugaaaaagaauucucagaaguagaagggagaauucaggaccucgagaaauauguugaggacaccaaaauagaucucuggucguacaacgcggagcuucuuguugcccuggagaaccaacauacaauugaucuaacugacucagaaaugaacaaacuguuugaaagaacaaggaagcaacugagggaaaaugcugaggauaugggcaaugguuguuucaaaauauaccacaaaugugacaaugccugcauagggucaaucagaaauggaacuuaugaccaugauguauacagagacgaagcauuaaacaaccgguuccagaucaaagguguugagcugaagucaggauacaaagauuggauccuauggauuuccuuugccauaucauguuuuuugcuuuguguuguuuugcugggguucaucaugugggccugccaaaaaggcaacauuaggugcaacauuugcauuuga

SEQ ID NO: 33121 - RNA, 1701 nt, Artificial Sequence
  derived and/or modified CDS sequence (wt) from hemagglutinin__InfluenzaA__ABG80227
augaagacuaucauugcuuugagcuacauuuuaugccugguuuucgcucaaaaacuucccggaaaugacaacagcacggcaacgcugugucuggggcaucaugcagugccaaacggaacgcuagugaaaacaaucacgaaugaccaaauugaaguaacuaaugcuacugagcugguucagaguuccucaacagguagaauaugcgacaguccucaccaaauccuugauggagaaaacugcacacuaauagaugcucuauugggagacccucauugugauggcuuccaaaauaaggaaugggaccuuuuuguugaacgcagcaaagccuacagcaacuguuacccuuaugaugugccggauuaugucucccuuaggucacuaguugccucaucaggcacgcuggaguuuaacaaugaaagcuucaauuggacuggagucgcucagaauggaacaagcucugcuugcaaaaggagaucugauaaaaguuucuuuaguaaauugaauugguugcaccaauuaaaauacaaauauccagcacugaacgugacuaugccaaacaaugaaaaauuugacaaauuguacauuugggggguucaccacccggguacagacagugaccaaaucagccuauaugcucaagcaucagggagagucacagucucuaccaaaagaagccaacaaacuguaaucccgaauaucggaucuagacccuggguaaggggugucuccagcagaauaagcaucuauuggacaauaguaaaaccgggagacauacuuuugauuaacagcacagggaaucuaauugcuccucgggguuacuucaaaauacgaagugggaaaagcucaauaaugaggucagaugcacccauuggcaaaugcaauucugaaugcaucacuccaaauggaagcauucccaaugacaaaccauuucaaaauguaaacaggaucacauauggggcaugucccagauauguuaagcaaaacacucugaaauuggcaacagggaugcggaaugugccagagaaacaaacuagaggcauauucggugcaaucgcgggcuucauagaaaaugguugggagggaaugauggacgguugguacgguuucaggcaucaaaauucugagggcacagggcaagcagcagaucuuaaaagcacucaagcagcaaucaaccaaaucaacgggaagcugaauagguuaaucgagaaaacgaacgagaaauuccaucaaauugaaaaagaauucucagaaguagaagggagaauucaggaccucgagaaauauguugaggacacuaaaauagaucucuggucguacaaugcggagcuucuuguugcccuggagaaccaacauacaauugaucuaacugacucagaaaugaacaaacuguuugaaagaacaaagaagcaacugagggaaaaugcugaggauaugggcaaugguuguuucaaaauauaccacaaaugugacaaugccugcauagggucaaucagaaauggaacuuaugaccaugauguauacagagacgaagcauugaacaaccgguuccagaucaaagguguugagcugaagucaggauacaaagauuggguccuauggauuuccuuugccauaucauguuuuuugcuuuguauuguuuugcugggguucaucaugugggccugccaaaaaggcaacauuaggugcaacauuugcauuuga

SEQ ID NO: 33122 - RNA, 1701 nt, Artificial Sequence; identical to SEQ ID NO: 33025
  derived and/or modified CDS sequence (wt) from hemagglutinin__InfluenzaA__ABG80238

SEQ ID NO: 33123 - RNA, 1701 nt, Artificial Sequence
  derived and/or modified CDS sequence (wt) from hemagglutinin__InfluenzaA__ABG80249
augaagacuaucauugcuuugagcuacauucuaugucugguuuucgcucaaaaacuucccggaaaugacaacagcacggcaacgcugugccuugggcaccaugcaguaccaaacggaacgauagugaaaacaaucacaaaugaccaaauugaaguuacuaaugcuacugagcugguucagaguuccucaacagguggaauaugcgacaguccucaucagauccuugauggagaaaacugcacacuaauagaugcucuauugggagacccucagugugauggcuuccaaaauaagaaaugggaccuuuuuguugaacgcagcaaagccuacagcaacuguuacccuuaugaugugccggaucaugccucccuuaggucacuaguugccucauccggcacacuggaguuuaacaaugaaagcuucgauuggacuggagucacucagaauggaacaagcucugcuugcaaaaggagaucuaauaaaaguuucuuuaguagauugaauugguugacccacuuaaaauacaaauacccagcauugaacgugacuaugccaaacaaugaaaaauuugacaaauuguacauuugggggguucaccacccggguacggacagugaccaaaucagccuauaugcucaagcaucaggaagaaucacagucucuaccaaaagaagccaacaaacuguaaucccgaauaucggaucuagacccaggguaagggaugucuccagccgaauaagcaucuauuggacaauaguaaaaccgggagacauacuuuugauuaacagcacagggaaucuaauugcuccucgggguuacuucaaaauacgaagugggaaaagcucaauaaugagaucagaugcacccauuggcaaaugcaauucugaaugcaucacuccaaauggaagcauucccaaugacaaaccauuucaaaauguaaacaggaucacauauggggccugucccagauauguuaagcaaaacacucugaaauuggcaacagggaugcgaaauguaccagagaaacaaacuagaggcauauuuggcgcaaucgcggguuucauagaaaaugguugggagggaaugguggacgguugguacgguuucaggcaucaaaauucugagggcacaggacaagcagcagaucucaaaagcacucaagcagcaaucaaccaaaucaaugggaaacugaauagguuaaucgggaaaacaaacgagaaauuccaucagauugaaaaagaauucucagaaguagaagggagaauucaggaccucgagaaauauguugaggacacuaaaauagaucucuggucauacaacgcggagcuucuuguugcccuggagaaccaacauacaauugaucuaacugacucagaaaugaacaaacuguuugaaagaacaaagaagcaacugagggaaaaugcugaggauaugggcaaugguuguuucaaaauauaccacaaaugugacaaugccugcauagggucaaucagaaauggaacuuaugaccaugauguguacagagaugaagcauuaaacaaccgguuccagaucaaagguguugagcugaagucaggauauaaagauuggauccuauggauuuccuuugccauaucauguuuuuuacuuuguguugcuuuguugggguucaucaugugggccugccaaaaaggcaacauuaggugcaacauuugcauuuga

SEQ ID NO: 33124 - RNA, 1701 nt, Artificial Sequence; identical to SEQ ID NO: 33025
  derived and/or modified CDS sequence (wt) from hemagglutinin__InfluenzaA__ABG80260

SEQ ID NO: 33125 - RNA, 1701 nt, Artificial Sequence
  derived and/or modified CDS sequence (wt) from hemagglutinin__InfluenzaA__ABG80271
augaagacuaucauugcuuugagcuacauucuaugucugguuuucgcucaaaaacuucccggaaaugacaacagcacggcaacgcugugccuugggcaccaugcaguaccaaacggaacgguagugaaaacaaucacaaaugaccaaauugaaguuacuaaugcuacugagcugguucagaguuccucaacagguggaauaugcgacaguccucaucagauccuugauggagaaaacugcacacuaauggaugcucuauugggagacccucagugugauggcuuccaaaauaagaaaugggaccuuuuuguugaacgcagcaaagccuacagcaacuguuacccuuaugaugugccggauuaugccucccuuaggucacuaguugccucauccggcacacuggaguuuaacaaugaaagcuucaauuggacuggagucacucaaaauggaacaagcucugcuugcaaaaggagaucuaauaacaguuucuuuaguagauugaauugguugacccacuuaaaauucaaauacccagcauugaacgugacuaugccaaacaaugaaaaauuugacaaauuguacauuugggggguucaccacccggguacggacaaugaccaaaucagccuauaugcucaagcaucaggaagaaucacagucucuaccaaaagaagccaacaaacuguaaucccgaauaucggaucuagacccaggguaagggauauccccagcagaauaagcaucuauuggacaauaguaaaaccaggagacauacuuuugauuaacagcacagggaaucuaauugcuccucgggguuacuucaaaauacgaagugggaaaagcucaauaaugagaucagaugcacccauuggcaaaugcaauucugaaugcaucacuccaaauggaagcauucccaaugacaaaccauuucaaaauguaaacaggaucacauauggggccugucccagauauguuaagcaaaacacucugaaauuggcaacagggaugcgaaauguaccagagaaacaaacuagaggcauauuuggcgcaaucgcggguuucauagaaaaugguugggagggaaugguggaugguugguacgguuucaggcaucaaaauucugagggaacaggacaagcagcagaucucaaaagcacucaagcagcaaucaaccaaaucaaugggaagcugaauagguugaucgggaaaaccaacgagaaauuccaucagauugaaaaagaauucucagaaguagaagggagaauucaggaccucgagaaauauguugaggacacuaaaauagaucucuggucauacaacgcggagcuucuuguugcccuggagaaccaacauacaauugaucuaacugacucagaaaugaacaaacuguuugaaagaacaaaaaagcaacugagggaaaaugcugaggauaugggcaaugguuguuucaaaauauaccacaaaugugacaaugccugcauaggaucaaucagaaauggaacuuaugaccaugauguauacagagaugaagcauuaaacaaccgguuccagaucaaagguguugagcugaagucaggauacaaagauuggauccuauggauuuccuuugccauaucauguuuuuugcuuuguguugcuuuguugggguucaucaugugggccugccaaaaaggcaacauuaggugcaacauuugcauuuga

SEQ ID NO: 33126 - RNA, 1701 nt, Artificial Sequence; identical to SEQ ID NO: 32603
  derived and/or modified CDS sequence (wt) from hemagglutinin__InfluenzaA__ABG80282

SEQ ID NO: 33127 - RNA, 1701 nt, Artificial Sequence; identical to SEQ ID NO: 32330
  derived and/or modified CDS sequence (wt) from hemagglutinin__InfluenzaA__ABG80293

SEQ ID NO: 33128 - RNA, 1701 nt, Artificial Sequence
  derived and/or modified CDS sequence (wt) from hemagglutinin__InfluenzaA__ABG80304
augaagacuaucauugcuuugagcuacauucuaugucugguuuucgcucaaaaacuucccggaaaugacaacagcacggcaacgcugugccuugggcaccaugcaguaccaaacggaacgauagugaaaacaaucacgaaugaccaaauugaaguuacuaaugcuacugagcugguucagaguuccucaacagguggaauaugcgacaguccucaucagauccuugauggagaaaacugcacacuaauagaugcucuauugggagacccucagugugauggcuuccaaaauaagaaaugggaccuuuuuguugaacgcagcaaagccuacagcaacuguuacccuuaugaugugccggauuaugccucccuuaggucacuaguugccucauccggcacacuggaguuuaacaaugaaagcuucaauuggacuggagucacucaaaauggaacaagcucugcuugcaaaaggagaucuaauaacaguuucuuuaguagauugaauugguugacccauuuaaaauucaaauacccagcauugaacgugacuaugccaaacaaugaaaaauuugacaaauuguacauuugggggguucaccacccggguacgaacaaugaccaaaucaaccuauaugcucaagcaucaggaagaaucacagucucuaccaaaagaagccaacaaacuguaaucccgaauaucggaucuagacccaggguaagggauauccccagcagaauaagcaucuauuggacaauaguaaaaccgggagacauacuuuugauuaacagcacagggaaucuaauugcuccucgggguuacuucaaaauacgaagugggaaaagcucaauaaugagaucagaugcacccauuggcaaaugcaauucugaaugcaucacuccaaauggaagcauucccaaugacaaaccauuucaaaauguaaacaggaucacauauggggccugucccagauauguuaagcaaaacacucugaaauuggcaacagggaugcgaaauguaccagagaaacaaacuagaggcauauuuggcgcaaucgcggguuucauagaaaaugguugggagggaaugguggaugguugguacgguuucaggcaucaaaauucugagggaauaggacaagcagcagaucucaaaagcacucaagcagcaaucaaccaaaucaaugggaagcugaauagguugaucgggaaaaccaacgagaaauuccaucagauugaaaaagaauucucagaaguagaagggagaauucaggaccucgagaaauauguugaggacacuaaaauagaucucuggucauacaacgcggagcuucuuguugcccuggagaaccaacauacaauugaucuaacugacucagaaaugaacaaacuguuugaaagaacaaagaagcaacugagggaaaaugcugaggauaugggcaaugguuguuucaaaauauaccacaaaugugacaaugccugcauagggucaaucagaaauggaacuuaugaccaugauguauacagagaugaagcauuaaacaaccgguuccagaucaaagguguugagcugaagucaggauacaaagauuggauccuauggauuuccuuugccauaucauguuuuuugcuuuguguugcuuuguugggguucaucaugugggccugccaaaaaggcaacauuaggugcaacauuugcauuuga

SEQ ID NO: 33129 - RNA, 1701 nt, Artificial Sequence
  derived and/or modified CDS sequence (wt) from hemagglutinin__InfluenzaA__ABG80315
augaagacuaucauugcuuugagcuacauucuaugucugguuuucgcucaaaaacuucccggaaaugacaacagcacggcaacgcugugccuugggcaccaugcaguaccaaacggaacgauagugaaaacaaucacgaaugaccaaauugaaguuacuaaugcuacugagcugauucagaguuccucaacagguggaauaugcgacaguccucaucagauccuugauggagaaaacugcacacuaauagaugcucuauugggagacccucagugugauggcuuccaaaauaagaaaugggaccuuuuuguugaacgcagcaaagccuacagcaacuguuacccuuaugaugugccggauuaugccucccuuaggucacuaguugccucauccggcacacuggaguuuaacaaugaaagcuucaauuggacuggagucacucaaaauggaacaagcucugcuugcaaaaggagaucuaauaacaguuucuuuaguagauugaauugguugacccacuuaaaauucaaauacccagcauugaacgugacuaugccaaacaaugaaaaauuugacaaauuguacauuugggggguucaccacccggguacggacaaugaccaaaucagccuauaugcucaagcaucaggaagaaucacagucucuaccaaaagaagccaacaaacuguaaucccgaauaucggaucuagacccaggguaagggauauccccagcagaauaagcaucuauuggacaauaguaaaaccgggagacaugcuuuugauuaacagcacagggaaucuaauugcuccucgggguuacuucaaaauacgaagugggaaaagcucaauaaugagaucagaugcacccauuggcaaaugcaauucugaaugcaucacuccaaauggaagcauucccaaugacaaaccauuucaaaauguaaacaggaucacauauggggccugucccagauauguuaagcaaaacacucugaaauuggcaacagggaugcgaaauguaccagagaaacaaacuagaggcauauuuggcgcaaucgcggguuucauagaaaaugguugggagggaaugguggaugguugguacgguuucaggcaucaaaauucugagggaacaggacaagcagcagaucucaaaagcacucaagcagcaaucaaccaaaucaaugggaagcugaauagguugaucgggaaaaccaacgagaaauuccaucagauugaaaaagaauucucagaaguagaagggagaauucaggaccucgagaaauauguugaggacacuaaaauagaucucuggucauacaacgcggagcuucuuguugcccuggagaaccaacauacaauugaucuaacugacucagaaaugaacaaacuguuugaaagaacaaagaagcaacugagggaaaaugcugaggauaugggcaaugguuguuucaaaauauaccacaaaugugacaaugccugcauagggucaaucagaaauggaacuuaugaccaugauguauacagagaugaagcauuaaacaaccgguuccagaucaaagguguugagcugaagucaggauacaaagauuggauccuauggauuuccuuugccauaucauguuuuuugcuuuguguugcuuuguugggguucaucaugugggccugccaaaaaggcaacauuaggugcaacauuugcauuuga

SEQ ID NO: 33130 - RNA, 1701 nt, Artificial Sequence
  derived and/or modified CDS sequence (wt) from hemagglutinin__InfluenzaA__ABG80326
augaagacuaucauugcuuugagcuacauucuaugucugguuuucgcucaaaaacuucccggaaaugacaacagcacggcaacgcugugccuugggcaccaugcaguaccaaacggaacgauagugaaaacaaucacgaaugaccaaauugaaguuacuaaugcuacugagcugguucagaguuccucaacagguggaauaugcgacaguccucaucagauccuugauggagaaaacugcacacuaauagaugcucuauugggagacccucagugugauggcuuccaaaauaagaaaugggaccuuuuuguugaacgcagcaaagccuacagcaacuguuacccuuaugaugugccggauuaugccucccuuaggucacuaguugccucauccggaacacuggaguuuaacaaugaaagcuucaauuggacuggagucacucaaaauggaacaagcucugcuugcaaaaggagaucuaauaacaguuucuuuaguagauugaauugguugacccauuuaaaauucaaauacccagcauugaacgugacuaugccaaacaaugaaaaauuugacaaauuguacauuugggggguucaccacccggguacgaacaaugaccaaaucagccuauaugcucaagcaucaggaagaaucacagucucuaccaaaagaagccaacaaacuguaaucccgaauaucggaucuagacccaggguaagggauauccccagcagaauaagcaucuauuggacaauaguaaaaccgggagacauacuuuugauuaacagcacagggaaucuaauugcuccucgggguuacuucaaaauacgaagugggaaaagcucaauaaugagaucagaugcacccauuggcaaaugcaauucugaaugcaucacuccaaauggaagcauucccaaugacaaaccauuucaaaauguaaacaggaucacauauggggccugucccagauauguuaagcaaaacacucugaaauuggcaacagggaugcgaaauguaccagagaaacaaacuagaggcauauuuggcgcaaucgcggguuucauagaaaaugguugggagggaaugguggaugguugguacgguuucaggcaucaaaauucugagggaauaggacaagcagcagaucucaaaagcacucaagcagcaaucaaccaaaucaaugggaagcugaauagguugaucgggaaaaccaacgagaaauuccaucagauugaaaaagaauucucagaaguagaagggagaauucaggaccucgagaaauauguugaggacacuaaaauagaucucuggucauacaacgcggagcuucuuguugcccuggagaaccaacauacaauugaucuaacugacucagaaaugaacaaacuguuugaaagaacaaagaagcaacugagggaaaaugcugaggauaugggcaaugguuguuucaaaauauaccacaaaugugacaaugccugcauagggucaaucagaaauggaacuuaugaccaugauguauacagagaugaagcauuaaacaaccgguuccagaucaaagguguugagcugaagucaggauacaaagauuggauccuauggauuuccuuugccauaucauguuuuuugcuuuguguugcuuuguugggguucaucaugugggccugccaaaaaggcaacauuaggugcaacauuugcauuuga

SEQ ID NO: 33131 - RNA, 1701 nt, Artificial Sequence; identical to SEQ ID NO: 32334
  derived and/or modified CDS sequence (wt) from hemagglutinin__InfluenzaA__ABG80337

SEQ ID NO: 33132 - RNA, 1701 nt, Artificial Sequence
  derived and/or modified CDS sequence (wt) from hemagglutinin__InfluenzaA__ABG80359
augaagacuaucauugcuuugagcuacauuuuaugucugguuuucgcucaaaaacuucccggaaaugacaacagcacagcaacgcugugccugggacaucaugcagugccaaacggaacgcuggugaaaacaaucacgaaugaucaaauugaagugacuaaugcuacugagcugguucagaguuccucaacagguagaauaugcgacaguccucaccgaauccuugaugggaaaaacugcacacugauagaugcucuauugggagacccucauugugauggcuuccaaaauaaggaaugggaccuuuuuguugaacgcagcaaagcuuacagcaacuguuacccuuaugaugugccggauuaugccucccuuaggucacuaguugccucaucaggcacccuggaguuuaucaaugaagacuucaauuggacuggagucgcucaggaugggggaagcuaugcuugcaaaaggggaucuguuaacaguuucuuuaguagauugaauugguugcacaaauuagaauacaaauauccagcgcugaacgugacuaugccaaacaauggcaaauuugacaaauuguacauuugggggguucaccacccgagcacggacagugaccaaaccagccuauauguucgagcaucagggagagucacagucucuaccaaaagaagccaacaaacuguaaccccgaauaucgggucuagacccuggguaaggggucuguccaguagaauaagcaucuauuggacaauaguaaaaccgggagacauacuuuugauuaauagcacagggaaucuaauugcuccucgggguuacuucaaaauacgaaaugggaaaagcucaauaaugaggucagaugcacccauuggcaacugcaguucugaaugcaucacuccaaauggaagcauucccagugacaaaccuuuucaaaauguaaacaggaucacauauggggccugccccagauauguuaagcaaaacacucugaaauuggcaacagggaugcggaauguaccagagaaacaaacuagaggcauauucggcgcaaucgcagguuucauagaaaaugguugggagggaaugguagacgguugguacgguuucaggcaucaaaauucugagggcacaggacaagcagcagaucuuaaaagcacucaagcagcagucgaccaaaucaacgggaaacugaauagguuaaucgagagaacgaacgagaaauuucaucaaaucgaaaaagaauucucagaaguagaaggaagaauucaggaccucgagaaauauguugaagacacuaaaauagaucucuggucuuacaacgcggagcuucuuguugcccuggagaaccaacauacaauugaucuaacugacucagaaaugaacaaacuguuugaaaaaacaaggaagcaacugagggaaaaugcugaggacaugggcaaugguugcuucaaaauauaccacaaaugugacaaugccugcauagggucaaucagaaauggaacuuaugaccaugauguauacagagacgaagcauuaaacaaccgguuccagaucaaagguguugagcugaagucaggauacaaagauuggauccuauggauuuccuuugccauaucaugcuuuuugcuuuguguuguuuugcugggguucaucaugugggccugccaaaaaggcaacauuaggugcaacauuugcauuuga

SEQ ID NO: 33133 - RNA, 1701 nt, Artificial Sequence
  derived and/or modified CDS sequence (wt) from hemagglutinin__InfluenzaA__ABG80370
augaagacuaucauugcuuugagcuacauuuuaugucugguuuucgcucaaaaacuucccggaaaugacaacagcacagcaacgcugugccugggacaccaugcagugccaaacggaacgcuagugaaaacaaucacgaaugaucaaauugaagugacuaaugcuacugagcugguucagaguuccucaacagguagaauaugcgacaguccucaccgaauccuugauggaaaaaacugcacacugauagaugcucuauugggagacccucauugugauggcuuccaaaauaaggaaugggaccuuuuuguugaacgcagcaaagcuuacagcaacuguuacccuuaugaugugccggauuaugccucccuuaggucacuaguugccucaucaggcacccuggaguuuaucaaugaagacuucaauuggacuggagucgcucaggaugggaaaagcuaugcuugcaaaaggggaucuguuaaaaguuucuuuaguagauugaauugguugcacaaauuagaguacaaauauccagcgcugaacgugacuaugccaaacaauggcaaauuugacaaauuguacauuugggggguucaccacccgagcacggacagugaccaaaccagccuauauguucgagcaucagggagagucacagucucuaccaaaagaagccaacaaacuguaaucccgaauaucgggucuagacccuggguaaggggucuguccaguagaauaagcaucuauuggacaauaguaaaaccgggagacauacuuuugauuaauagcacagggaaucuaauugcuccucgggguuacuucaaaauacgaaaugggaaaagcucaauaaugaggucagaugcacccauuggcaacugcaguuccgaaugcaucacuccaaauggaagcauucccaaugacaaaccuuuucaaaauguaaacaggaucacauauggggccugccccagauauguuaagcaaaacacucugaaauuggcaacagggaugcggaauguaccagagaaacaaacuagaggcauauucggcgcaaucgcagguuucauagaaaaugguugggagggaaugguagacgguugguacgguuucaggcaucaaaauucugagggcacaggacaagcagcagaucuuaaaagcacucaagcagcaaucgaccaaaucaacgggaaacugaauagguuaaucgagaaaacgaacgagaaauuccaucaaaucgaaaaagaauucucagaaguagaagggagaauucaggaccucgagaaauauguugaagacacuaaaauagaucucuggucuuacaacgcggagcuucuuguugcccuggagaaccaacauacaauugaucuaacugacucagaaaugaacaaacuguuugaaagaacaaggaagcaacugagggaaaaugcugaggacaugggcaaugguugcuucaaaauauaccacaaaugugacaaugccugcauagggucaaucagaaauggaacuuaugaccaugauguauacagagacgaagcauuaaacaaccgguuccagaucaaagguguugagcugaagucaggauacaaagauuggauccuauggauuuccuuugccauaucaugcuuuuugcuuuguguuguuuugcugggguucaucaugugggccugccaaaaaggcaacauuaggugcaacauuugcauuuga

SEQ ID NO: 33134 - RNA, 1701 nt, Artificial Sequence
  derived and/or modified CDS sequence (wt) from hemagglutinin__InfluenzaA__ABG80392
augaagacuaucauugcuuugagcuacauuuuaugucugguuuucgcucaaaaacuucccggaaaugacaacagcacagcaacgcugugccugggacaccaugcagugccaaacggaacgcuagugaaaacaaucacgaaugaucaaauugaagugacuaaugcuacugagcugguucagaguuccucaacagguagaauaugcgacaguccucaccgaauccuugauggaaaaaacugcacacugauagaugcucuauugggagacccucauugugauggcuuccaaaauaaggaaugggaccuuuuuguugaacgcagcaaagcuuacagcaacuguuacccuuaugaugugccggauuaugccucccuuaggucacuaguugccucaucaggcacccuggaguuuaucaaugaagacuucaauuggacuggagucgcucaggaugggaaaagcuaugcuugcaaaaggggaucuguuaacaguuucuuuaguagauugaauugguugcacaaauuagaauacaaauauccagcgcugaacgugacuaugccaaacaauggcaaauuugacaaauuguacauuugggggguucaccacccgagcacggacagugaccaaaccagccuauauguucgagcaucagggagagucacagucucuaccaaaagaagccaacaaacuguaaucccgaauaucgggucuagacccuggguaaggggucuguccaguagaauaagcaucuauuggacaauaguaaaaccgggagacauacuuuugauuaauagcacagggaaucuaauugcuccucgggguuacuucaaaauacgaaaugggaaaagcucaauaaugaggucagaugcacccauuggcaacugcaguucugaaugcaucacuccaaauggaagcauucccaaugacaaaccuuuucaaaauguaaacaggaucacauauggggccugccccagauauguuaagcaaaacacucugaaauuggcaacagggaugcggaauguaccagagaaacaaacuagaggcauauucggcgcaaucgcagguuucauagaaaaugguugggagggaaugguagacgguugguacgguuucaggcaucaaaauucugagggcacaggacaagcagcagaucuuaaaagcacucaagcagcaaucgaccaaaucaacgggaaacugaauagguuaaucgagaaaacgaacgagaaauuccaucaaaucgaaaaagaauucucagaaguagaagggagaauucaggaccucgagaaauauguugaagacacuaaaauagaucucuggucuuacaacgcggagcuucuuguugcccuggagaaccaacauacaauugaucuaacugacucagaaaugaacaaacuguuugaaagaacaaggaagcaacugagggaaaaugcugaggacaugggcaaugguugcuucaaaauauaccacaaaugugacaaugccugcauagggucaaucagaaauggaacuuaugaccaugauguauacagagacgaagcacuaaacaaccgguuccagaucaaagguguugagcugaagucaggauacaaagauuggauccuauggauuuccuuugccauaucaugcuucuugcuuuguguuguuuugcugggguucaucaugugggccugccaaaaaggcaacauuaggugcaacauuugcauuuga

SEQ ID NO: 33135 - RNA, 1701 nt, Artificial Sequence; identical to SEQ ID NO: 33065
  derived and/or modified CDS sequence (wt) from hemagglutinin__InfluenzaA__ABG80403

SEQ ID NO: 33136 - RNA, 1701 nt, Artificial Sequence; identical to SEQ ID NO: 33065
  derived and/or modified CDS sequence (wt) from hemagglutinin__InfluenzaA__ABG80414

SEQ ID NO: 33137 - RNA, 1701 nt, Artificial Sequence
  derived and/or modified CDS sequence (wt) from hemagglutinin__InfluenzaA__ABG80425
augaagacuaucauugcuuugagcuacauuuuaugucugguuuucgcucaaaaacuucccggaaaugacaacagcacagcaacgcugugccugggacaccaugcagugccaaacggaacgcuagugaaaacaauuacgaaugaucaaauugaagugacuaaugcuacugagcugguucagaguuccucaacagguagaauaugcgacaguccucaccgaauccuugauggaaaaaacugcacacugauagaugcucuauugggagacccucauugugauggcuuccaaaauaaggaaugggaccuuuuuguugaacgcagcaaagcuuacagcaacuguuacccuuaugaugugccggauuaugccucccuuaggucacuaguugccucaucaggcacccuagaguuuaucaaugaagacuucaauuggacuggaguagcucaggaugggaaaagcuaugcuugcaaaaggggaucuguuaacaguuucuuuaguagauugaauugguugcacaaauuagaauacaaauauccagcgcugaacgugacuaugccaaacaauggcaaauuugacaaauuguacauuugggggguucaccacccgagcacggacagugaccaaaccagccuauauguucgagcaucagggagagucacagucucuaccaaaagaagccaacaaacuguaaucccgaauaucgggucuagacccuggguaaggggucuguccaguagaauaagcaucuauuggacaauaguaaaaccgggagacauacuuuugauuaauagcacagggaaucuaauugcuccucgggguuacuucaaaauacgaaaugggaaaagcucaauaaugaggucagaugcacccauuggcaacugcaguucugaaugcaucacuccaaauggaagcauucccaaugacaaaccuuuucaaaauguaaacaggaucacauauggggccugccccagauauguuaagcaaaacacucugaaauuggcaacagggaugcggaauguaccagagaaacaaacuagaggcauauucggcgcaaucgcagguuucauagaaaaugguugggagggaaugguagacgguugguacgguuucaggcaucaaaauucugagggcacaggacaagcagcagaucuuaaaagcacucaagcagcaaucgaccaaaucaacgggaaacugaauagguuaaucgagaaaacgaacgagaaauuccaucaaaucgaaaaagaauucucagaaguagaagggagaauucaggaccucgagaaauauguugaagacacuaaaauagaucucuggucuuacaacgcggagcuucuuguugcccuggagaaccaacauacaauugaucuaacugacucagaaaugaacaaacuguuugaaagaacaaggaagcaacugagggaaaaugcugaggacaugggcaaugguugcuucaaaauauaccacaaaugugacaaugccugcauagggucaaucagaaauggaacuuaugaccaugauguauacagagacgaagcauuaaacaaccgguuccagaucaaagguguugagcugaagucaggauacaaagauuggauccuauggauuuccuuugccauaucaugcuuuuugcuuuguguuguuuugcugggguucaucaugugggccugccaaaaaggcaacauuaggugcaacauuugcauuuga

SEQ ID NO: 33138 - RNA, 1701 nt, Artificial Sequence
  derived and/or modified CDS sequence (wt) from hemagglutinin__InfluenzaA__ABG88289
augaagacuauuauugcuuugagcuacauuuuaugucugguuuucgcucaaaaacuucccggaaaugacaacagcacggcaacgcugugccugggacaccaugcagugccaaacggaacgcuagugaaaacaaucacgaaugaccaaauugaagugacuaaugcuacugagcugguucaggguuccucaacagguagaauaugcgacaguccucaccgaauccuugauggaaaaaacugcacacugauagaugcucuauugggagacccucauugugauggcuuccaaaauaaggaaugggaccuuuuuguugaacgcagcaaagcuuacagcaacuguuacccuuaugaugugccggauuaugccucccuuaggucacuaguugccucaucaggcacccuggaguuuaacaaugaaagcuucaauuggacuggagucgcccagaauggaacaagcuaugcuugcaaaaggagaucuguuaaaaguuucuuuaguagauugaauugguugcacaaauuagaauacaaauauccagcacugaacgugacuaugccaaacaaugacaaauuugacaaauuguacauuugggggguucaccacccgaguacggacagugaccaaaccagccuauauguucaagcaucagggagagucacagucucuaccaaaagaagccaacaaacuguaaucccgaauaucggaucuagacccuggguaaggggugucuccagcagaauaagcauauauuggacaauaguaaaaccgggagacauacuuuugauuaacagcacagggaaucuaauugcuccucgggguuacuucaaaauacgaagugggaaaagcucaauaaugaggucagaugcacccauugacaacugcaauucugaaugcaucacuccaaauggaagcauucccaaugacaaaccauuucaaaauguaaacaggaucacauauggggccugucccagauauguuaagcaaaacacucugaaauuggcaacagggaugcggaauguaccagagaaacaaacuagaggcauauucggcgcaaucgcagguuucauagaaaaugguugggagggaaugguagacgguugguacgguuucaggcaucaaaauucugagggcacaggacaagcagcagaucuuaaaagcacucaagcagcaaucaaccaaaucaacgggaaacugaauagguuaaucgagaaaacgaacgagaaauuccaucaaaucgaaaaagaauucucagaaguagaagggagaauucaggaccucgagaaauauguugaagacacuaaaauagaucucuggucguacaacgcggagcuucuuguugcccuggagaaccaacauacaauugaucuaacugacucagaaaugaacaaacuguuugaaagaacaaggaagcaacugagggaaaaugcugaggacaugggcaaugguugcuucaaaauauaccacaaaugugacaaugccugcauagggucaaucagaaauggaacuuaugaccaugauguauacagagacgaagcauuaaacaaccgguuccagaucaaagguguugagcugaagucaggauacaaagauuggauccuauggauuuccuuugccauaucauguuuuuugcuuuguguuguuuuguugggguucaucaugugggccugccaaaaaggcaacauuaggugcaacauuugcauuuga

SEQ ID NO: 33139 - RNA, 1701 nt, Artificial Sequence
  derived and/or modified CDS sequence (wt) from hemagglutinin__InfluenzaA__ABG88300
augaaagcaaaacuacuaguccuguugugugcauuuacagcuacauaugcagacacaauauguauaggcuaccaugcgaacaacucaaccgacacuguugacacaguacuugagaagaacgugacagugacacacucugucaaccuacuugaggacagucacaacggaaaacuaugccgacuaaaaggaacagccccacuacaauuggguaauugcagcguugccggauggauccuaggaaacccagaaugcgaaucacuguuuucuaaggaaucaugguccuacauugcagaaacaccaaacccugagaauggaacauguuacccaggguauuucgccgacuaugaggaacugagggagcaauugagcucaguaucaucauucgagagauucgaaauauuccccaaggaaagcucauggcccaaccacaccguaaccaaaggagugacggcaucaugcucacauaaugggaaaagcaguuuuuacaaaaauuugcuauggcugacggaaaagaauggcuuguacccagaucugagcaaguccuauguaaacaacaaggagaaagaaguccuuguacuaugggguguucaucacccgucuaacauaggggaccaaagggccaucuaucauacagaaaaugcuuaugucucuguagugucuucacauuauagcagaagauucaccccagaaauaacaaaaagacccaaaguaagagaucaagaagggagaauuaacuacuacuggacucugcuggaacccggggacacaauaauauuugaggcaaauggaaaucuaauagcgccaugguacgcuuucgcacugaguagaggcuuugggucaggaaucaucaccucaaacgcaucaaugggugaaugugacgcuaagugucaaacaccccaaggagcuauaaacaguagucuuccuuuccagaaugugcacccagucacaauaggagagugucccaaguaugucaggaguacaaaauuaaggaugguuacaggacuaagaaacaucccauccauucaaucuagagguuuguuuggagccauugccgguuucauugaagggggguggacuggaaugauagauggaugguaugguuaccaucaucagaaugaacaaggaucuggcuaugcugcagaccaaaaaagcacacaaaaugccauugaugggauuacaaacaaggugaauucuguaaucgagaaaaugaacacucaauucacagcuguaggcaaagaauucaacaaauuagagagaaggauggaaaacuuaaauaagaaaguugaugauggguuucuggacauuuggacauauaaugcagaguuguugguucuccuggaaaaugaaaggacuuuggauuuucaugacucaaaugugaagaaucuguaugagaaaguaaaaacccaauugaagaauaaugccaaagaaaucgggaacggguguuuugaauucuaucacaaguguaacaaugaaugcauggaaagugugaaaaauggaacuuaugacuauccaaaauauuccgaagaaucaaaguuaaacagggaaaaaauugauggagugaaauuggaaucaaugggagucuaucagauucuggcgaucuacucaacugucgccaguucacuggugcuuuuggucucccugggggcaaucaguuucuggauguguucuaaugggucuuugcaguguagaauaugcaucuga

SEQ ID NO: 33140 - RNA, 1701 nt, Artificial Sequence; identical to SEQ ID NO: 32923
  derived and/or modified CDS sequence (wt) from hemagglutinin__InfluenzaA__ABG88311

SEQ ID NO: 33141 - RNA, 1701 nt, Artificial Sequence
  derived and/or modified CDS sequence (wt) from hemagglutinin__InfluenzaA__ABG88322
augaaagcaaaacuacuaguccuguugugugcauuuacagcuacauaugcagacacaauauguauaggcuaccaugcgaacaacucaaccgacacuguugacacaguacuugagaagaacgugacagugacacacucugucaaccuacuugaggacagucacaacggaaaacuaugccgacuaaaaggaacagccccacuacaauuggguaauugcagcguugccggauggaucuuaggaaacccagaaugcgaaucacuguuuucuaaggaaucaugguccuacauugcagaaacaccaaacccugagaauggaacauguuacccaggguauuucgccgacuaugaggaacugagggagcaauugagcucaguaucaucauucgagagauucgaaauauuccccaaggaaagcucauggcccaaccacaccguaaccaaaggagugacggcaucaugcucccacaaugggaaaagcaguuuuuacaaaaauuugcuauggcugacggaaaagaauggcuuguacccaauucugagcaaguccuauguaaacaacaaggagaaagaaguccuuguacuaugggguguucaucacccgucuaacauaggggaccaaagggccaucuaucauacagaaaaugcuuaugucucuguagugucuucacauuauagcagaagauucaccccagaaauagcaaaaagacccaaaguaagagaucaagaagggagaaucaacuacuacuggacucugcuggaacccggggacacaauaauauuugaggcaaauggaaaucuaauagcgccaugguacgcuuucgcacugaguagaggcuuugggucaggaaucaucaccucaaacgcaucaaugggugaaugugacgcuaagugucaaacaccccaaggagcuauaaacaguagucuuccuuuccagaauguacacccagucacaauaggagagugucccaaguaugucaggaguacaaaauuaaggaugguuacaggacuaagaaacaucccauccauucaaucuagagguuuguuuggagccauugccgguuucauugaagggggguggacuggaaugauagauggaugguaugguuaucaucaucagaaugaacaaggaucuggcuaugcugcagaccaaaaaagcacacaaaaugccauugaugggauuacaaacaaggugaauucuguaaucgaaaaaaugaacacucaauucacagcuguaggcaaagaauucaacaaauuagagagaaggauggaaaacuuaaauaagaaaguugaugauggauuucuagacauuuggacauauaaugcagaguuguugguucuccuggaaaaugaaaggacuuuggauuuucacgacucaaaugugaagaaucuguaugagaaaguaaaaaaccaauugaagaauaaugccaaagaaaucgggaacggguguuuugaauucuaucacaaguguaacaaugaaugcauggaaagugugaaaaauggaacuuaugacuauccaaaauauuccgaagaaucaaaguuaaacagggaaaaaauugauggagugaaauuggaaucaaugggagucuaucagauucuggcgaucuacucaacugucgccaguucacugguacuuuuggucucccugggggcaaucaguuucuggauguguucuaaugggucuuugcaguguagaauaugcaucuga

SEQ ID NO: 33142 - RNA, 1701 nt, Artificial Sequence
  derived and/or modified CDS sequence (wt) from hemagglutinin__InfluenzaA__ABG88333
augaaagcaaaacuacugguccuguuaugugcacuuucagcuacagaugcagacacaauauguauaggcuaccaugcgaacaacucaaccgauacuguugacacaguacucgaaaagaacgugacagugacacacucugucaaccuacuugaggacagucacaacggaaaacuaugcagacuaaaaggaauagccccacuacaauuggggaaaugcagcauugcaggauggaucuuaggaaacccagaaugugaaucacuguuuucuaagaaaucaugguccuacauugcagaaacaccaaacuccgagaauggaacauguuacccaggguauuucgccgacuaugaggaacugagggagcaauugaguucaguaucaucuuucgagagauucgaaauauuccccaaggaaaguucauggcccaaacacaacguaaccagaggaguaacggcaucaugcucccauaaggggaaaagcaguuuuuacagaaauuugcuauggcugacggagaaaaauggcucguacccaaaucugagcaaguccuauguuaacaacaaagagaaagaaguccuuguacuaugggguguucaucacccgucuaacauagaggaccaaaagaccaucuaucguaaagaaaaugcuuaugucucuguagugucuucacauuauaacaggagauucaccccagaaauaucaaaacgacccaaaguaagaggucaagaagggagaauuaacuacuacuggacucugcuggaacccggggacacaauaauauuugaggcaaauggaaaucuaauagcgccaugguaugcuuucgcacugaguagaggcuuugggucaggaaucaucaccucaaaugcaucgauggaugaaugugacgcgaagugucaaacaccccagggagcuauaaacaguagucuuccuuuccagaauguacacccagucacaauaggagagugcccaaaauacgucaggaguacaaaauuaaggaugguuacagggcuaaggaacaucccauccauucaauccagagguuuguuuggagccauugccgguuucauugaagggggauggacuggaaugauagauggaugguaugguuaucaucaucagaaugaacagggaucuggcuaugcugcagaucaaaaaagcacacaaaaugccauuaacgggauuacaaacaaggugaacucuguuaucgagaaaaugaacacucaauucacagcuguagguaaagaauucaacaaacuagaaaaaaggauggaaaacuuaaauaaaaaaguugaugauggauuucuggacauuuggacauauaaugcagaauuguugguucuacuggaaaaugaaaggacuuuggauuuucaugacucaaaugugaagaaccuguaugagaaaguaaaaagccaauuaaagaauaaugccaaagaaauaggaaacggguguuuugaauucuaccacaaguguaacaaugaaugcauggaaaguguaaaaaauggaacuuaugacuauccaaaauauucagaggaaucaaaguuaaacagggaaaaaauugauggagugaaauuggaaucaaugggagucuaucagauucuggcgaucuacucaacugucgccaguucacuggugcuuuuggucucccugggggcaaucagcuucuggauguguucuaaugggucuuugcagugcagaauaugcaucuga

SEQ ID NO: 33143 - RNA, 1701 nt, Artificial Sequence
  derived and/or modified CDS sequence (wt) from hemagglutinin__InfluenzaA__ABG88344
augaaagcaaaacuacugguccuguuaugugcacuuucagcuacagaugcagacacaauauguauaggcuaccaugcgaacaacucaaccgauacuguugacacaguacucgaaaagaacgugacagugacacacucugucaaccuacuugaggacagucacaacggaaaacuaugcagacuaaaaggaauagccccacuacaauuggggaaaugcagcauugccggauggaucuuaggaaacccagaaugugaaucacuguuuucuaagaaaucaugguccuacauugcagaaacaccaaacuccgagaauggaacauguuacccaggguauuucgccgacuaugaggaacugagggagcaauugaguucaguaucaucuuucgagagauucgaaauauuccccaaggaaaguucauggcccaaacacaacguaaccagaggaguaacggcaucaugcucccauaaggggaaaagcaguuuuuacagaaauuugcuauggcugacggagaaaaauggcucguacccaaaucugagcaaguccuauguuaacaacaaagagaaagaaguccuuguacuaugggguguucaucacccgucuaacauagaggaccaaaagaccaucuaucguaaagaaaaugcuuaugucucuguagugucuucacauuauaacaggagauucaccccagaaauaucaaaacgacccaaaguaagaaaucaagaagggagaauuaacuacuacuggacucugcuggaacccggggacacaauaauauuugaggcaaauggaaaucuaauagcgccaugguaugcuuucgcacugaguagaggcuuugggucaggaaucaucaccucaaacgcaucgauggaugaaugugacgcgaagugucaaacaccccagggagcuauaaacaguagucuuccuuuccagaauguacacccagucacaauaggagagugcccaaaauacgucaggaguacaaaauuaaggaugguuacaggacuaaggaacaucccauccauucaauccagagguuuguuuggagccauugccgguuucauugaagggggauggacuggaaugauagauggaugguaugguuaucaucaucagaaugaacagggaucuggcuaugcugcagaucaaaaaagcacacaaaaugccauuaacgggauuacaaacaaggugaacucuguuaucgagaaaaugaacacucaauucacagcuguagguaaagaauucaacaaacuagaaaaaaggauggaaaacuuaaauaaaaaaguugaugauggauuucuggacauuuggacauauaaugcagaauuguugguucuacuggaaaaugaaaggacuuuggauuuucaugacucaaaugugaagaaccuguaugagaaaguaaaaagccaauuaaagaauaaugccaaagaaauaggaaacggguguuuugaauucuaccacaaguguaacaaugaaugcauggaaaguguaaaaaauggaacuuaugacuauccaaaauauucagaggaaucaaaguuaaacagggaaaaaauugauggagugaaauuggaaucaaugggagucuaucagauucuggcgaucuacucaacugucgccaguucacuggugcuuuuggucucccugggggcaaucagcuucuggauguguucuaaugggucuuugcagugcagaauaugcaucuga

SEQ ID NO: 33144 - RNA, 1701 nt, Artificial Sequence
  derived and/or modified CDS sequence (wt) from hemagglutinin__InfluenzaA__ABG88355
augaagacuaucauugcuuugagcuacauuuuaugucugguuuucgcucaaaaacuucccggaaaugacaacagcacagcaacgcugugccugggacaccaugcagugccaaacggaacgcuagugaaaacaaucacgaaugaucaaauugaagugacuaaugcuacugagcugguucagaguuccccaacagguagaauaugcgacaguccucaccgaauccuugauggaaagaacugcacacugauagaugcucuauugggagacccucauugugauggcuuccaaaauaaggaaugggaccuuuuuguugaacgcagcaaagcuuacagcaacuguuacccuuaugaugugccggauuaugccucccuuaggucacuaguugccucaucaggcacccuggaguuuaccaacgaaaacuucaauuggacuggagucgcucaggaugggaaaagcuaugcuugcaaaaggggaucuguuaacaguuucuuuaguagauugaauugguugcacaaauuagaauacaaauauccagcgcugaacgugacuaugccaaacaauggcaaauuugacaaauuguacauuugggggguucaccacccgagcacggacagugaccaaaccagccuauauguccgagcaucagggaaagucacagucucuaccaaaagaagccaacaaacuguaaucccggauaucggguauagaccauggguaaggggucuuuccaguagaauaagcaucuauuggacaauaguaaaaccgggagacauacuuuugauuaauagcacagggaaucuaauugcuccucgggguuacuucaaaauacgaaauggggaaagcucaauaaugaggucagaugcacccauuggcaacugcaguucugaaugcaucacuccaaauggaagcauucccaaugacaaaccuuuucaaaauguaaacaggaucacauauggggccugccccagauauguuaagcaaaacacucugaaauuggcaacagggaugcggaauguaccagagaaacaaacuagaggcauauucggcgcaaucgcagguuucauagaaaaugguugggagggaaugguagacgguugguacgguuucaggcaucagaauucugagggcacaggacaagcugcagaucuuaaaagcacucaagcagcaaucgaccaaaucaacgggaaacugaauagguuagucgagaaaacgaacgagaaauuccaucaaaucgaaaaagaauucucagaaguagaagggagaauucaggaccucgagaaauauguugaagacacuaaaauagaucucuggucuuacaaugcggagcuucuuguugcucuggagaaccaacauacaauugaucuaacugacucagaaaugaacaaacuauuugaaagaacaaggaagcaacugagggaaaaugcugaggacaugggcaaugguuguuucaaaauauaccacaaaugugacaaugccugcauagggucaaucagaaauggaacuuaugaccaugauguauacagagacgaagcauuaaacaaccgguuccagaucaaagguguugagcugaagucaggauacaaagauuggauccuauggauuuccuuugccauaucaugcuuuuugcuuuguguuguuuugcuuggguucaucaugugggccugccaaaaaggcaacauuaggugcaacauuugcauuuga

SEQ ID NO: 33145 - RNA, 1701 nt, Artificial Sequence
  derived and/or modified CDS sequence (wt) from hemagglutinin__InfluenzaA__ABG88366
augaagacuaucauugcuuugagcuacuuuuuaugucugguuuucgcucaaaaacuucccggaaaugacaacagcacagcaacgcugugccugggacaccaugcagugccaaacggaacgcuagugaaaacaaucacgaaugaucaaauugaagugacuaaugcuacugagcugguucagaauuccccaacagguagaauaugcgacaguccucaccgaauccuugauggaaagaacugcacacugauagaugcucuauugggagacccucauugugauggcuuccaaaauaaggaaugggaccuuuuuguugaacgcagcaaagcuuacagcaacuguuacccuuaugaugugccggauuaugccucccuuaggucacuaguugccucaucaggcacccuggaguuuaccaacgaaaacuucaauuggacuggagucgcucaggaugggaaaagcuaugcuugcaaaaggggaucuguuaacaguuucuuuaguagauugaauugguugcacaaauuagaauacaaauauccagcgcugaacgugacuaugccaaacaauggcaaauuugacaaauuguacauuugggggguucaccacccgagcacggacagugaccaaaccagccuauauguccgagcaucagggaaagucacagucucuaccaaaagaagccaacaaacuguaaucccggauaucggguauagaccauggguaaggggucuguccaguagaauaagcaucuauuggacaauaguaaaaccgggagacauacuuuugauuaauagcacagggaaucuaauugcuccucgggguuacuucaaaauacgaaaugggaaaagcucaauaaugaggucagaugcacccauuggcaacugcaguucugaaugcaucacuccaaauggaagcauucccaaugacaaaccuuuucaaaauguaaacaggaucacauauggggccugccccagauauguuaagcaaaacacucugaaauuggcaacagggaugcggaauguaccagagaaacaaacuagaggcauauucggcgcaaucgcagguuucauagaaaaugguugggagggaaugguagacgguugguacgguuucaggcaucagaauucugagggcacaggacaagcugcggaucuuaaaagcacucaagcagcaaucgaccaaaucaacgggaaacugaauagguuagucgagaaaacgaacgagaaauuccaucaaaucgaaaaagaauucucagaaguagaagggagaauucaggaccucgagaaauauguugaagacacuaaaauagaucucuggucuuacaaugcggagcuucuuguugcucuggagaaccaacauacaauugaucuaacugacucagaaaugaacaaacuauuugaaagaacaaggaagcaacugagggaaaaugcugaggacaugggcaaugguuguuucaaaauauaccacaaaugugacaaugccugcauagggucaaucagaaauggaacuuaugaccaugauguauacagagacgaagcauuaaacaaccgguuccagaucaaagguguugagcugaagucaggauacaaagauuggauccuauggauuuccuuugccauaucaugcuuuuugcuuuguguuguuuugcuuggguucaucaugugggccugccaaaaaggcaacauuaggugcaacauuugcauuuga

SEQ ID NO: 33146 - RNA, 1701 nt, Artificial Sequence
  derived and/or modified CDS sequence (wt) from hemagglutinin__InfluenzaA__ABG88377
augaagacuaucauugcuuugagcuacauuuuaugucugguuuucgcucaaaaacuucccggaaaugacaacagcacagcaacgcugugccugggacaccaugcagugccaaacggaacgcuagugaaaacaaucacgaaugaucaaauugaagugacuaaugcuacugagcugguucagaguuccccaacagguagaauaugcgacaguccucaccgaauccuugauggaaagaacugcacacugauagaugcucuauugggagacccucauugugauggcuuccaaaauaaggaaugggaccuuuuuguugaacgcagcaaagcuuacagcaacuguuacccuuaugaugugccggauuaugccucccuuaggucacuaguugccucaucaggcacccuggaguuuaccaacgaaaacuucaauuggacuggagucgcucaggaugggaaaagcuaugcuugcaaaaggggaucuguuaacaguuucuuuaguagauugaauugguugcacaaauuagaauacaaauauccagcgcugaacgugacuaugccaaacaauggcaaauuugacaaauuguacauuugggggguucaccacccgagcacggacagugaccaaaccagccuauauguccgagcaucagggaaagucacagucucuaccaaaagaagccaacaaacuguaaucccggauaucggauauagaccauggguaaggggucuguccaguagaauaagcaucuauuggacaauaguaaaaccgggagacauacuuuugauuaauagcacagggaaucuaauugcuccucgggguuacuucaaaauacgaaaugggaaaagcucaauaaugaggucagaugcacccauuggcaacugcaguucugaaugcaucacuccaaauggaagcauucccaaugacaaaccuuuucaaaauguaaacaggaucacauauggggccugccccagauauguuaagcaaaacacucugaaauuggcaacagggaugcggaauguaccagagaaacaaacuagaggcauauucggcgcaaucgcagguuucauagaaaaugguugggagggaaugguagacgguugguacgguuucaggcaucagaauucugagggcacaggacaagcugcagaucuuaaaagcacucaagcagcaaucgaccaaaucaacgggaaacugaauagguuagucgagaaaacgaacgagaaauuccaucaaaucgaaaaagaauucucagaaguagaagggagaauucaggaccucgagaaauauguugaagacacuaaaauagaucucuggucuuacaaugcggagcuucuuguugcucuggagaaccaacauacaauugaucuaacugacucagaaaugaacaaacuauuugaaagaacaaggaagcaacugagggaaaaugcugaggacaugggcaaugguuguuucaaaauauaccacaaaugugacaaugccugcauagggucaaucagaaauggaacuuaugaccaugauguauacagagacgaagcauuaaacaaccgguuccagaucaaagguguugagcugaagucaggauacaaagauuggauccuauggauuuccuuugccauaucaugcuuuuugcuuuguguuguuuugcuuggguucaucaugugggccugccaaaaaggcaacauuaggugcaacauuugcauuuga

SEQ ID NO: 33147 - RNA, 1701 nt, Artificial Sequence; identical to SEQ ID NO: 33035
  derived and/or modified CDS sequence (wt) from hemagglutinin__InfluenzaA__ABG88388

SEQ ID NO: 33148 - RNA, 1701 nt, Artificial Sequence
  derived and/or modified CDS sequence (wt) from hemagglutinin__InfluenzaA__ABG88399
augaagacuaucauugcuuugagcuacauuuuaugucugguuuucgcucaaaaacuucccggaaaugacaacagcacagcaacgcugugccugggacaccaugcagugccaaacggaacgcuagugaaaacaaucacgaaugaucaaauugaagugacuaaugcuacugagcugguucagaguuccucaacagguagaauaugcgacaguccucaccgaauccuugauggaaaaaacugcacacugauagaugcucuauugggagacccucauugugauggcuuccaaaauaaggaaugggaccuuuuuguugaacgcagcaaagcuuacagcaacuguuacccuuaugaugugccggauuaugccucccuuaggucacuaguugccucaucaggcacccuggaguuuaccaaggaaagcuucaauuggacuggagucgcucaggaugggaaaagcuaugcuugcaaaaggggaucuguuaacaguuucuuuaguagauugaauugguugcacaaauuagaauacaaauauccagcacugaacgugacuaugccaaacaaugacaaauuugacaaauuguacauuugggggguucaccacccgagcacggacagugaccaaaccagccuauauguucaagcaucagggagagucacagucucuaccaaaagaagccaacaaacuguaaucccgaauaucgggucuagacccuggguaagggguaucuccaguagaauaagcaucuauuggacaauaguaaaaccgggagacauacuuuugauuaacagcacagggaaucuaauugcuccucgggguuacuucaaaauacgaaaugggaaaagcucaauaaugaggucagaugcacccauuggcaacugcaauucugaaugcaucacuccaaauggaagcauucccaaugacaaaccuuuucaaaauguaaacaggaucacauauggggccugucccagauauguuaagcaaaacacucugaaguuggcaacagggaugcggaauguaccagagaaacaaacuagaggcauauucggcgcaaucgcagguuucauagaaaaugguugggagggaaugguagacgguugguacgguuucaggcaucaaaauucugagggcacaggacaagcagcagaucuuaaaagcacucaagcagcaaucgaccaaaucaacgggaagcugaauagguuaaucgagaaaacgaacgaaaaauuccaucaaaucgaaaaagaauucucagaaguagaagggagaauucaggaccucgagaaauauguugaagacacuaaaauagaucucuggucuuacaacgcggagcuucuuguugcccuggagaaccaacauacaauugaucuaacugacucagaaaugaacaaacuguuugaaagaacaaggaagcaacugagggaaaaugcugaggacaugggcaaugguugcuucaaaauauaccacaaaugugacaaugccugcauagggucaaucagaaauggaacuuaugaccaugauguauacagagacgaagcauuaaacaaccgguuccagaucaaagguguugagcugaagucaggauacaaagauuggauccuauggauuuccuuugccauaucaugcuuuuugcuuuguguuguuuugcugggguucaucaugugggccugccaaaaaggcaacauuaggugcaacauuugcauuuga

SEQ ID NO: 33149 - RNA, 1701 nt, Artificial Sequence
  derived and/or modified CDS sequence (wt) from hemagglutinin__InfluenzaA__ABG88410
augaagacuaucauugcuuugagcuacauuuuaugucugguuuucgcucaaaaacuucccggaaacgacaacagcacagcaacgcugugccugggacaccaugcagugccaaacggaacgcuagugaaaacaaucacgaaugaucaaauugaagugacuaaugcuacugagcugguucagaguuccucaacagguagaauaugcgacaguccucaccgaauccuugauggaaaaaacugcacacugauagaugcucuauugggagacccucauugugauggcuuccaaaauaaggaaugggaccuuuuuguugaacgcagcaaagcuuacagcaacuguuacccuuaugaugugccggauuaugccucccuuaggucacuaguugccucaucaggcacccuggaguuuaucaaugaagacuucaauuggacuggagucgcucaagaugggaaaagcuaugcuugcaaaaggggaucuguuaacaguuucuuuaguagauugaauuggcugcacaaauuagaauacaaauauccagcgcugaacgugacuaugccaaacaauggcaaauuugacaaauuguacauuugggggguucaccacccgagcacggacagugaccaaaccagccuauauguucgagcaucagggagagucacagucucuaccaaaagaagccaacaaacuguaaucccgaauaucggguuuagacccuggguaaggggucuguccaguagaauaagcaucuauuggacaauaguaaaaccgggagacauacuuuugauuaauagcacagggaaucuaauugcuccucgggguuacuucaaaauacgaaaugggaaaagcucaauaaugaggucagaugcacccauuggcaacugcaguucugaaugcaucacuccaaauggaagcauucccaaugacaaaccuuuucaaaauguaaacaggaucacauauggggccugccccagauauguuaagcaaaacacucugaaguuggcaacagggaugcggaauguaccagagaaacaaacuagaggcauauucggcgcaaucgcagguuucauagaaaaugguugggagggaaugguagacgguugguacgguuucaggcaucaaaauucugagggcacaggacaagcagcagaucuuaaaagcacucaagcagcaaucgaccaaaucaacgggaaacugaauagguuaaucgagaaaacgaacgagaaauuccaucaaaucgaaaaagaauucucagaaguagaagggagaauucaggaccucgagaaauauguugaagacacuaaaauagaucucuggucuuacaacgcggggcuucuuguugcccuggagaaccaacauacaauugaucuaacugacucagaaaugaacaaacuguuugaaagaacaaggaagcaacugagggaaaaugcugaggacaugggcaaugguugcuucaaaauauaccacaaaugugacaaugccugcauagggucaaucagaaauggaacuuaugaccaugauguauacagagacgaagcauuaaacaaccgguuccagaucaaaggugucgagcugaagucaggauacaaagauuggauccuauggauuuccuuugccauaucaugcuuuuugcuuuguguuguuuugcugggguucaucaugugggccugccaaaaaggcaacauuaggugcaacauuugcauuuga

SEQ ID NO: 33150 - RNA, 1701 nt, Artificial Sequence
  derived and/or modified CDS sequence (wt) from hemagglutinin__InfluenzaA__ABG88421
augaagacuaucauugcuuugagcuacauuuuaugucugguuuucgcucaaaaacuucccggaaaugacaacagcacagcaacgcugugccugggacaccaugcggugccaaacgggacgcuagugaaaacaaucacgaaugaucaaauugaagugacuaaugcuacugagcugguucagaguuccucaacagguagaauaugcgacaguccucaccgaauccuugauggaaaaaacugcacacugauagaugcucuauugggagacccucauugugauggcuuccaaaauaaggaaugggaccuuuuuguugaacgcagcaaagcuuacagcaacuguuacccuuaugaugugccggauuaugccucccuuaggucacuaguugccucaucaggcacccuggaguuuaucaaugaagacuucaauuggacuggagucgcucaggauggaaaaagcuaugcuugcaaaaggggaucuguuaacaguuucuuuaguagauugaauugguugcacaaauuagaauacaaauauccagcgcugaacgugacuaugccaaacaauggcaaauuugacaaauuguacauuugggggguucaccacccgagcacggacagugaccaaaccagccuauauguucgagcaucagggagagucacagucucuaccaaaagaagccaacaaacuguaaucccgaauaucggguuuagacccuggguaaggggucuguccaguagaauaagcaucuauuggacaauaguaaaaccgggagacauacuuuugauuaauagcacagggaaucuaauugcuccucgggguuacuucaaaauacggaaugggaaaagcucaauaaugaggucagaugcacccauuggcaacugcaguucugaaugcaucacuccaaauggaagcauucccaaugacaaaccuuuucaaaauguaaacaggaucacauauggggccugccccagauauguuaagcaaaacacucugaaguuggcaacagggaugcggaauguaccagagaaacaaacuagaggcauauucggcgcaaucgcagguuucauagaaaaugguugggagggaaugguagacgguugguacgguuucaggcaucaaaauucugagggcacaggacaagcagcagaucuuaaaagcacucaagcagcaaucgaccaaaucaacgggaaacugaauagguuaaucgagaaaacgaacgagaaauuccaucagaucgaaaaagaauucucagaaguagaagggagaauucaggaccucgagaaauauguugaagacacuaaaauagaucucuggucuuacaacgcggggcuucuuguugcccuggagaaccaacauacaauugaucuaacugacucagaaaugaacaaacuguuugaaagaacaaggaagcaacugagggaaaaugcugaggacaugggcaaugguugcuucaaaauauaccacaaaugugacaaugccugcauagggucaaucagaaauggaacuuaugaccaugauguauacagagacgaagcauuaaacaaccgguuccagaucaaagguguugagcugaagucaggauacaaagauuggauccuauggauuuccuuugccauaucaugcuuuuugcuuuguguuguuuugcugggguucaucaugugggccugccaaaaaggcaacauuaggugcaacauuugcauuuga

SEQ ID NO: 33151 - RNA, 1701 nt, Artificial Sequence
  derived and/or modified CDS sequence (wt) from hemagglutinin__InfluenzaA__ABG88432
augaagacuaucauugcuuugagcuacauuuuaugucugguuuucgcucaaaaacuucccggaaaugacaacagcacagcaacgcugugccugggacaccaugcggugccaaacggaacgcuagugaaaacaaucacgaaugaucaaauugaagugacuaaugcuacugagcugguucagaguuccucaacagguagaauaugcgacaguccucaccgaauccuugauggaaaaaacugcacacugauagaugcucuauugggagacccucauugugauggcuuccaaaauaaggaaugggaccuuuuuguugaacgcagcaaagcuuacagcaacuguuacccuuaugaugugccggauuaugccucccuuaggucacuaguugccucaucaggcacccuggaguuuaucaaugaagacuucaauuggacuggagucgcucaggaugggaaaagcuaugcuugcaaaaggggaucuguuaacaguuucuuuaguagauugaauugguugcacaaauuagaauacaaauauccagcgcugaacgugacuaugccaaacaauggcaaauuugacaaauuguacauuugggggguucaccacccgagcacggacagugaccaaaccagccuauauguucgagcaucagggagagucacagucucuaccaaaagaagccaacaaacuguaaucccgaauaucggguuuagacccuggguaaggggucuguccaguagaauaagcaucuauuggacaauaguaaaaccgggagacauacuuuugauuaauagcacagggaaucuaauugcuccucgggguuacuucaaaaugcggaaugggaaaagcucaauaaugaggucagaugcacccauuggcaacugcaguucugaaugcaucacuccaaauggaagcauucccaaugacaaaccuuuucaaaauguaaacaggaucacauauggggccugccccagauauguuaagcaaaacacucugaaguuggcaacagggaugcggaauguaccagagaaacaaacuagaggcauauucggcgcaaucgcagguuucauagaaaaugguugggagggaaugguagacgguugguacgguuucaggcaucaaaauucugagggcacaggacaagcagcagaucuuaaaagcacucaagcagcaaucgaccaaaucaacgggaaacugaauagguuaaucgagaaaacgaacgagaaauuccaucaaaucgaaaaagaauucucagaaguagaagggagaauucaggaccucgagaaauauguugaagacacuaaaauagaucucuggucuuacaacgcggggcuucuuguugcccuggagaaccaacauacaauugaucuaacugacucagaaaugaacaaacuguuugaaagaacaaggaagcaacugagggaaaaugcugaggacaugggcaaugguugcuucaaaauauaccacaaaugugacaaugccugcauagggucaaucagaaauggaacuuaugaccaugauguauacagagacgaagcauuaaacaaccgguuccagaucaaagguguugagcugaagucaggauacaaagauuggauccuauggauuuccuuugccauaucaugcuuuuugcuuuguguuguuuugcugggguucaucaugugggccugccaaaaaggcaacauuaggugcaacauuugcauuuga

SEQ ID NO: 33152 - RNA, 1701 nt, Artificial Sequence; identical to SEQ ID NO: 33042
  derived and/or modified CDS sequence (wt) from hemagglutinin__InfluenzaA__ABG88443

SEQ ID NO: 33153 - RNA, 1701 nt, Artificial Sequence
  derived and/or modified CDS sequence (wt) from hemagglutinin__InfluenzaA__ABG88454
augaagacuaucauugcuuugagcuacauuuuaugucugguuuucgcucaaaaacuucccggaaaugacaacagcacagcaacgcugugccugggacaccaugcagugccaaacggaacgcuagugaagacaaucacgaaugaucaaauugaagugacuaaugcuacugagcugguucagaguuccucaacagguagaauaugcgacaguccucaccgaauccuugauggaaaaaacugcacacugauagaugcucuauugggagacccucauugugauggcuuccaaaauaaggaaugggaccuuuuuguugaacgcagcaaagcuuacagcaacuguuacccuuaugaugugccggauuaugccucccuuaggucacuaguugccucaucaggcacccuggaguuuaucaaugaagacuucaauuggacuggagucgcucaggaugggaaaagcuaugcuugcaaaaggggaucugcuaacaguuucuuuaguagauugaauugguugcacaaauuagaauacaaauauccagcgcugaacgugacuaugccaaacaauggcaaauuugacaaauuguacauuugggggguucaccacccgagcacggacagugaccaaaccagccuauauguucgagcaucagggggagucacagucucuaccaaaagaagccaacaaacuguaaucccgaauaucgggucuagacccuggguaaggggucuguccaguagaauaagcaucuauuggacaauaguaaaaccgggagacauacuuuugauuaauagcacagggaaucuaauugcuccucgggguuacuucaaaauacgaagugggaaaagcucaauaaugaggucagaugcauccauuggcaacugcaguucugaaugcaucacuccaaauggaagcauucccaaugacaaaccuuuucaaaauguaaacaggaucacauauggggccugccccagauauguuaagcaaaacacucugaaauuggcaacagggaugcggaauguaccagagaaacaaacuagaggcauauucggcgcaaucgcagguuucauagaaaaugguugggagggaaugguagacgguugguacgguuucaggcaucaaaauucugagggcacaggacaagcagcagaucuuaaaagcacucaagcagcaaucgaccaaaucaacgggaaacugaauagguuaaucgguaaaacgaacgauaaauuccaucaaaucgaaaaagaauucucagaaguagaagggagaauucaggaccucgagaaauauguugaagacacuaaaauagaucucuggucuuacaacgcggagcuucuuguugcccuggagaaccaacauacaauugaucuaacugacucagaaaugaacaaacuguuugaaagaacaaggaagcaacugagagaaaaugcugaggacaugggcaaugguugcuucaaaauauaccacaaaugugacaaugccugcauagggucaaucagaaauggaacuuaugaccaugauguauacagagacgaagcauuaaacaaccgguuccagaucaaagguguugagcugaagucaggauacaaagauuggauccuauggauuuccuuugccauaucaugcuuuuugcuuuguguuguuuugcugggguucaucaugugggccugccaaaaaggcaacauuaggugcaacauuugcauuuga

SEQ ID NO: 33154 - RNA, 1701 nt, Artificial Sequence
  derived and/or modified CDS sequence (wt) from hemagglutinin__InfluenzaA__ABG88465
augaagacuaucauugcuuugagcuacauuuuaugucugguuuucgcucaaaaacuucccggaaaugacaacagcacagcaacgcugugccugggacaccaugcagugccaaacggaacgcuagugaaaacaaucacgaaugaucaaauugaagugacuaaugcuacugagcugguucagaguuccucaacagguagaauaugcgacaguccucaccgaauccuugauggaaaaaacugcacacugauagaugcucuauugggagacccucauugugauggcuuccaaaauaaggaaugggaccuuuuuguugaacgcagcaaagcuuacagcaacuguuacccuuaugaugugccggauuaugccucccuuaggucacuaguugccucaucaggcacccuggaguuuaucaaugaagacuucaauuggacuggagucgcucaggaugggaaaagcuaugcuugcaaaaggggaucuguuaacaguuucuuuaguagauugaauugguugcacaaauuagaauacaaauauccagcgcugaacgugacuaugccaaacaauggcaaauuugacaaauuguacauuugggggguucaccacccgagcacggacagugaccaaaccagccuauauguucgagcaucagggagagucacagucucuaccaaaagaagccaacaaacuguaaucccgaauaucggguuuagacccuggguaaggggucuguccaguagaauaagcaucuauuggacaauaguaaaaccgggagacauacuuuugauuaauagcacagggaaucuaauugcuccucgggguuacuucaaaauacgaaaugggaaaagcucaauaaugaggucagaugcacccauuggcaacugcaguucugaaugcaucacuccaaauggaagcauucccaaugacaaaccuuuucaaaauguaaacaggaucacauauggggccugccccagauauguuaagcaaaacacucugaaguuggcaacagggaugcggaauauaccagagaaacaaacuagaggcauauucggcgcaaucgcagguuucauagaaaaugguugggagggaaugguagacgguugguacgguuucaggcaucaaaauucugagggcacaggacaagcagcagaucuuaaaagcacucaagcagcaaucgaccaaaucaacgggaaacugaauagguuaaucgagaaaacgaacgagaaauuccaucaaaucgaaaaagaauucucagaaguagaagggagaauucaggaccucgagaaauauguugaagacacuaaaauagaucucuggucuuacaacgcggggcuucuuguugcccuggagaaccaacauacaauugaucuaacugacucagaaaugaacaaacuguuugaaagaacaaggaagcaacugagggaaaaugcugaggacaugggcaaugguugcuucaaaauauaccacaaaugugacaaugccugcauagggucaaucagaaauggaacuuaugaccaugauguauacagagacgaagcauuaaacaaccgguuccagaucaaagguguugagcugaagucaggauacaaagauuggauccuauggauuuccuuugccauaucaugcuuuuugcuuuguguuguuuugcugggguucaucaugugggccugccaaaaaggcaacauuaggugcaacauuugcauuuga

SEQ ID NO: 33155 - RNA, 1701 nt, Artificial Sequence
  derived and/or modified CDS sequence (wt) from hemagglutinin__InfluenzaA__ABG88476
augaagacuaucauugcuuugagcuacauuuuaugucugguuuucgcucaaaaacuucccggaaaugacaacagcacagcaacgcugugccugggacaccaugcagugccaaacggaacgcuagugaaaacaaucacgaaugaucaaauugaagugacuaaugcuacugagcugguucagaguuccucaacagguagaauaugcgacaguccucaccgaauccuugauggaaaaaacugcacacugauagaugcucuauugggagacccucauugugauggcuuccaaaauaaggaaugggaccuuuuuguugaacgcagcaaagcuuacagcaacuguuacccuuaugaugugccggauuaugccucccuuaggucacuaguugccucaucaggcacccuggaguuuaucaaugaagacuucaauuggacuggagucgcucaggaugggaaaagcuaugcuugcaaaaggggaucuguuaacaguuucuuuaguagauugaauuggcugcacaaauuagaauacaaauauccagcgcugaacgugacuaugccaaacaauggcaaauuugacaaauuauacauuugggggguucaccacccgagcacggacagugaccaaaccagccuauauguucgagcaucagggagagucacagucucuaccaaaagaagccaacaaacuguaaucccgaauaucggguuuagacccuggguaaggggucuguccaguagaauaagcaucuauuggacaauaguaaaaccgggagacauacuuuugauuaauagcacagggaaucuaauugcuccucgggguuacuucaaaauacgaaaugggaaaagcucaauaaugaggucagaugcacccauuggcaacugcaguucugaaugcaucacuccaaauggaagcauucccaaugacaaaccuuuucaaaauguaaacaggaucacauauggggccugccccagauauguuaagcaaaacacucugaaguuggcaacagggaugcggaauguaccagagaaacaaacuagaggcauauucggcgcaaucgcagguuucauagaaaaugguugggagggaaugguagacgguugguacgguuucaggcaucaaaauucugagggcacaggacaagcagcagaucuuaaaagcacucaagcagcaaucgaccaaaucaacgggaaacugaauagguuaaucgagaaaacgaacgagaaauuccaucaaaucgaaaaagaauucucagaaguagaagggagaauucaggaccucgagaaauauguugaagacacuaaaauagaucucuggucuuacaacgcggggcuucuuguugcccuggagaaccaacauacaauugaucuaacugacucagaaaugaacaaacuguuugaaagaacaaggaagcaacugagggaaaaugcugaggacaugggcaaugguugcuucaaaauauaccacaaaugugacaaugccugcauaggaucaaucagaaauggaacuuaugaccaugauguauacagagacgaagcauuaaacaaccgguuccagaucaaaggugucgagcugaagucaggauacaaagauuggauccuauggauuuccuuugccauaucaugcuuuuugcuuuguguuguuuugcugggguucaucaugugggccugccaaaaaggcaacauuaggugcaacauuugcauuuga

SEQ ID NO: 33156 - RNA, 1701 nt, Artificial Sequence
  derived and/or modified CDS sequence (wt) from hemagglutinin__InfluenzaA__ABG88487
augaagacuaucauugcuuugagcuacauuuuaugucugguuuucgcucaaaaacuucccggaaaugacaacagcacagcaacgcugugccugggacaucaugcggugccaaacggaacgcuagugaaaacaaucacgaaugaucaaauugaagugacuaaugcuacugagcugguucagaguuccucaacagguagaauaugcgacaguccucaccgaauccuugauggaaaaaacugcacacugauagaugcucuauugggagacccucauugugauggcuuccaaaauaaggaaugggaccuuuuuguugaacgcagcaaagcuuacagcaacuguuacccuuaugaugugccggauuaugccucccuuaggucacuaguugccucaucaggcacccuggaguuuaucaaugaagacuucaauuggacuggagucgcucaggaugggaaaagcuaugcuugcaaaaggggaucuguuaacaguuucuuuaguagauugaauugguugcacaaauuagaauacaaauauccagcgcugaacgugacuaugccaaacaauggcaaauuugacaaauuguacauuugggggguucaccacccgagcacggacagugaccaaaccagccuauauguucgagcaucagggagagucacagucucuaccaaaagaagccaacaaacuguaaucccgaauaucggguuuagacccuggguaaggggucuguccaguagaauaagcaucuauuggacaauaguaaaaccgggagacauacuuuugauuaauagcacagggaaucuaauugcuccucgggguuacuucaaaauacggaaugggaaaagcucaauaaugaggucagaugcacccauuggcaacugcaguucugaaugcaucacuccaaauggaagcauucccaaugacaaaccuuuucaaaauguaaacaggaucacauauggggccugccccagauauguaaagcaaaacacucugaaguuggcaacagggaugcggaauguaccagagaaacaaacuagaggcauauucggcgcaaucgcagguuucauagaaaaugguugggagggaaugguagacgguugguacgguuucaggcaucaaaauucugagggcacaggacaagcagcagaucuuaaaagcacucaagcagcaaucgaccaaaucaacgggaaacugaauagguuaaucgagaaaacgaacgagaaauuccaucaaaucgaaaaagaauucucagaaguagaggggagaauucaggaccucgagaaauauguugaagacacuaaaauagaucucuggucuuacaacgcggggcuucuuguugcccuggagaaccaacauacaauugaucuaacugacucagaaaugaacaaacuguuugaaagaacaaggaagcaacugagggaaaaugcugaggauaugggcaaugguugcuucaaaauauaccacaaaugugacaaugccugcauagggucaaucagaaauggaacuuaugaccaugauguauacagagacgaagcauuaaacaaccgguuccagaucaaagguguugagcugaagucaggauacaaagauuggauccuauggauuuccuuugccauaucaugcuuuuugcuuuguguuguuuugcugggguucaucaugugggccugccaaaaaggcaacauuaggugcaacauuugcauuuga

SEQ ID NO: 33157 - RNA, 1701 nt, Artificial Sequence
  derived and/or modified CDS sequence (wt) from hemagglutinin__InfluenzaA__ABG88498
augaagacuaucauugcuuugagcuacauuuuaugucugguuuucgcucaaaaacuucccggaaaugacaacagcacagcaacgcugugccugggacaccaugcggugccaaacggaacgcuagugaaaacaaucacgaaugaucaaauugaagugacuaaugcuacugagcugguucagaguuccucaacagguagaauaugcgacaguccucaccgaauccuugauggaaaaaacugcacacugauagaugcucuauugggagacccucauugugauggcuuccaaaauaaggaaugggaccuuuuuguugaacgcagcaaagcuuacagcaacuguuacccuuaugaugugccggauuaugccucccuuaggucacuaguugccucaucaggcacccuggaguuuaucaaugaagacuucaauuggacuggagucgcucaggaugggaaaagcuaugcuugcaaaaggggaucuguuaacaguuucuuuaguagauugaauugguugcacaaauuagaauacaaauauccagcgcugaacgugacuaugccaaacaauggcaaauuugacaaauuguacauuugggggguucaccacccgagcacggacagugaccaaaccagccuauauguucgagcaucagggagagucacagucucuaccaaaagaagccaacaaacuguaaucccgaauaucggguuuagacccuggguaaggggucuguccaguagaauaagcaucuauuggacaauaguaaaaccgggagacauacuuuugauuaauagcacagggaaucuaauugcuccucgggguuacuucaaaauacggaaugggaaaagcucaauaaugaggucagaugcacccauuggcaacugcaguucugaaugcaucacuccaaauggaagcauucccaaugacaaaccuuuucaaaauguaaacaggaucacauauggggccugccccagauauguuaagcaaaacacucugaaguuggcaacagggaugcggaauguaccagagaaacaaacuagaggcauauucggcgcaaucgcagguuucauagaaaaugguugggagggaaugguagacgguugguacgguuucaggcaucaaaauucugagggcacaggacaagcagcagaucuuaaaagcacucaagcagcaaucgaccaaaucaacgggaaacugaauagguuaaucgagaaaacgaacgagaaauuccaucaaaucgaaaaagaauucucagaaguagaagggagaauucaggaccucgagaaauauguugaagacacuaaaauagaucucuggucuuacaacgcggggcuucuuguugcccuggagaaccaacauacaauugaucuaacugacucagaaaugaacaaacuguuugaaagaacaaggaagcaacugagggaaaaugcugaggacaugggcaaugguugcuucaaaauauaccacaaaugugacaaugccugcauagggucaaucagaaauggaacuuaugaccaugauguauacagagacgaagcauuaaacaaccgguuccagaucaaagguguugagcugaagucaggauacaaagauuggauccuauggauuuccuuugccauaucaugcuuuuugcuuuguguuguuuugcugggguucaucaugugggccugccaaaaaggcaacauuaggugcaacauuugcauuuga

SEQ ID NO: 33158 - RNA, 1701 nt, Artificial Sequence
  derived and/or modified CDS sequence (wt) from hemagglutinin__InfluenzaA__ABG88509
augaagacuaucauugcuuugagcuacauuuuaugucugguuuucgcucaaaaacuucccggaaaugacaacagcacagcaacgcugugccugggacaccaugcagugccaaacggaacgcuagugaaaacaaucacgaaugaucaaauugaagugacuaaugcuacugagcugguucagaguuccucaacagguagaauaugcgacaguccucaccgaauccuugauggaaaaaacugcacacugauagaugcucuauugggagacccucauugugauggcuuccaaaauaaggaaugggaccuuuuuguugaacgcagcaaagcuuacagcaacuguuacccuuaugaugugccggauuaugccucccuuaggucacuaguugccucaucaggcacccuggaguuuaucaaugaagacuucaauuggacuggagucgcucaggaugggaaaagcuaugcuugcaaaaggggaucugucaacaguuucuuuaguagauugaauuggcugcacaaauuagaauacaaauauccagcgcugaacgugacuaugccaaacaauggcaaauuugacaaauuguacauuugggggguucaccacccgagcacggacagugaccaaaccagccuauauguucgagcaucagggagagucacagucucuaccaaaagaagccaacaaacuguaaucccgaauaucggguuuagacccuggguaaggggucuguccaguagaauaagcaucuauuggacaauaguaaaaccgggagacauacuuuugauuaauagcacagggaaucuaauugcuccucgggguuacuucaaaauacgaaaugggaaaagcucaauaaugaggucagaugcacccauuggcaacugcaguucugaaugcaucacuccaaauggaagcauucccaaugacaaaccuuuucaaaauguaaacaggaucacauauggggccugccccagauauguuaagcaaaacacucugaaguuggcaacagggaugcggaauguaccagagaaacaaacuagaggcauauucggcgcaaucgcagguuucauagaaaaugguugggagggaaugguagacgguugguacgguuucaggcaucaaaauucugagggcacaggacaagcagcagaucuuaaaagcacucaagcagcaaucgaccaaaucaacgggaaacugaauagguuaaucgagaaaacgaacgagaaauuccaucaaaucgaaaaagaauucucagaaguagaagggagaauucaggaccucgagaaauauguugaagacacuaaaauagaucucuggucuuacaacgcggggcuucuuguugcccuggagaaccaacauacaauugaucuaacugacucagaaaugaacaaacuguuugaaagaacaaggaagcaacugagggaaaaugcugaggacaugggcaaugguugcuucaaaauauaccacaaaugugacaaugccugcauagggucaaucagaaauggaacuuaugaccaugauguauacagagacgaagcauuaaacaaccgguuccagaucaaaggugucgagcugaagucaggauacaaagauuggauccuauggauuuccuuugccauaucaugcuuuuugcuuuguguuguuuugcugggguucaucaugugggccugccaaaaaggcaacauuaggugcaacauuugcauuuga

SEQ ID NO: 33159 - RNA, 1701 nt, Artificial Sequence
  derived and/or modified CDS sequence (wt) from hemagglutinin__InfluenzaA__ABG88520
augaagacuaucauugcuuugagcuacauuucaugucugguuuucgcucaaaaacuucccggaaaugacaacagcacagcaacgcugugccugggacaccaugcggugccaaacggaacgcuagugaaaacaaucacgaaugaucaaauugaagugacuaaugcuacugagcugguucagaguuccucaacagguagaauaugcgacaguccucaucgaauccuugauggaaaaaacugcacacugauagaugcucuauugggagacccucauugugauggcuuccaaaauaaggaaugggaccuuuuuguugaacgcagcaaagcuuacagcaacuguuacccuuaugaugugccggauuaugccucccuuaggucacuaguugccucaucaggcacccuggaguuuaucaaugaagacuucaauuggacuggagucgcucaggaugggaaaagcuaugcuugcaaaaggggaucuguuaacaguuucuuuaguagauugaauugguugcacaaauuagaauacaaauauccagcgcugaacgugacuaugccaaacaauggcaaauuugacaaauuguacauuugggggguucaccacccgagcacggacagugaccaaaccagccuauauguucgagcaucagggagagucacagucucuaccaaaagaagccaacaaacuguaaucccgaauaucggguuuagacccuggguaaggggucuguccaguagaauaagcaucuauuggacaauaguaaaaccgggagacauacuuuugauuaauagcacagggaaucuaauugcuccucgggguuacuucaaaauacggaaugggaaaagcucaauaaugaggucagaugcacccauuggcaacugcaguucugaaugcaucacuccaaauggaagcauucccaaugacaaaccuuuucaaaauguaaacaggaucacauauggggccugccccagauauguuaagcaaaacacucugaaguuggcaacagggaugcggaauguaccagagaaacaaacuagaggcauauucggcgcaaucgcagguuucauagaaaaugguugggagggaaugguagacgguugguacgguuucaggcaucaaaauucugagggcacaggacaagcagcagaucuuaaaagcacucaagcagcaaucgaccaaaucaacgggaaacugaauagguuaaucgagaaaacgaacgagaaauuccaucaaaucgaaaaagaauucucagaaguagaagggagaauucaggaccucgagaaauauguugaagacacuaaaauagaucucuggucuuacaacgcggggcuucuuguugcccuggagaaccaacauacaauugaucuaacugacucagaaaugaacaaacuguuugaaagaacaaggaagcaacugagggaaaaugcugaggacaugggcaaugguugcuucaaaauauaccacaaaugugacaaugccugcauagggucaaucagaaauggaacuuaugaccaugauguauacagagacgaagcauuaaacaaccgguuccagaucaaagguguugagcugaagucaggauacaaagauuggauccuauggauuuccuuugccauaucaugcuuuuugcuuuguguuguuuugcugggguucaccaugugggccugccaaaaaggcaacauuaggugcaacauuugcauuuga

SEQ ID NO: 33160 - RNA, 1701 nt, Artificial Sequence
  derived and/or modified CDS sequence (wt) from hemagglutinin__InfluenzaA__ABG88531
augaagacuaucauugcuuugagcuacauuuuaugucugguuuucgcucaaaaacuucccggaaaugacaacagcacagcaacgcugugccugggacaccaugcagugccaaacggaacgcuagugaaaacaaucacgaaugaucaaauugaagugacuaaugcuacugagcugguucagaguuccucaacagguagaauaugcgacaguccucaccgaauccuugauggaaaaaacugcacacugauagaugcucuauugggagacccucauugugauggcuuccaaaauaaggaaugggaccuuuuuguugaacgcagcaaagcuuacagcaacuguuacccuuaugaugugccggauuaugccucccuuaggucacuaguugccucaucaggcacccuggaguuuaucaaugaagacuucaauuggacuggagucgcucaggaugggaaaagcuaugcuugcaaaaggggaucuguuaacaguuucuuuaguagauugaauuggcugcacaaauuagaauacaaauauccagcgcugaacgugacuaugccaaacaauggcaaauuugacaaauuguacauuugggggguucaccacccgagcacggacaguguccaaaccagccuauauguucgagcaucagggagagucacagucucuaccaaaagaagccaacaaacuguaaucccgaauaucggguuuagacccuggguaaggggccuguccaguagaauaagcaucuauuggacaauaguaaaaccgggagacauacuuuugauuaauagcacagggaaucuaauugcuccucgggguuacuucaaaauacgaaaugggaaaagcucaauaaugaggucagaugcacccauuggcaacugcaguucugaaugcaucacuccaaauggaagcauucccaaugacaaaccuuuucaaaauguaaacaggaucacauauggggccugccccagauauguuaagcaaaacacucugaaguuggcaacagggaugcggaauguaccagagaaacaaacuagaggcauauucggcgcaaucgcagguuucauagaaaaugguugggagggaaugguagacgguugguacgguuucaggcaucaaaauucugagggcacaggacaagcagcagaucuuaaaagcacucaagcagcaaucgaccaaaucaacgggaaacugaauagguuaaucgagaaaacgaacgagaaauuccaucaaaucgaaaaagaauucucagaaguagaagggagaauucaggaccucgagaaauauguugaagacacuaaaauagaucucuggucuuacaacgcggggcuucuuguugcccuggagaaccaacauacaauugaucuaacugacucagaaaugaacaaacuguuugaaagaacaaggaagcaacugagggaaaaugcugaggacaugggcaaugguugcuucaaaauauaccacaaaugugacaaugccugcauagggucaaucagaaauggaacuuaugaccaugauguauacagagacgaagcauuaaacaaccgguuccagaucaaaggugucgagcugaagucaggauacaaagauuggauccuauggauuuccuuugccauaucaugcuuuuugcuuuguguuguuuugcugggguucaucaugugggccugccaaaaaggcaacauuaggugcaacauuugcauuuga

SEQ ID NO: 33161 - RNA, 1698 nt, Artificial Sequence; identical to SEQ ID NO: 33047
  derived and/or modified CDS sequence (wt) from hemagglutinin__InfluenzaA__ABG88553

SEQ ID NO: 33162 - RNA, 1701 nt, Artificial Sequence
  derived and/or modified CDS sequence (wt) from hemagglutinin__InfluenzaA__ABG88564
augaagacuaucauugcuuugagcuacauuuuaugucugguuuucgcucaaaaacuucccguaaaugacaacagcacggcaacgcugugccugggacaccaugcagugccaaacggaacgcuagugaaaacaaucacgaaugaccacauugaagugacuaaugcuacugaguugguucagaguuccucaacagguagaauaugcgacaguccucaccaaauccuugauggagaaaacugcacacuaauagaugcucuauugggagacccucauugugauggcuuccaaaauaaggaaugggaccuuuuuguugaacgcagcacagccuacagcaacuguuacccuuaugaugugccggauuaugccucccuuaggucacuaguugccuccuccggcacacuggaguuuaacaaugaaagcuucaauuggacuggagucgcucagaauggaacaagcucugcuugcaaaaggagaucuauuaaaaguuucuuuaguagauugaauugguugcaccaauuaaaauacaaauauccagcacugaacgugacuaugccaaacaaugaaaaauuugacaaauuguacauuugggggguucaccacccgaguacggacagugaccaaaucagccuauaugcucaagcaucagggagagucacagucucuaccaaaagaagccaacaaacuguaaucccgaauaucggaucuagacccuggguaaggggugucuccagcagaauaagcaucuauuggacaauaguaaaaccgggagacauacuuuugauuaacagcacagggaaucuaauugcuccucgggguuacuuuaaaauacgaagugggaaaagcucaauaaugaggucaaaugcacccauuggcaaaugcaauucugaaugcaucacuccaaauggaagcauucccaaugacaaaccauuucaaaauguaaacaggaucacauauggggccugucccagauauguuaagcaaaacacucugaaauuggcaacaggaaugcggaauguaccagagaaacaaacuagaggcauauucggcgcaaucgcggguuucauagaaaaugguugggagggaaugguagacgguugguaugguuucaggcaucaaaauucugagggcacaggacaagcagcagaucuuaaaagcacucaagcagcaaucaaccaaaucaacgggaaacugaauagguuaaucgagaaaacaaacgagaaauuccaucaaauugaaaaagaauucucagaaguagaagggagaauucaggaccucgagaaauauguugaggacacuaaaauagaucucuggucguacaacgcggagcuucuuguugcccuggagaaccaacauacaauugaucuaacagacucagaaaugaacaaacuguuugaaagaacaaggaagcaacugagggaaaaugcugaggagaugggcaaugguuguuucaaaauauaccacaaaugugacaaugccugcauagggucaaucagaaauggaacuuaugaccaugauguauacagagacgaagcauuaaacaaccgguuccagaucaaagguguugagcugaagucaggauacaaagauuggauccuauggauuuccuuugccauaucauguuuuuugcuuuguguuguuuugcugggguucaucaugugggccugccaaaaaggcaacauuaggugcaacauuugcauuuga

SEQ ID NO: 33163 - RNA, 1701 nt, Artificial Sequence; identical to SEQ ID NO: 32752
  derived and/or modified CDS sequence (wt) from hemagglutinin__InfluenzaA__ABG88575

SEQ ID NO: 33164 - RNA, 1701 nt, Artificial Sequence; identical to SEQ ID NO: 32662
  derived and/or modified CDS sequence (wt) from hemagglutinin__InfluenzaA__ABG88586

SEQ ID NO: 33165 - RNA, 1701 nt, Artificial Sequence
  derived and/or modified CDS sequence (wt) from hemagglutinin__InfluenzaA__ABG88597
augaagacuaucauugcuuugagcuacauuuuaugucugguuuucgcucaaaaacuucccgcaaaugacaacagcacggcaacgcugugccugggacaccaugcagugccaaacggaacgcuagugaaaacaaucacgaaugacaacauugaagugacuaaugcuacugagcugguucagaguuccucaacaggcagaauaugcgacaguccucaccaaauccuugauggagaaaacugcacacuaauagaugcucuauugggagacccucauugugauggcuuccaaaauaaggaaugggaccuuuuuguugaacgcagcacagccuacagcaacuguuacccuuaugaugugccggauuaugccucccuuaggucacuaguugccucauccggcacacuggaguuuaacaacgaaagcuucaauuggacuggagucgaucagaauggaacaagcucugcuugcaaaaggagaucuaauaaaaguuucuuuaguagauugaauugguugcaccaauuaaaauacaaauauccagcacugaacgugacuaugccaaacaaugaaaaauuugacaaauuguacauuugggggguucaccacccgaguacggacagugaccaaaucagccuauaugcucaagcaucagggagagucacagucucuaccaaaagaagccaacaaacuguaaucccgaauaucggaucuagacccuggguaaggggugucuccagcagaauaagcaucuauuggacaauaguaaaaccgggagacauacuuuugauuaacagcacagggaaucuaauugcuccucgggguuacuucaaaauacgaagugggaaaagcucaauaaugaggucaaaugcacccauuggaaaaugcaauucugaaugcaucacuccaaauggaagcauucccaaugacaaaccauuucaaaauguaaacaggaucacauauggggccugucccagguauguuaaacaaaacacucugaaauuggcaacagggaugcggaauguaccagagaaacaaacuagaggcauauucggcgcaaucgcagguuucauagaaaaugguugggagggaaugguggacgguugguacgguuucaggcaucaaaauucugagggcacaggacaagcagcagaucuuaaaagcacucaagcagcaaucaaccaaaucaacgggaaacugaauagguuaaucgagaaaacaaacgagaaauuccaucaaauugaaaaagaauucucagaaguagaagggagaauucaggaccucgagaaauauguugaggacacuaaaauagaucucuggucguacaacgcggagcuucuuguugcccuggagaaccaacauacaauugaucuaacugacucagaaaugaacaaacuguucgaaagaacaaggaagcaacugagggaaaaugcugaggauaugggcaaugguuguuucaaaauauaccacaaaugugacaaugccugcauagggucaaucagaaauggaacuuaugaccaugauguauacagagacgaagcauuaaacaaccgguuccagaucaaagguguugagcugaagucaggauacaaagauuggauccuauggauuuccuuugccauaucauguuuuuugcuuuguguuguuuugcugggguucaucaugugggccugccaaaaaggcaacauuaggugcaacauuugcauuuaa

SEQ ID NO: 33166 - RNA, 1701 nt, Artificial Sequence
  derived and/or modified CDS sequence (wt) from hemagglutinin__InfluenzaA__ABG88608
augaagacuaucauugcuuugagcuacauuuuaugucugguuuucgcucaaaaacuucccggaaaugacaacagcacggcaacgcugugccuggggcaccaugcagugccaaacggaacgcuagugaaaacaaucacgaaugaccaaauugaagugacuaaugcuacugagcugguucagaguuccucaacagguagaauaugcgacaguccucaccaaauccuugauggagaaaacugcacacuaauagaugcucuauugggagacccucauugugauggcuuccaaaauaaggaaugggaccuuuuuguugaacgcagcagagccuacagcaacuguuacccuuaugaugugccggauuaugucucccuuaggucacuaguugccucaucaggcacgcuggaguuuaacaaugaaagcuucaauuggacuggagucgcucagaauggaacaagcucugcuugcaaaaggagaucugauaaaaguuucuuuaguagauugaauugguugcaccaauuaaaauacaaauauccagcacugaacgugacuaugccaaacaaugaaaaauuugacaaauuguacauuugggggguucaccacccggguacagacagugaccaaaucagccuauaugcucaagcaucagggagagucacagucucuaccaaaagaagccaacaaaccguaaucccgaauaucggaucuagacccuggguaaggggugucuccagcagaauaagcaucuauuggacaauaguaaaaccgggagacauacuuuugauuaacagcacagggaaucuaauugcuccucgggguuacuucaaaauacgaagugggaaaagcucaauaaugaggucagaugcacccauuggcaaaugcaauucugaaugcaucacuccaaauggaagcauucccaaugacaaaccauuucaaaauguaaacaggaucacauaugggcccugucccagauauguuaagcaaaacacucugaaauuggcaacagggaugcggaaugugccagagaaacaaacuagaggcauauucggugcaaucgcgggcuucauagaaaaugguugggagggaaugauggacgguugguacgguuucaggcaucaaaauucugagggcacagggcaagcagcagaucuuaaaagcacucaagcagcaaucaaccaaaucaacgggaaacugaauagguuaaucgagaaaacgaacgagaaauuccaucaaauugaaaaagaauucucagaaguagaagggagaauucaggaccucgagaaauauguugaggacacuaaaauagaucucuggucguacaaugcggagcuucuuguugcccuggagaaccaacauacaauugaucuaacugacucagaaaugaacaaacuguuugaaagaacaaagaagcaacugagggaaaaugcugaggauaugggcaaugguuguuucaaaauauaccacaaaugugacaaugccugcauagggucaaucagaaauggaacuuaugaccaugauguauacagagacgaagcauugaacacccgguuccagaucaaagguguugagcugaagucaggauacaaagauuggauccuauggauuuccuuugccauaucauguuuuuugcuuuguauuguuuugcugggguucaucaugugggccugccaaaaaggcaacauuaggugcaacauuugcauuuga

SEQ ID NO: 33167 - RNA, 1701 nt, Artificial Sequence; identical to SEQ ID NO: 32574
  derived and/or modified CDS sequence (wt) from hemagglutinin__InfluenzaA__ABG88619

SEQ ID NO: 33168 - RNA, 1701 nt, Artificial Sequence
  derived and/or modified CDS sequence (wt) from hemagglutinin__InfluenzaA__ABG88630
augaagacuaucauugcuuugagcuacauuuuaugccugguuuucgcucaaaaacuucccggaaaugacaacagcacggcaacgcugugccuggggcaccaugcagugccaaacggaacgcuagugaaaacaaucacgaaugaccaaauugaaguaacuaaugcuacugagcugguucagaguuccucaacagguagaauaugcgacaguccucaccaaguccuugauggagaaaacugcacacuaauagaugcucuauugggagacccucauugugauggcuuccaaaauaaggaaugggaccuuuuuguugaacgcagcaaagccuacagcaacuguuacccuuaugaugugccggauuaugucucccuuaggucacuaguugccucaucaggcacgcuggaguuuaacaaugaaagcuucaauuggacuggagucgcucagaauggaacaagcucugcuugcaaaaggagaucugauaaaaguuucuuuaguagauugaauugguugcaccaauuaaaauacaaauauccagcacugaacgugacuaugccaaacaaugaaaaauuugacaaauuguacauuugggggguccaccacccggguacagacagugaccaaaucagccuauaugcucaagcaucagggagagucacagucucuaccaaaagaagccaacaaacuguaaucccgaauaucggaucuagacccuggguaaggggugucuccagcagaauaagcaucuauuggacaauaguaaaaccgggagacauacuuuugauuaacagcacagggaaucuaauugcuccucgggguuacuuuaaaauacgaagugggaaaagcucaauaaugaggucagaugcacccauuggcaaaugcaauucugaaugcaucacuccaaauggaagcauucccaaugacaaaccauuucaaaauguaaacaggaucacauauggggccugucccagauauguuaagcaaaaaacucugaaauuggcaacagggaugcggaaugugccagagaaacaaacuagaggcauauucggugcaaucgcgggcuucauagaaaaugguugggagggaaugauggacgguugguacgguuucaggcaucaaaauucugagggcacagggcaagcagcagaucuuaaaagcacucaagcagcaaucaaccaaaucaacgggaaacugaauagguugauugagaaaacgaacgagaaauuccaucaaauugaaaaagaauucucagaaguagaagggagaauucaggaccucgagaaauaugucgaggacacuaaaauagaucucuggucguacaaugcggagcuucuuguugcccuggagaaccaacauacaauugaucuaacugacucagaaaugaacaaacuguuugaaagaacaaagaagcaacugagggaaaaugcugaggauaugggcaaugguuguuucaaaauauaccacaaaugugacaaugccugcauagggucaaucagaaauggaacuuaugaccaugauguauacagagacgaagcauugaacaaccgguuccagaucaaagguguugagcugaagucaggauacaaagauuggauccuauggauuuccuuugccauaucauguuuuuugcuuuguauuguuuuacugggguucaucaugugggccugccaaaaaggcaacauuaggugcaacauuugcauuuga

SEQ ID NO: 33169 - RNA, 1701 nt, Artificial Sequence
  derived and/or modified CDS sequence (wt) from hemagglutinin__InfluenzaA__ABG88641
augaagacuaucauugcuuugagcuacauuuuaugccugguuuucgcucaaaaacuucccggaaaugacaacagcacggcaacgcugugccuggggcaccaugcagugccaaacggaacgcuagugaaaacaaucacgaaugaccaaauugaagugacuaaugcuacugagcugguucagaguuccucaacaaguagaauaugcgacaguccucaccaaauccuugauggagaaaacugcacacuaauagaugcucuauugggagacccucauugugauggcuuccaaaauaaggaaugggaccuuuuuguugaacgcagcaaagccuacagcaacuguuacccuuaugaugugccggauuaugucucccuuaggucacuaguugccucaucaggcacgcuggaguuuaacaaugaaagcuucaauuggacuggagucgcucagaauggaacaagcucugcuugcaaaaggagaucugauaaaaguuucuuuaguagauugaauugguugcaccaauuaaaauacaaauauccagcacugaacgugacuaugccaaacaaugaaaaauuugacaaauuguacauuugggggguucaccacccggguacagacagugaccaaaucagccuauaugcucaagcaucagggagagucacagucucuaccaaaagaagccaacaaacuguaaucccgaauaucggaucuggacccuggguaaggggugucuccagcagaauaagcaucuauuggacaauaguaaaaccgggagacauacuuuugauuaacagcacagggaaucuaauugcuccucgggguuacuucaaaauacgaagugggaaaagcucaauaaugaggucagaugcacccauuggcaaaugcaauucugaaugcaucacuccaaauggaagcauucccaauggcaaaccauuucaaaauguaaacaggaucacauauggggcaugucccagauauguuaagcaaaacacucugaaauuggcaacagggaugcggaaugugccagagaaacaaacuagaggcauauucggugcaaucgcgggcuucauagaaaaugguugggagggaaugauggacgguugguacgguuucaggcaucagaauucugagggcacagggcaagcagcagaucuuaaaagcacucaagcagcaaucaaccaaaucaacgggaaacugaauagguuaaucgagaaaacgaacgagaaauuccaucaaauugaaaaagaauucucagaaguagaagggagaauucaggaccucgagaaauaugucgaggacacuaaaauagaucucuggucguacaaugcggagcuucuuguugcccuggagaaccaacauacaauugaucuaacugacucagaaaugaacaaacuguuugaaagaacaaagaagcaacugagggaaaaugcugaggauaugggcaaugguuguuucaaaauauaccacaaaugugacaaugccugcauagggucaaucagaaauggaacuuaugaccaugauguauacagagacgaagcauugaacaaccgguuccagaucaaagguguugagcugaagucaggauacaaagauuggauccuauggauuuccuuugccacaucauguuuuuuacuuuguauuguuuuacugggguucaucaugugggccugccaaaaaggcaacauuaggugcaacauuugcauuuga

SEQ ID NO: 33170 - RNA, 1701 nt, Artificial Sequence; identical to SEQ ID NO: 32532
  derived and/or modified CDS sequence (wt) from hemagglutinin__InfluenzaA__ABG88652

SEQ ID NO: 33171 - RNA, 1701 nt, Artificial Sequence
  derived and/or modified CDS sequence (wt) from hemagglutinin__InfluenzaA__ABG88663
augaagacuaucauugcuuugagcuacauucuaugucugguuuucgcucaaaaacuucccggaaaugacaacagcacggcaacgcugugccuugggcaccaugcaguaccaaacggaacgauagugaaaacaaucacaaaugaccaaauugaaguuacuaaugcuacugagcugguucagaguuccucaacagguggaauaugcgacaguccucaucagauccuugauggagaaaacugcacauuaauagaugcucuauugggagacccucagugugauggcuuccaaaauaagaaaugggaccuuuuuguugaacgcagcaaagccuacagcaacuguuacccuuaugaugugccggaucaugccucccuuaggucacuaguugccucauccggcacacuggaguuuaacaaugaaagcuucgauuggacuggagucacucagaauggaacaagcucugcuugcaaaaggagaucuaauaaaaguuucuuuaguagauugaauugguugacccacuuaaaauacaaauacccagcauugaacgugacuaugccaaacaaugaaaaauuugacaaauuguacauuugggggguucaccacccggguacggacagugaccaaaucagccuauaugcucaagcaucaggaagaaucacagucucuaccaaaagaagccaacaaacuguaaucccgaauaucggaucuagacccaggguaagggaugucuccagccgaauaagcaucuauuggacaauaguaaaaccgggagacauacuuuugauuaacagcacagggaaucuaauugcuccucgggguuacuucaaaauacgaagugggaaaagcucaauaaugagaucagaugcacccauuggcaaaugcaauucugaaugcaucacuccaaauggaagcauucccaaugacaaaccauuucaaaauguaaacaggaucacauauggggccugucccagauauguuaagcaaaacacucugaaauuggcaacagggaugcgaaauguaccagagaaacaaacuagaggcauauuuggcgcaaucgcggguuucauagaaaaugguugggagggaaugguggacgguugguacgguuucaggcaucaaaauucugagggcacaggacaagcagcagaucucaaaagcacucaagcagcaaucaaccaaaucaaugggaaacugaauagguuaaucgggaaaacaaacgagaaauuccaucagauugaaaaagaauucucagaaguagaagggagaauucaggaccucgagaaauauguugaggacacuaaaauagaucucuggucauacaacgcggagcuucuuguugcccuggagaaccaacauacaauugaucuaacugacucagaaaugaacaaacuguuugaaagaacaaagaagcaacugagggaaaaugcugaggauaugggcaaugguuguuucaaaauauaccacaaaugugacaaugccugcauagggucaaucagaaauggaacuuaugaccaugauguguacagagaugaagcauuaaacaaccgguuccagaucaaagguguugagcugaagucaggauauaaagauuggauccuauggauuuccuuugccauaucauguuuuuugcuuuguguugcuuuguugggguucaucaugugggccugccaaaaaggcaacauuaggugcaacauuugcauuuga

SEQ ID NO: 33172 - RNA, 1701 nt, Artificial Sequence; identical to SEQ ID NO: 33025
  derived and/or modified CDS sequence (wt) from hemagglutinin__InfluenzaA__ABG88674

SEQ ID NO: 33173 - RNA, 1701 nt, Artificial Sequence; identical to SEQ ID NO: 32532
  derived and/or modified CDS sequence (wt) from hemagglutinin__InfluenzaA__ABG88685

SEQ ID NO: 33174 - RNA, 1701 nt, Artificial Sequence
  derived and/or modified CDS sequence (wt) from hemagglutinin__InfluenzaA__ABG88696
augaagacuaucauugcuuugagcuacauucuaugucugguuuucgcucaaaaacuucccggaaaugacaacagcacggcaacgcugugccuugggcaccaugcaguaccaaacggaacgauagugaaaacaaucacaaaugaccaaauugaaguuacuaaugcuacugagcugguucagaguuccucaacagguggaauaugcgacaguccucaucagauccuugauggagaaaacugcacacuaauagaugcucuauugggagacccucagugugauggcuuccaaaauaagaaaugggaccuuuuuguugaacgcagcaaagccuacagcaacuguuacccuuaugaugugccggaucaugccucccuuaggucacuaguugccucauccggcacacuggaguuuaacaaugaaagcuucgauuggacuggagucacucagaauggaacaagcucugcuugcaaaaggagaucuaauaaaaguuucuuuaguagauugaauugguugacccacuuaaaauacaaguacccagcauugaacgugacuaugccaaacaaugaaaaauuugacaaauuguacauuugggggguucaccacccggguacggacagugaccaaaucagccuauaugcucaagcaucaggaagaaucacagucucuaccaaaagaagccaacaaacuguaaucccgaauaucggaucuagacccaggguaagggaugucuccagccgaauaagcaucuauuggacaauaguaaaaccgggagacauacuuuugauuaacagcacagggaaucuaauugcuccucgggguuacuucaaaauacgaagugggaaaagcucaauaaugagaucagaugcacccauuggcaaaugcaauucugaaugcaucacuccaaauggaagcauucccaaugacaaaccauuucaaaauguaaacaggaucacauauggggccugccccagauauguuaagcaaaacacucugaaguuggcaacagggaugcgaaauguaccagagaaacaaacuagaggcauauuuggcgcaaucgcggguuucauagaaaaugguugggagggaaugguggacgguugguacgguuucaggcaucaaaauucugagggcacaggacaagcagcagaucucaaaagcacucaagcagcaaucaaccaaaucaaugggaaacugaauagguuaaucgggaaaacaaacgagaaauuccaucagauugaaaaagaauucucagaaguagaagggagaauucaggaccucgagaaauauguugaggacacuaaaauagaucucuggucauacaacgcggagcuucuuguugcccuggagaaccaacauacaauugaucuaacugacucagaaaugaacaaacuguuugaaagaacaaagaagcaacugagggaaaaugcugaggauaugggcaaugguuguuucaaaauauaccacaaaugugacaaugccugcauagggucaaucagaaauggaacuuaugaccaugauguguacagagaugaagcauuaaacaaccgguuccagaucaaagguguugagcugaagucaggauauaaagauuggauccuauggauuuccuuugccauaucauguuuuuugcuuuguguugcuuuguugggguucaucaugugggccugccaaaaaggcaacauuaggugcaacauuugcauuuga

SEQ ID NO: 33175 - RNA, 1701 nt, Artificial Sequence; identical to SEQ ID NO: 32334
  derived and/or modified CDS sequence (wt) from hemagglutinin__InfluenzaA__ABG88707

SEQ ID NO: 33176 - RNA, 1701 nt, Artificial Sequence; identical to SEQ ID NO: 33130
  derived and/or modified CDS sequence (wt) from hemagglutinin__InfluenzaA__ABG88718

SEQ ID NO: 33177 - RNA, 1701 nt, Artificial Sequence
  derived and/or modified CDS sequence (wt) from hemagglutinin__InfluenzaA__ABG88729
augaagacuaucauugcuuugagcuacauuuuaugucugguuuucgcucaaaaacuucccggaaaugacaacagcacagcaacgcugugccugggacaucaugcagugccaaacggaacacuagugaaaacaaucacgaaugaucaaauugaagugacuaaugcuacugagcugguucagaguuccucaacagguagaauaugcgacaguccucaccgaauccuugaugggaaaaacugcacacugauagaugcucuauugggagacccucauugugauggcuuccaaaauaaggaaugggaccuuuuuguugaacgcagcaaagcuuacagcaacuguuacccuuaugaugugccggauuaugccucccuuaggucacuaguugccucaucaggcacccuggaguuuaucaaugaagacuucaauuggacuggagucgcucaggaugggggaagcuaugcuugcaaaaggggaucuguuaacaguuucuuuaguagauugaauugguugcacaaauuagaauacaaauauccagcgcugaacgugacuaugccaaacaguggcaaauuugacaaauuguacauuugggggguucaccacccgagcacggacagugaccaaaccagccuauauguucgagcaucagggagagucacagucucuaccaaaagaagccaacaaacuguaaccccgaauaucgggucuagacccuggguaaggggucuguccaguagaauaagcaucuauuggacaauaguaaaaccgggagacauacuuuugauuaauagcacagggaaucuaauugcuccucgggguuacuucaaaauacgaaaugggaaaagcucaauaaugaggucagaugcacccauuggcaacugcaguucugaaugcaucacuccaaauggaagcauucccaaugacaaaccuuuucaaaauguaaacaggaucacauauggggccugccccagauauguuaagcaaaacacucugaaauuggcaacagggaugcggaauguaccagagaaacaaacuagaggcauauucggcgcaaucgcagguuucauagaaaaugguugggagggaaugguagacgguugguacgguuucaggcaucaaaauucugagggcacaggacaagcagcagaucuuaaaagcacucaagcagcaaucgaccaaaucaacgggaaacugaauagguuaaucgagaaaacgaacgagaaauuucaucaaaucgaaaaagaauucucagaaguagaagggagaauucaggaccucgagaaauauguugaagacacuaaaauagaucucuggucuuacaacgcggagcuucuuguugcccuggagaaccaacauacaauugaucuaacugacucagaaaugaacaaacuguuugaaaaaacaaggaagcaacugagggaaaaugcugaggacaugggcaaugguugcuucaaaauauaccacaaaugugacaaugccugcauagggucaaucagaaauggaacuuaugaucaugauguauacagagacgaagcauuaaacaaccgguuccagaucaaagguguugagcugaagucaggauacaaagauuggauccuauggauuuccuuugccauaucaugcuuuuugcuuuguguuguuuugcugggguucaucaugugggccugccaaaaaggcaacauuaggugcaacauuugcauuuga

SEQ ID NO: 33178 - RNA, 1701 nt, Artificial Sequence
  derived and/or modified CDS sequence (wt) from hemagglutinin__InfluenzaA__ABG88740
augaagacuaucauugcuuugagcuacauuuuaugucugguuuucgcucaaaaacuucccggaaaugacaacagcacagcaacgcugugccugggacaccaugcagugccaaacggaacgcuagugaaaacaaucacgaaugaucaaauugaagugacuaaugcuacugagcugguucagaguuccucaacagguagaauaugcgacaguccucaccgaauccuugauggaaaaaacugcacacugauagaugcucuauugggagacccucauugugauggcuuccaaaauaaggaaugggaccuuuuuguugaacgcagcaaagcuuacagcaacuguuacccuuaugaugugccggauuaugccucccuuaggucacuaguugccucaucaggcacccuggaguuuaucaaugaagacuucaauuggacuggagucgcucaggaugggaaaagcuaugcuugcaaaaggggaucuguuaacaguuucuuuaguagauugaauugguugcacaaauuagaauacaaauauccagcgcugaacgugacuaugccaaacaauggcaaauuugacaaauuguacauuugggggguucaccacccgagcacggacagugaccaaaccagccuauauguucgagcaucagggagagucacagucucuaccaaaagaagccaacaaacuguaaucccgaauaucgggucuagacccuggguaaggggucuguccaguagaauaagcaucuauuggacaauaguaaaaccgggagacauacuuuugauuaauagcacagggaaucuaauugcuccucgggguuacuucaaaauacgaaaugggaaaagcucaauaaugaggucagaugcacccauuggcaacugcaguuccgaaugcaucacuccaaauggaagcauucccaaugacaaaccuuuucaaaauguaaacaggaucacauauggggccugccccagauauauuaagcaaaacacucugaaauuggcaacagggaugcggaauguaccagagaaacaaacuagaggcauauucggcgcaaucgcagguuucauagaaaaugguugggagggaaugguagacgguugguacgguuucaggcaucaaaauucugagggcacaggacaagcagcagaucuuaaaagcacucaagcagcaaucgaccaaaucaacgggaaacugaauagguuaaucgagaaaacgaacgagaaauuccaucaaaucgaaaaagaauucucagaaguagaagggagaauucaggaccucgagaaauauguugaagacacuaaaauagaucucuggucuuacaacgcggagcuucuuguugcccuggagaaccaacauacaauugaucuaacugacucagaaaugaacaaacuguuugaaagaacaaggaagcaacugagggaaaaugcugaggacaugggcaaugguugcuucaaaauauaccacaaaugugacaaugccugcauagggucaaucagaaauggaacuuaugaccaugauguauacagagacgaagcauuaaacaaccgguuccagaucaaagguguugagcugaagucaggauacaaagauuggauccuauggauuuccuuugccauaucaugcuuuuugcuuuguguuguuuugcugggguucaucaugugggccugccaaaaaggcaacauuaggugcaacauuugcauuuga

SEQ ID NO: 33179 - RNA, 1701 nt, Artificial Sequence; identical to SEQ ID NO: 33067
  derived and/or modified CDS sequence (wt) from hemagglutinin__InfluenzaA__ABG88751

SEQ ID NO: 33180 - RNA, 1701 nt, Artificial Sequence
  derived and/or modified CDS sequence (wt) from hemagglutinin__InfluenzaA__ABG88762
augaagacuaucauugcuuugagcuacauuuuaugucugguuuucacucaaaaacuucccggaaaugacaacagcacagcaacgcugugccugggacaucaugcagugccaaacggaacgcuagugaaaacaaucacgaaugaucaaauugaagugacuaaugcuacugagcugguucagaguuccucaacagguagaauaugcgacaguccucaccgaauccuugauggaaaaaacugcacacugauagaugcucuauugggagacccucauugugauggcuuccaaaauaaggaaugggaccuuuuuguugaacgcagcaaagcuuacagcaacuguuacccuuaugaugugccggauuaugccucccuuaggucacuaguugccucaucaggcacccuggaguuuaucaaugaagacuucaauuggacuggagucgcucaggaugggggaagcuaugcuugcaaaaggggaucuguuaacaguuucuuuaguagauugaauugguugcacaaauuagaauacaaauauccagcgcugaacgugacuaugccaaacaauggcaaauuugacaaauuguacauuugggggguucaccacccgagcacggacagugaccaaaccagccuauauguucgagcaucagggagagucacagucucuaccaaaagaagccaacaaacuguaaucccgaauaucgggucuagacccuggguaaggggucuguccaguagaauaagcaucuauuggacaauaguaaaaccgggagacauacuuuugauuaauagcacagggaaucuaauugcuccucgggguuacuucaaaauacgaaaugggaaaagcucaauaaugagaucagaugcauccauuggcaacugcaguucugaaugcaucacuccaaauggaagcauucccaaugacaaaccuuuucaaaauguaaacaggaucacauauggggccugccccagauauguuaagcaaaacacucugaaauuggcaacagggaugcggaauguaccagagaaacaaacuagaggcauauucggcgcaaucgcagguuucauagaaaaugguugggagggaaugguagacgguugguacgguuucaggcaucagaauucugagggcacaggacaagcagcagaucuuaaaagcacucaagcagcaaucgaccaaaucaacgggaaacugaauagguuaaucgagaaaacgaacgagaaauuccaucaaaucgaaaaagaagucucagaaguagaagggagaauucaggaccucgagaaauauguugaagacacuaaaauagaucucuggucuuacaacgcggagcuucuuguugcccuggagaaccaacauacaauugaucuaacugacucagaaaugaacaaacuguuugaaagaacaaggaagcaacugagggaaaaugcugaggacaugggcaaugguugcuucaaaauauaccacaaaugugacaaugccugcauagggucaaucagaaauggaacuuaugaccaugauguauacagagacgaagcauuaaacaaccgguuccagaucaaaaguguugagcugaagucaggauacaaagauuggauccuauggauuuccuuugccauaucaugcuuuuugcuuuguguuguuuugcugggguucaucaugugggccugccaaaaaggcaacauuaggugcaacauuugcauuuga

SEQ ID NO: 33181 - RNA, 1701 nt, Artificial Sequence
  derived and/or modified CDS sequence (wt) from hemagglutinin__InfluenzaA__ABG88773
augaagacuaucauugcuuugagcuacauuuuaugucugguuuucgcucaaaaacuucccggaaaugacaacagcacagcaacgcugugccugggacaccaugcagugccaaacggaacgcuagugaaaacaaucacgaaugaucaaauugaagugacuaaugcuacugagcugguucagaguuccucagcagguagaauaugcgacaguccucaccgaauccuugauggaaaaaacugcacacugauagaugcucuauugggagacccucauugugauggcuuccaaaauaaggaaugggaccuuuuuguugaacgcagcaaagcuuacagcaacuguuacccuuaugaugugccggauuaugccucccuuaggucacuaguugccucaucaggcacccuggaguuuaucaaugaagacuucaauuggacuggagucgcucaggaugggaaaagcuaugcuugcaaaaggggaucuguuaacaguuucuuuaguagauugaauugguugcacaaauuagaauacaaauauccagcgcugaacgugacuaugccaaacaauggcaaauuugacaaauuguacauuugggggguucaccacccgagcacggacagugaccaaaccagccuauauguucgagcaucagggagagucacagucucuaccaaaagaagccaacaaacuguaaucccgaauaucgggucuagacccuggguaaggggucuguccaguagaauaagcaucuauuggacaauaguaaaaccgggagacauacuuuugauuaauagcacagggaaucuaauugcuccucgggguuacuucaaaauacgaaaugggaaaagcucaauaaugaggucagaugcacccauuggcaacugcaguucugaaugcaucacuccaaauggaagcauucccaaugacaaaccuuuucaaaauguaaacaggaucacauauggggccugccccagauauguuaagcaaaacacucugaaauuggcaacagggaugcggaauguaccagagaaacaaacuagaggcauauucggcgcaaucgcagguuucauagaaaaugguugggagggaaugguagacgguugguacgguuucaggcaucaaaauucugagggcacaggacaagcagcagaucuuaaaagcacucaagcagcaaccgaccaaaucaacgggaaacugaauagguuaaucgagaaaacgaacgagaaauuccaucaaaucgaaaaagaauucucagaaguagaagggagaauucaggaccucgagaaauauguugaagacacuaaaauagaucucuggucuuacaacgcggagcuucuuguugcccuggagaaccaacauacaauugaucuaacugacucagaaaugaacaaacuguuugaaagaacaaggaagcaacugagggaaaaugcugaggacaugggcaaugguugcuucaaaauauaccacaaaugugacaaugccugcauagggucaaucagaaauggaacuuaugaccaugauguauacagagacgaagcauuaaacaaccgguuccagaucaaagguguugagcugaagucaggauacaaagauuggauccuauggauuuccuuugccauaucaugcuuuuugcuuuguguuguuuugcugggguucaucaugugggccugccaaaaaggcaacauuaggugcaacauuugcauuuga

SEQ ID NO: 33182 - RNA, 1701 nt, Artificial Sequence
  derived and/or modified CDS sequence (wt) from hemagglutinin__InfluenzaA__ABG88784
augaagacuaucauugcuuugagcuacauuuuaugucugguuuucgcucaaaaacuucccggaaaugacaacagcacagcaacgcugugccugggacaccaugcagugccaaacggaacgcuagugaaaacaaucacgaaugaucaaauugaagugacuaaugcuacugagcugguucagaguuccucaacagguagaauaugcgacaguccucaccgcauccuugauggaaaaaacugcacacugauagaugcucuauugggagacccucauugugauggcuuccaaaauaaggaaugggaccuuuuuguugaacgcagcaaagcuuacagcaacuguuacccuuaugaugugccggauuaugccucccuuaggucacuaguugccucaucaggcacccuagaguuuaucaaugaagacuucaauuggacuggaguagcucaggaugggaaaagcuaugcuugcaaaaggggaucuguuaacaguuucuuuaguagauugaauugguugcacaaauuagaauacaaauauccagcgcugaacgugacuaugccaaacaauggcaaauuugacaaauuguacauuugggggguucaccacccgagcacggacagugaccaaaccagccuauauguucgagcaucagggagagucacagucucuaccaaaagaagccaacaaacuguaaucccgaauaucgggucuagacccuggguaaggggucuguccaguagaauaagcaucuauuggacaauaguaaaaccgggagacauacuuuugauuaauagcacagggaaucuaauugcuccucgggguuacuucaaaauacgaaaugggaaaagcucaauaaugaggucagaugcacccauuggcaacugcaguucugaaugcaucacuccaaauggaagcauucccaaugacaaaccuuuucaaaauguaaacaggaucacauauggggccugccccagauauguuaagcaaaacacucugaaauuggcaacagggaugcggaauguaccagagaaacaaacuagaggcauauucggcgcaaucgcagguuucauagaaaaugguugggagggaaugguagacgguugguacgguuucaggcaucaaaauucugagggcacaggacaagcagcagaucuuaaaagcacucaagcagcaaucgaccaaaucaacgggaaacugaauagguuaaucaagaaaacgaacgagaaauuccaucaaaucgaaaaagaauucucagaaguagaagggagaauucaggaccucgagaaauauguugaagacacuaaaauagaucucuggucuuacaacgcggagcuucuuguugcccuggagaaccaacauacaauugaucuaacugacucagaaaugaacaaacuguuugaaagaacaaggaaacaacugagggaaaaugcugaggacaugggcaaugguugcuucaaaauauaccacaaaugugacaaugccugcauagggucaaucagaaauggaacuuaugaccaugauguauacagagacgaagcauuaaacaaccgguuccagaucaaagguguugagcugaagucaggauacaaagauuggauccuauggauuuccuuugccauaucaugcuuuuugcuuuguguuguuuugcugggguucaucaugugggccugccaaaaaggcaacauuaggugcaacauuugcauuuga

SEQ ID NO: 33183 - RNA, 1701 nt, Artificial Sequence
  derived and/or modified CDS sequence (wt) from hemagglutinin__InfluenzaA__ABG88806
augaagacuaucauugcuuugagcuacauuuuaugccugguuuucgcucaaaaacuucccggaaaugacaacagcacggcaacgcugugccuggggcaucaugcggugccaaacggaacgcuagugaaaacaaucacgaaugaccaaauugaaguaacuaaugcuacugagcugguucagaguuccucaacagguagaauaugcgacaguccucaucaaauccuugauggagaaaacugcacacuaauagaugcucuauugggagacccucauugugauggcuuccaaaauaaggaaugggaccuuuuuguugaacgcagcaaagccuacagcaacuguuacccuuaugaugugccggauuaugucucccuuaggucacuaguugccucaucaggcacgcuggaguuuaacaaugaaagcuucaauuggacuggagucgcucagaauggaacaagcucugcuugcaaaaggagaucugauaaaaguuucuuuaguagauugaauugguugcaccaauuaaaauacaaauauccagcacugaacgugacugugccaaacaaugaaaaauuugacaaauuguacauuugggggguucaccacccggguacagacagugaccaaaucagccuauaugcucaagcaucagggagagucacagucucuaccaaaagaagccaacaaacuguaaucccgaauaucggaucuagacccuggguaaggggugucuccagcagaauaagcaucuauuggacaauaguaaaaccgggagacauacuuuugauuaacagcacagggaaucuaauugcuccacgggguuacuucaaaauacgaagugggaaaagcucaauaaugaggucagaugcacccauuggcaaaugcaauucugaaugcaucacuccaaauggaagcauucccaaugacaaaccauuucaaaauguaaacaggaucacauauggggccugucccagauauguuaagcaaaacacucugaaauuggcaacagggaugcggaaugugccagagaaacaaacuagaggcauauucggugcaaucgcgggcuucauagaaaaugguugggagggaaugauggacgguugguacgguuucaggcaucaaaauucugagggcacagggcaagcagcagaucuuaaaagcacucaagcagcaaucaaccaaauuaacgggaaacugaauagguuaaucgagaaaacgaacgagaaauuccaucaaauugaaaaagaauucucagaaguagaagggagaauucaggaccucgagaaauauguugaggacacuaaaauagaucucuggucguacaaugcggagcuucuuguugcccuggagaaccaacauacaauugaucuaacugacucagaaaugaacaaacuguuugaaagaacaaagaagcaacugagggaaaaugcugaggauaugggcaaugguuguuucaaaauauaccacaaaugugacaaugccugcauagggucaaucagaaauggaacuuaugaccaugauguauacagagacgaagcauugaacaaccgguuccagaucaaagguguugagcugaagucaggauacaaagauuggauccuauggauuuccuuugccauaucauguuuuuugcuuuguauuguuuugcugggguucaucaugugggccugccaaaaaggcaacauuaggugcaacauuugcauuuga

SEQ ID NO: 33184 - RNA, 1704 nt, Artificial Sequence
  derived and/or modified CDS sequence (wt) from hemagglutinin__InfluenzaA__ABI16504
auggagaaaauagugcuucuucuugcaauagucagccuuguuaaaagugaucagauuugcauugguuaccaugcaaacaacucgacagagcagguugacacaauaauggaaaagaacguuacuguuacacaugcccaagacauacuggaaaagacacacaacgggaagcucugcgaucuagauggagugaagccucugauuuuaagagauuguaguguagcuggauggcuccucggaaacccaaugugugacgaauucaucaaugugccggaauggucuuacauaguggagaaggccaacccagccaaugaccucuguuacccagggaauuucaacgacuaugaagaacugaaacaccuauugagcagaauaaaccauuuugagaaaauucagaucaucuccaaaaguucuugguccgaucaugaagccucaucaggggugagcucagcauguccauaccagggaacgcccuccuuuuucagaaaugugguauggcuuaucaaaaagaacaauacauacccaacaauaaagagaagcuacaauaauaccaaccaggaagaucuuuugauacuguggggaauucaucauucuaauaaugcggcagagcagacaaagcucuaucaaaacccaaccaccuauauuuccguugggacaucaacacuaaaccugagauugguaccaaaaauagcuacuagauccaaaguaaacgggcaaaguggaaggauggauuucuucuggacaauuuuaaaaccgaaugaugcaaucaacuucgagaguaauggaaauuucauugcuccagaauaugcauacaaaauugucaagaaaggggacucagcaauuaugaaaagugaaguggaauaugguaacugcaacaccaagugucaaacuccaauaggggcgauaaacucuaguaugccauuccacaacauacacccucucaccaucggggaaugccccaaauaugugaaaucaaacaaauuaguccuugcgacugggcucagaaauaguccucuaagagagagaagaagaaaaagaggacuauuuggagcuauagcagguuuuauagagggaggauggcagggaaugguagaugguugguauggguaccaccauagcaaugagcaggggaguggguacgcugcagacaaagaauccacucaaaaggcaauagauggagucaccaauaaggucaacucgaucauugacaaaaugaacacucaguuugaggccguuggaagggaauuuaauaacuuagaaaggagaauagagaauuuaaacaagaaaauggaagacggauuccuagaugucuggacuuauaaugcugaacuucugguucucauggaaaaugagagaacucuagacuuccaugacucaaaugucaagaaccuuuacgacaagguccgacuacagcuuagggauaaugcaaaggaacuggguaacgguuguuucgaguucuaucacaaaugugauaaugaauguauggaaaguguaagaaacggaacguaugacuacccgcaguauucagaagaagcaagauuaaaaagagaggaaauaaguggaguaaaauuggaaucaauaggaacuuaccaaauacugucaauuuauucaacaguugcgaguucucuagcacuggcaaucaugguggcuggucuaucuuuauggaugugcuccaaugggucguuacaaugcagaauuugcauuuaa

SEQ ID NO: 33185 - RNA, 1701 nt, Artificial Sequence; identical to SEQ ID NO: 32669
  derived and/or modified CDS sequence (wt) from hemagglutinin__InfluenzaA__ABI20793

SEQ ID NO: 33186 - RNA, 1701 nt, Artificial Sequence
  derived and/or modified CDS sequence (wt) from hemagglutinin__InfluenzaA__ABI20837
augaaagcaaaacuacuaguccuguugugugcauuuacagcuacauaugcagacacaauauguauaggcuaccaugcgaacaacucaacugacacuguugacacaguacuugagaagaacgugacagugacacacucugucaaccuacuugaggacagucacaacggaaaacuaugccgacuaaaaggaacagccccacuacaauuggguaauugcagcguugccggauggaucuuaggaaacccagaaugcgaaucacuguuuucuaaggaaucaugguccuacauugcagaaacaccaaacccugagaauggaacauguuacccaggguauuucgccgacuaugaggaacugagggagcaauugagcucaguaucaucauucgagagauucgaaauauuccccaaggaaagcucauggcccaaccacaccguaaccaaaggaguaacggcaucaugcucccauaaugggaaaagcaguuuuuacaaaaauuugcuauggcugacagagaagaauggcuuguacccaaaucugagcaaguccuauguaaacaacaaggagaaagaaguccuuguacuaugggguguucaucacccgucuaacauaggggaccaaagggccaucuaucauacagaaaaugcuuaugucucuguagugucuucacauuauagcagaagauucaccccagaaauagcaaaaagacccaaaguaagagaccaagaagggagaauuaacuacuacuggacucugcuggaacccggggacacaauaauauuugaggcaaauggaaaucuaauagcgccaugguacgcuuucgcacugaguagaggcuuugggucaggaaucaucaccucaaacgcaucaaugggugaaugugacgcuaagugucaaacaccccaaggagcuauaaacaguagucuuccuuuccagaauguacacccagucacaauaggagaguguccaaaguaugucaggaguacaaaauuaaggaugguuacaggacuaaggaacaucccauccauucaauccagagguuuguuuggagccauugccgguuucauugaaggaggguggacuggaaugauagauggaugguaugguuaucaucaucagaaugaacaaggauccggcuaugcugcggaccaaaaaagcacacaaaaugccauuaaugggauuacaaacaaagugaauucuguaaucgagaaaaugaacacucaauucacagcuguaggcaaagaauucaacaaauuagaaagaaggauggaaaacuuaaauaagaaaguugaugauggauuucuggacauuuggacauauaaugcagaauuguugguucuccuggaaaaugaaaggacuuuggauuuucaugacucaaaugugaagaaucuguaugagaaaguaaaaacccaauugaagaauaaugccaaagaaauagggaacggguguuuugaauucuaucacaaguguaacaaugaaugcauggaaagugugaaaaauggaacuuaugacuauccaaaauacuccgaagaaucaaaguuaaacagggaaaaaauugauggagugaaauuggaaucaaugggagucuaucagauucuggcgaucuacucaacugucgccaguucacuggugcuuuuggucucccugggggcaaucaguuucuggauguguucuaaugggucuuugcaguguagaauaugcaucuga

SEQ ID NO: 33187 - RNA, 1701 nt, Artificial Sequence
  derived and/or modified CDS sequence (wt) from hemagglutinin__InfluenzaA__ABI20848
augaaagcaaaacuacuaguccuguugugugcauuuacagcuacauaugcagacacaauauguauaggcuaccaugcgaacaacucaaccgacacuguugacacaguacuugagaagaacgugacagugacacacucugucaaccuacuugaggacagucacaacggaaaacuaugccgacuaaaaggaacagccccacuacaauuggguaauugcagcguugccggauggaucuuaggaaacccagaaugcgaaucacuguuuucuaaggaaucaugguccuacauugcagaaacaccaaacccugagaauggaacauguuacccaggguauuucgccgacuaugaggaacugaaggagcaauugagcucaguaucaucauucgagagauucgaaauauuccccaaggaaagcucauggcccaaccacacaguaaccaaaggagugacggcaucaugcucccauaaugggaaaagcaguuuuuacaaaaauuugcuauggcugacggaaaagaauggcuuguacccaaaucugagcaaguccuauguaaacaacaaggagaaagaaguccuuguacuaugggguguucaucacccgucuaacauaggggaccaaagggccaucuaucauacagaaaaugcccaugucucuguggugucuucgcauuauagcagaagauucaccccagaaauagcaaaaagacccaaaguaagagaucaagaagggagaauuaacuacuacuggacucugcuggaacccggggacacaauaauauuugaggcaaauggaaaucuaauagcgccaugguacgcuuucgcauugaguagaggcuuugggucaggaaucaucaccucaaacgcaucaaugggugaaugugacgcuaagugucaaacaccccaaggagcuauaaacaguagucuuccuuuccagaauguacacccagucacaauaggagagugucccaaguaugucaggaguacaaaauuaaggaugguuacaggacuaagaaacaucccauccauucaaucuagagguuuguuuggagccauugccgguuucauugaagggggguggacuggaaugauagauggaugguacgguuaucaucaucagaaugaacaaggaucuggauaugcugcagacaaaaaaagcacacaaaaugccauugaugggauuacaaacaaggugaauucuguaaucgagaaaaugaacacucaauucacagcuguaggcaaagaauucaacaaauuagagagaaggauggaaaacuuaaauaagaaaguugaugauggauuucuggacauuuggacauauaaugcagaguuguugguucuccuggaaaaugaaaggacuuuggauuuucaugacucaaaugugaagaaucuguaugagaaaguaaaaaaccaauugaagaauaaugccaaagaaaucgggaacggguguuuugaauucuaucacaaguguaacaaugaaugcauggaaagugugaaaaauggaacuuaugacuauccaaaauauuccgaagaaucaaaguuaaaaagggaaaaaauugauggagugaaauuggaaucaaugggagucuaucagauucuggcgaucuacucaacugucgccaguucacuggugcuuuuggucucccugggggcaaucaguuuuuggauguguucuaaugggucuuugcaauguagaauaugcaucuga

SEQ ID NO: 33188 - RNA, 1701 nt, Artificial Sequence; identical to SEQ ID NO: 32933
  derived and/or modified CDS sequence (wt) from hemagglutinin__InfluenzaA__ABI20859

SEQ ID NO: 33189 - RNA, 1701 nt, Artificial Sequence
  derived and/or modified CDS sequence (wt) from hemagglutinin__InfluenzaA__ABI20870
augaaagcaaaacuacuaguccuguuaugugcauuuacagcuacauaugcagacacaauauguauaggcuaccaugcgaacaacucaaccgacacuguugacacaguacuugagaagaacgugacagugacacacucugucaaccuacuugaggacagucacaacggaaaacuaugucggcuaaaaggaauagccccacuacaauuggguaauugcagcguugccggauggaucuuaggaaauccagaaugcgaaucacuguuuucuaaggaaucaugguccuacauugcagaaacaccaaacccugagaauggaacauguuacccagggaauuucgcagacuaugaggaacugagagagcaauugaguucaguaucaucauucgagagauucgaaauauuccccaaagaaagcucauggcccaaccacaccguaacuaaaggaguaacgguaucaugcucccauaaugggaaaagcaguuuuuacagaaauuugcuauggcugacagagaagaauggcuuguacccaaaucugagcaaguccuauguaaacaacaaagagaaagaaguccuuguacuaugggguguucaucacccgucuaacaugagggaccaaagggccaucuaucauacagaaaaugcuuauguuucuguagugucuucacauuauagcagaagauucaccccagaaauagcaaaaagacccaaaguaagagaucaagaaggaagaauuaacuacuacuggacucugcuggaacccggggacacaauaauauuugaggcaaauggaaaucuaauagcgccaagguaugcuuucgcacugaguagaggcuuugggucaggaaucaucaccucaaacgcaucaauggaugaaugugacgcgaagugucaaacaccccaaggagcuauaaacaguagucuuccuuuccagaacguacacccagucacaauaggagaguguccaaaguaugucaggaguacaaaauuaaggaugguuacaggacuaaggaacaucccauccauucaauccagagguuuguuuggagccauugccgguuucauugaagggggguggacuggaaugauagauggaugguaugguuaucaucaucagaaugaacaaggaucuggcuaugcugcggaccaaaagagcacacaaaaugccauuaaugggauuacaaacaaggugaauucuguaaucgagaaaaugaacacucaauucacagcugugggcaaagaauucaacaaauuagaaagaaggauggaaaacuuaaauaaaaaaguugaugauggauuucuggacauuuggacauauaaugcagaauuguugguucuacuggaaaaugaaaggacuuuggauuuucaugacucaaaugugaagaaucuguaugagaaaguaaaaagccaauugaagaauaaugccaaagaaauagggaacggguguuuugaauucuaucacaaguguaacaaugaaugcauggaaagugugaaaaauggaacuuaugacuauccaaaauauuccgaagaaucaaaguuaaacagggaaaagauugauggagugaaauuggaaucaaugggagucuaucagauucuggcgaucuacucaacugucgccaguucacuggugcuuuuggucucccugggggcaaucagcuucuggauguguucuaaugggucuuugcaguguagaauaugcaucuga

SEQ ID NO: 33190 - RNA, 1701 nt, Artificial Sequence
  derived and/or modified CDS sequence (wt) from hemagglutinin__InfluenzaA__ABI20881
augaagacuaucauugcuuugagcuacauuuuaugucugguuuucgcucaaaaacuucccggaaaugacaacagcacagcaacgcugugccugggacaccaugcagugccaaacggaacgcuagugaaaacaaucacgaaugaucaaauugaagugacuaaugcuacugagcugguucagaguuccucaacagguagaauaugcgacaguccucaccgaauccuugauggaaaaaacugcacacugauagaugcucuauugggagacccucauugugauggcuuccaaaauaaggaaugggaccuuuuuguugaacgcagcaaagcuuacagcaacuguuacccuuaugaugugccggauuaugccucccuuaggucacuaguugccucaucaggcacccuggaguuuaccaaggaaggcuucaauuggacuggagucgcucaggaugggaaaagcuaugcuugcaaaaggggaucuguuaacaguuucuuuaguagauugaauugguugcacaaauuagaauacaaauauccugcacugaacgugacuaugccaaacaaugacaaauuugacaaauuguacauuugggggguucaccacccgagcacggacagugaccaaaccagccuauauguucaagcaucagggagagucacagucucuaccaaaagaagccaacaaacuguaaucccgaauaucgggucuagacccuggguaagggguaucuccaguagaauaagcaucuauuggacaauaguaaaaccgggagacauacuuuugauuaacagcacagggaauuuaauugcuccucgggguuacuucaaaauacgaaaugggaaaagcuccauaaugaggucagaugcacccauuggcaacugcaauucugaaugcaucacuccaaauggaagcauucccaaugacaaaccuuuucaaaauguaaacaggaucacauauggggccugucccagauauguuaagcaaaacacucugaaguuggcaacagggaugcggaauguaccagagaaacaaacuagaggcauauucggcgcaaucgcagguuucauagaaaaugguugggagggaaugguagacgguugguacgguuucaggcaucaaaauucugagggcacaggacaagcagcagaucuuaaaagcacucaagcagcaaucgaccaaaucaacgggaaacugaauagguuaaucgagaaaacgaacgagaaauuccaucaaaucgaaaaagaauucucagaaguagaagggagaauucaggaccucgagaaauauguugaagacacuaaaauagaucucuggucuuacaacgcggagcuucuuguugcccuggagaaccaacauacaauugaucuaacugacucagaaaugaacaaacuguuugaaagaacaaggaagcaacugagggaaaaugcugaggacaugggcaaugguugcuucaaaauauaccacaaaugugacaaugccugcauagggucaaucagaaauggaacuuaugaccaugauguauacagagacgaagcauuaaacaaccgguuccagaucaaagguguugagcugaagucaggguacaaagauuggauccuauggauuuccuuugccauaucaugcuuuuugcuuuguguuguuuugcugggguucaucaugugggccugccaaaaaggcaacauuaggugcaacauuugcauuuga

SEQ ID NO: 33191 - RNA, 1701 nt, Artificial Sequence
  derived and/or modified CDS sequence (wt) from hemagglutinin__InfluenzaA__ABI20892
augaagacuaucauugcuuugagcuacauuuuaugucugguuuucgcucaaaaacuucccggaaaugacaacagcacagcaacgcugugccugggacaccaugcagugccaaacggaacgcuagugaaaacaaucacgaaugaucaaauugaagugacuaaugcuacugagcugguucagaguuccucaacagguagaauaugcgacaguccucaccgaauccuugauggaaaaaacugcacacugauagaugcucuauugggagacccucauugugauggcuuccaaaauaaggaaugggaccuuuuuguugaacgcagcaaagcuuacagcaacuguuacccuuaugaugugccggauuaugccucccuuaggucacuaguugccucaucaggcacccuggaguuuaccaaggaaggcuucaauuggacuggagucgcucaggaugggaaaagcuaugcuugcaaaaggggaucuguuaacaguuucuuuaguagauugaauugguugcacaaauuagaauacaaauauccagcacugaacgugacuaugccaaacaaugacaaauuugacaaauuguacauuugggggguucaccacccgagcacggacagugaccaaaccagccuauauguucaagcaucagggagagucacagucucuaccaaaagaagccaacaaacuguaaucccgaauaucgggucuagacccuggguaagggguaucuccaguagaauaagcauccauuggacaauaguaaaaccgggagacauacuuuugauuaccagcacagggaaucuaauugcuccucgggguuacuucaaaauacgaaaugggaaaagcucaauaaugaggucagaugcacccauuggcaacugcaauucugaaugcaucacuccaaauggaagcauucccaaugacaaaccuuuucaaaauguaaacaggaucacauauggggccugucccagauauguuaagcaaaacacucugaaguuggcaacagggaugcggaauguaccagagaaacaaacuagaggcauauucggcgcaaucgcagguuucauagaaaaugguugggagggaaugguagacgguugguacgguuucaggcaucaaaauucugagggcacaggacaagcagcagaucuuaaaagcacucaagcagcaaucgaccaaaucaacgggaagcugaauagguuaaucgagaaaacgaacgaaaaauuccaucaaaucgaaaaagaauucucagaaguagaagggagaauucaggaccucgagaaauauguugaagacacuaaaauagaucucuggucuuacaacgcggagcuucuuguugcccuggagaaccaacauacaauugaucuaacugacucagaaaugaacaaacuguuugaaagaacaaggaagcaacugagggaaaaugcugaggacaugggcaaugguugcuucaaaauauaccacaaaugugacaaugccugcauagggucaaucagaaauggaacuuaugaccaugauguauacagagacgaagcauuaaacaaccgguuccagaucaaagguguugagcugaagucaggauacaaagauuggauccuauggauuuccuuugccauaucaugcuuuuugcuuuguguuguuuugcugggguucaucaugugggccugccaaaaaggcaacauuaggugcaacauuugcauuuga

SEQ ID NO: 33192 - RNA, 1701 nt, Artificial Sequence
  derived and/or modified CDS sequence (wt) from hemagglutinin__InfluenzaA__ABI20903
augaagacuaucauugcuuugagcuacauuuuaugucugguuuucgcucaaaaacuucccggaaaugacaacagcacagcaacgcugugccugggacaccaugcagugccaaacggaacgcuagugaaaacaaucacgaaugaucaaauugaagugacuaaugcuacugagcugguucagaauuccccaacagguagaauaugcgacaguccucaccgaauccuugauggaaagaacugcacacugauagaugcucuauugggagacccucauugugauggcuuccaaaauaaggaaugggaccuuuuuguugaacgcagcaaagcuuacagcaacuguuacccuuaugaugugccggauuaugccucccuuaggucacuaguugccucaucaggcacccuggaguuuaccaacgaaaacuucaauuggacuggagucgcucaggaugggaaaagcuaugcuugcaaaaggggaucuguuaacaguuucuuuaguagauugaauugguugcacaaauuagaauacaaauauccagcgcugaacgugacuaugccaaacaauggcaaauuugacaaauuguacauuugggggguucaccacccgagcacggacagugaccaaaccagccuauauguccgagcaucagggaaagucacagucucuaccaaaagaagccaacaaacuguaaucccggauaucggguauagaccauggguaaggggucuguccaguagaauaagcaucuauuggacaauaguaaaaccgggagacauacuuuugauucauagcacagggaaucuaauugcuccucgggguuacuucaaaauacgaaaugggaaaagcucaauaaugaggucagaugcacccauuggcaacugcaguucugaaugcaucacuccaaauggaagcauucccaaugacaaaccuuuucaaaauguaaacaggaucacauauggggccugccccagauauguuaagcaaaacacucugaaauuggcaacagggaugcggaauguaccagagaaacaaacuagaggcauauucggcgcaaucgcagguuucauagaaaaugguugggagggaaugguagacgguugguacgguuucaggcaucagaauucugagggcacaggacaagcugcagaucuuaaaagcacucaagcagcaaucgaccaaaucaacgggaaacugaauagguuagucgagaaaacgaacgagaaauuccaucaaaucgaaaaagaauucucagaaguagaagggagaauucaggaccucgagaaauauguugaagacacuaaaauagaucucuggucuuacaaugcggagcuucuuguugcucuggagaaccaacauacaauugaucuaacugacucagaaaugaacaaacuauuugaaagaacaaggaagcaacugagggaaaaugcugaggacaugggcaaugguuguuucaaaauauaccacaaaugugacaaugccugcauagggucaaucagaaauggaacuuaugaccaugauguauacagagacgaagcauuaaacaaccgguuccagaucaaagguguugagcugaagucaggauacaaagauuggauccuauggauuuccuuugccauaucaugcuuuuugcuuuguguuguuuugcuuggguucaucaugugggccugccaaaaaggcaacauuaggugcaacauuugcauuuga

SEQ ID NO: 33193 - RNA, 1701 nt, Artificial Sequence
  derived and/or modified CDS sequence (wt) from hemagglutinin__InfluenzaA__ABI20914
augaagacuaucauugcuuugagcuacauuuuaugucugguuuucgcucaaaaacuucccggaaaugacaacagcacagcaacgcugugccugggacaccaugcggugccaaacggaacgcuagugaaaacaaucacgaaugaucaaauugaagugacuaaugcuacugagcugguucagaguuccucaacagguagaauaugcgacaguccucaccgaauccuugauggaaaaaacugcacacugauagaugcucuauugggagacccucauugugauggcuuccaaaauaaggaaugggaccuuuuuguugaacgcagcaaagcuuacagcaacuguuacccuuaugaugugccggauuaugccucccuuaggucacuaguugccucaucaggcacccuggaguuuaucaaugaagacuucaauuggacuggagucgcucaggaugggaaaagcuaugcuugcaaaaggggaucuguuaacaguuucuuuaguagauugaauugguugcacaaauuagaauacaaauauccagcgcugaacgugacuaugccaaacaauggcaaauuugacaaauuguacauuugggggguucaccacccgagcacggacagugaccaaaccagccuauauguucgagcaucagggagagucacagucucuaccaaaagaagccaacaaacuguaaucccgaauaucggguuuagacccuggguaaggggucuguccaguagaauaagcaucuauuggacaauaguaaaaccgggagacauacuuuugauuaauagcacagggaaucuaauugcuccucgggguuacuucaaaauacggaaugggaaaagcucaauaaugaggucagaugcacccauuggcaacugcaguucugaaugcaucacuccaaauggaagcauucccaaugacaaaccuuuucaaaauguaaacaggaucacauauggggccugccccagauauguaaagcaaaacacucugaaguuggcaacagggaugcggaauguaccagagaaacaaacuagaggcauauucggcgcaaucgcagguuucauagaaaaugguugggagggaaugguagacgguugguacgguuucaggcaucaaaauucugagggcacaggacaagcagcagaucuuaaaagcacucaagcagcaaucgaccaaaucaacgggaaacugaauagguuaaucgagaaaacgaacgagaaauuccaucaaaucgaaaaagaauucucagaaguagaagggagaauucaggaccucgagaaauauguugaagacacuaaaauagaucucuggucuuacaacgcggggcuucuuguugcccuggagaaccaacauacaauugaucuaacugacucagaaaugaacaaacuguuugaaagaacaaggaagcaacugagggaaaaugcugaggacaugggcaaugguugcuucaaaauauaccacaaaugugacaaugccugcauagggucaaucagaaauggaacuuaugaccaugauguauacagagacgaagcauuaaacaaccgguuccagaucaaagguguugagcugaagucaggauacaaagauuggauccuauggauuuccuuugccauaucaugcuuuuugcuuuguguuguuucgcugggguucaucaugugggccugccaaaaaggcaacauuaggugcaacauuugcauuuga

SEQ ID NO: 33194 - RNA, 1701 nt, Artificial Sequence; identical to SEQ ID NO: 33078
  derived and/or modified CDS sequence (wt) from hemagglutinin__InfluenzaA__ABI20925

SEQ ID NO: 33195 - RNA, 1701 nt, Artificial Sequence; identical to SEQ ID NO: 33078
  derived and/or modified CDS sequence (wt) from hemagglutinin__InfluenzaA__ABI20936

SEQ ID NO: 33196 - RNA, 1701 nt, Artificial Sequence
  derived and/or modified CDS sequence (wt) from hemagglutinin__InfluenzaA__ABI20947
augaagacuaucauugcuuugagcuacauuuuaugucugguuuucgcucaaaaacuucccggaaaugacaacagcacagcaacgcugugccugggacaccaugcggugccaaacggaacgcuagugaaaacaaucacgaaugaucaaauugaagugacuaaugcuacugagcugguucagaguuccucaacagguagaauaugcgacaguccucaccgaauccuugauggaaaaaacugcacacugauagaugcucuauugggagacccucauugugauggcuuccaaaauaaggaaugggaccuuuuuguugaacgcagcaaagcuuacagcaacuguuacccuuaugaugugccggauuaugccucccuuaggucacuaguugccucaucaggcacccuggaguuuaucaaugaagacuucaauuggacuggagucgcucaggaugggaaaagcuaugcuugcaaaaggggaucuguuaacaguuucuuuaguagauugaauugguugcacaaauuagaauacaaauauccagcgcugaacgugacuaugccaaacaauggcaaauuugacaaauuguacauuugggggguucaccacccgagcacggacagugaccaaaccagccuauauguucgagcaucagggagagucacagucucuaccaaaagaagccaacaaacuguaaucccgaauaucggguuuagacccuggguaaggggucuguccaguagaauaagcaucuauuggacaauaguaaaaccgggagacauacuuuugauuaauagcacagggaaucuaauugcuccucgggguuacuucaaaauacggaaugggaaaagcucaauaaugaggucagaugcacccauuggcaacugcaguucugaaugcaucacuccaaauggaagcauucccaaugacaaaccuuuucaaaauguaaacaggaucacauauggggccugccccagauauguaaagcaaaacacucugaaguuggcaacagggaugcggaauguaccagagaaacaaacuagaggcauauucggcgcaaucgcagguuucauagaaaaugguugggagggaaugguagacgguugguacgguuucaggcaucaaaauucugagggcacaggacaagcagcagaucuuaaaagcacucaagcagcaaucgaccaaaucaacgggaaacugaauagguuaaucgagaaaacgaacgagaaauuccaucaaaucgaacaagaauucucagaaguagaagggagaauucaggaccucgagaaauauguugaagacacuaaaauagaucucuggucuuacaacgcggggcuucuuguugcccuggagaaccaacauacaauugaucuaacugacucagaaaugaacaaacuguuugaaagaacaaggaagcaacugagggaaaaugcugaggacaugggcaaugguugcuucaaaauauaccacaaaugugacaaugccugcauagggucaaucagaaauggaacuuaugaccaugauguauacagagacgaagcauuaaacaaccgguuccagaucaaagguguugagcugaagucaggauacaaagauuggauccuauggauuuccuuugccauaucaugcuuuuugcuuuguguuguuuugcugggguucaucaugugggccugccaaaaaggcaacauuaggugcaacauuugcauuuga

SEQ ID NO: 33197 - RNA, 1701 nt, Artificial Sequence
  derived and/or modified CDS sequence (wt) from hemagglutinin__InfluenzaA__ABI20958
augaagacuaucauugcuuugagcuacauuuuaugucugguuuucgcucaaaaacuucccggaaaugacaacagcacagcaacgcugugccugggacaccaugcggugccaaacggaacgcuagugaaaacaaucacgaaugaucaaauugaagugacuaaugcuacugagcugguucagaguuccucaacagguagaauaugcgacaguccucaccgaauccuugauggaaaaaacugcacacugauagaugcucuauugggagacccucauugugauggcuuccaaaauaaggaaugggaccuuuuuguugaacgcagcaaagcuuacagcaacuguuacccuuaugaugugccggauuaugccucccuuaggucacuaguugccucaucaggcacccuggaguuuaucaaugaagacuucaauuggacuggagucgcucaggauggaaaaagcuaugcuugcaaaaggggaucuguuaacaguuucuuuaguagauugaauugguuguacaaauuagaauacaaauauccagcgcugaacgugacuaugccaaacaauggcaaauuugacaaauuguacauaugggggguucaccacccgagcacggacagugaccaaaccagccuauauguucgagcaucagggagagucacagucucuaccaaaagaagccaacaaacuguaaucccgaauaucggguuuagacccuggguaaggggucuguccaguagaauaagcaucuauuggacaauaguaaaaccgggagacauacuuuugauuaauagcacagggaaucuaauugcuccucgggguuacuucaaaauacggaaugggaaaagcucaauaaugaggucagaugcacccauuggcaacugcaguucugaaugcaucacuccaaauggaagcauucccaaugacaaaccuuuucaaaauguaaacaggaucacauauggggccugccccagauauguuaagcaaaacacucugaaguuggcaacagggaugcggaauguaccagagaaacaaacuagaggcauauucggcgcaaucgcagguuucauagaaaaugguugggagggaaugguagacgguugguacgguuucaggcaucaaaauucugagggcacaggacaagcagcagaucuuaaaagcacucaagcagcaaucgaccaaaucaacgggaaacugaauagguuaaucgagaaaacgaacgagaaauuccaucagaucgaaaaagaauucucagaaguagaagggagaauucaggaccucgagaaauauguugaagacacuaaaauagaucucuggucuuacaacgcggggcuucuuguugcccuggagaaccaacauacaauugaucuaacugacucagaaaugaacaaacuguuugaaagaacaaggaagcaacugagggaaaaugcugaggacaugggcaaugguugcuucaaaauauaccacaaaugugacaaugccugcauagggucaaucagaaauggaacuuaugaccaugauguauacagagacgaagcauuaaacaaccgguuccagaucaaagguguugagcugaagucaggauacaaagauuggauccuauggauuuccuuugccauaucaugcuuuuugcuuuguguuguuuugcugggguucaucaugugggccugccaaaaaggcaacauuaggugcaacauuugcauuuga

SEQ ID NO: 33198 - RNA, 1701 nt, Artificial Sequence
  derived and/or modified CDS sequence (wt) from hemagglutinin__InfluenzaA__ABI20969
augaagacuaucauugcuuugagcuacauuuuaugucugguuuucgcucaaaaacuucccguaaaugacaacagcacggcaacgcugugccugggacaccaugcagugccaaacggaacgcuagugaaaacaaucacgaaugaccacauugaagugacuaaugcuacugagcugguucagaguuccucaacagguagaauaugcgacaguccucaccaaauccuugauggagaaaacugcacgcuaauagaugcucuauugggagacccucauugugauggcuuccaaaauaaggaauggaaccuuuuuguugaacgcagcacagccuacagcaacuguuacccuuaugaugugccggauuaugccucccuuaggucacuaguugccucauccggcacacuggaguuuaacaaugaaagcuucaauuggacuggagucgcucagaauggaacaagcucugcuugcaaaaggagaucuauuaaaaguuucuuuaguagauugaauugguugcaccaauuaaaauacaaauauccagcacugaacgugacuaugccaaacaaugaaaaauuugacaaauuguacauuugggggguucaccacccgaguacggacagugaccaaaucagccuauaugcucaagcaucagggagagucacagucucuaccaaaagaagccaacaaacuguaaucccgaauaucggaucuagacccuggguaaggggugucuccagcagaauaagcaucuauuggacaauaguaaaaccgggagacauacuuuugauuaacagcacagggaaucuaauugcuccucgggguuacuuuaaaauacgaagugggaaaagcucaauaaugaggucaaaugcacccauuggcaaaugcaauucugaaugcaucacuccaaauggaagcauucccaaugacaaaccauuucaaaauguaaacaggaucacauauggggccugucccagauauguuaagcaaaacacucugaaauuggcaacagggaugcggaauguaccagagaaacaaacuagaggcauauucggcgcaaucgcggguuucauagaaaaugguugggagggaaugguggacgguugguacgguuucaggcaucaaaauucugagggcacaggacaagcagcagaucuuaaaagcacucaagcagcaaucaaccaaaucaacgggaaacugaauagguuaaucgagaaaacaaacgagaaauuccaucaaauugaaaaagaauucucagaaguagaagggagaauucaggaccucgagaaauauguugaggacacuaaaauagaucucuggucguacaacgcggagcuucuuguugcccuggagaaccaacauacaauugaucuaacugacucagaaaugaacaaacuguuugaaagaacaaggaagcaacugagggaaaaugcugaggauaugggcaaugguuguuucaaaauauaccacaaaugugacaaugccugcauagggucaaucagaaauggaacuuaugaccaugauguauacagagacgaagcauuaaacaaccgguuccagaucaaagguguugagcugaagucaggauacaaagauuggauccuauggauuuccuuugccauaucauguuuuuugcuuuguguuguuuugcugggguucaucaugugggccugccaaaaaggcaacauuaggugcaacauuugcauuuga

SEQ ID NO: 33199 - RNA, 1701 nt, Artificial Sequence
  derived and/or modified CDS sequence (wt) from hemagglutinin__InfluenzaA__ABI20980
augaagacuaucauugcuuugagcuacauuuuaugucugguuuucgcucaaaaacuucccguaaaugacaacagcacggcaacgcugugccugggacaccaugcagugccaaacggaacgcuagugaaaacaaucacgaaugaccacauugaagugacuaaugcuacugagcugguucagaguuccucaacagguagaauaugcgacaguccucaccaaauccuugauggagaaaacugcacacuaauagaugcucuauugggagacccccauugugauggcuuccaaaauaaggaaugggaccuuuuuguugaacgcagcacagccuacagcaacuguuacccuuaugaugugccggauuaugccucccuuaggucacuaguugccucauccggcacacuugaguuuaacaaugaaagcuucaauuggacuggagucgaucagaauggaacaagcucugcuugcaaaaggagaucuacuaaaaguuucuuuaguagauugaauugguugcaccaauuaaaauacaaauauccagcacugaacgugacuaugccaaacaaugaaaaauuugacaaauuguacauuugggggguucaccauccgaguacggacagugaccaaaucagccuauaugcucaagcaucagggagagucacagucucuaccaaaagaagccaacaaacuguaaccccgaauaucggaucuagacccuggguaaggggugucuccagcagaauaagcauuuauuggacaauaguaaaaccgggagacauacuuuugauuaacagcacagggaaucuaauugcuccucgggguuacuucaaaauacgaagugggaaaagcucaauaaugaggucaaaugcacucauuggcaaaugcaauucugaaugcaucacuccaaauggaagcauucccaaugacaaaccauuucaaaauguaaacaggaucacauauggggccugucccagauauguuaagcaaaacacucugaaauuggcaacagggaugcggaauguaccagagaaacaaacuagaggcauauucggcgcaaucgcagguuucauagaaaaugguugggagggaaugguggacgguugguacgguuucaggcaucaaaauucugagggcacaggacaagcagcagaucuuaaaagcacucaagcagcaaucaaccaaaucaacgggaaacugaauagguuaaucgagaaaacaaacgagaaauuccaucaaauugaaaaagaauucucagaaguagaagggagaauucaggaccucgagaaauauguugaggacacuaaaauagaucucuggucguacaacgcggagauucuuguugcccuggagaaccaacauacaauugaucuaacugacucagaaaugaacaaacuguucgaaagaacaaggaaacaacugagggaaaaugcugaggauaugggcaaugguuguuucaaaauauaccacaaaugugacaaugccugcauagggucaaucagaaauggaacuuaugaccaugauguauacagagacgaagcauuaaacaaccgguuccagaucaaagguguugagcugaagucaggauacaaagauuggauccuauggauuuccuuugccauaucauguuuuuugcuuuguguuguuuugcugggguucaucaugugggccugccaaaaaggcaacauuaggugcaacauuugcauuuga

SEQ ID NO: 33200 - RNA, 1701 nt, Artificial Sequence
  derived and/or modified CDS sequence (wt) from hemagglutinin__InfluenzaA__ABI20991
augaagacuaucauugcuuugagcuacauuuuaugucugguuuucgcucaaaaacuucccggaaaugacaacagcacggcaacgcugugccuggggcaccaugcagugccaaacggaacgcuagugaaaacaaucacgaaugaccaaauugaagugaccaaugcuacugagcugguucagaguuccucaacagguggaauaugcgacaguccucaccaaauccuugauggagaaaacugcacacuaauagaugcucuauugggagacccucauugugauggcuuccaaaauaaggaaugggaccuuuuuguugaacgcagcaaagccuacagcaacuguuacccuuaugaugugccggauuaugccucccuuaggucacuaguugccucauccggcacacuggaguuuaacaaugaaagcuucaauuggacuggagucgcucagaauggaacaagcucugcuugcaaaaggagaucuaauaaaaguuucuuuaguagauugaauugguugcaccaauuaaaauacaaauacccagcacugaacgugacuaugccaaacaaugaaaaauuugacaaauuguacauuugggggguucaccacccgaguacggacagugaccaaaucagccuauaugcucaagcaccagggagagucacagucucuaccaaaagaagccaacaaacuguaaucccgaauaucggaucuagacccuggguaaggggugucuccagcagaauaagcaucuauuggacaauaguaaaaccgggagacauacuuuugauuaacugcacagggaaucuaauugcuccucgggguuacuucaaaauacgaagugggaaaagcucaauaaugaggucagaugcauccauuggcaaaugcaauucugaaugcaucacuccaaauggaagcauucccaaugacaaaccauuucaaaauguaaacaggaucacauauggggccugucccagauauguuaagcaaaacacucugaaauuggcaacagggaugcggaauguaccagagaaacaaacuagaggcauauucggcgcaaucgcggguuucauagaaaaugguugggagggaaugguggacgguugguacgguuucaggcaucaaaauucugagggcacaggacaagcagcagaucucaaaagcacucaagcagcaaucaaccaaaucaacgggaaacugaauagguuaaucgagaaaacgaacgagaaauuccaucaaauugaaaaagaauucucagaaguggaagggagaauucaggaccucgagaaauauguugaggacacuaaaauagaucucuggucguacaacgcggagcuucuuguugcccuggagaaccagcauacaauugaucuaacugacucagaaauaaacaaacuauuugaaagaacaaagaagcaacugagggaaaaugcugaggauaugggcaaugguuguuucaaaauauaccacaaaugugacaaugccugcauagggucaaucagaaaugggacuuaugaccaugauguauacagagacgaagcauuaaacaaccgguuccagaucaaagguguugagcugaagucaggauacaaagauuggauccuauggauuuccuuugccauaucauguuuuuugcuuuguguugucuugcugggguucaucaugugggccugccaaaaaggcaacauuaggugcaacauuugcauuuga

SEQ ID NO: 33201 - RNA, 1701 nt, Artificial Sequence
  derived and/or modified CDS sequence (wt) from hemagglutinin__InfluenzaA__ABI21002
augaagacuaucauugcuuugagcuacauuuuaugucugguuuucgcucaaaaacuucccguaaaugacaacagcacggcaacgcugugccugggacaccaugcagugccaaacggaacgcuagugaaaacaaucacgaaugaccacauugaagugacuaaugcuacugaguugguucagaguuccucaacagguagaauaugcgacaguccucaccaaauccuugauggagaaaacugcacacuaauagaugcucuauugggagacccucauugugauggcuuccaaaauaaggaaugggaccuuuuuguugaacgcagcacagccuacagcaacuguuacccuuaugaugugccggauuaugccucccuuaggucacuaguugccucauccggcacacuggaguuuaacaaugaaagcuucaauuggacuggagucgcucagaauggaacaagcucugcuugcaaaaggagaucuauuaaaaguuucuuuaguagauugaauugguugcaccaauuaaaauacaaauauccagcacugaacgugacuaugccaaacaaugaaaaauuugacaaauuguacauuugggggguucaccacccgaguacggacagugaccaaaucagccuauaugcucaagcaucagggagagucacagucucuaccaaaagaagccaacaaacuguaaucccgaauaucggaucuagacccuggguaaggggugucuccagcagaauaagcaucuauuggacaauaguaaaaccgggagacauacuuuugauuaacagcacagggaaucuaauugcuccucgggguuacuuuaaaauacgaagugggaaaagcucaauaaugaggucaaaugcacccauuggcaaaugcaauucugaaugcaucacuccaaauggaagcauucccaaugacaaaccauuucaaaauguaaacaggaucacauauggggccugucccagauauguuaagcaaaacacucugaaauuggcaacaggaaugcggaauguaccagagaaacaaacuagaggcauauucggcgcaaucgcggguuucauagaaaaugguugggagggaaugguagacgguugguaugguuucaggcaucaaaauucugagggcacaggacaagcagcagaucuuaaaagcacucaagcagcaaucaaccaaaucaacgggaaacugaauagguuaaucgagaaaacaaacgagaaauuccaucaaauugaaaaagaauucucagaaguagaagggagaauucaggaccucgagaaauauguugaggacacuaaaauagaucucuggucguacaacgcggagcuucuuguugcccuggagaaucaacauacaauugaucuaacagacucagaaaugaacaaacuguuugaaagaacaaggaagcaacugagggaaaaugcugaggagaugggcaaugguuguuucaaaauauaccacaaaugugacaaugccugcauagggucaaucagaaauggaacuuaugaccaugauguauacagagacgaagcauuaaacaaccgguuccagaucaaagguguugagcugaagucaggauacaaagauuggauccuauggauuuccuuugccauaucauguuuuuugcuuuguguuguuuugcugggguucaucaugugggccugccaaaaaggcaacauuaggugcaacauuugcauuuga

SEQ ID NO: 33202 - RNA, 1701 nt, Artificial Sequence; identical to SEQ ID NO: 33166
  derived and/or modified CDS sequence (wt) from hemagglutinin__InfluenzaA__ABI21013

SEQ ID NO: 33203 - RNA, 1701 nt, Artificial Sequence
  derived and/or modified CDS sequence (wt) from hemagglutinin__InfluenzaA__ABI21024
augaagacuaucauugcuuugagcuacauuuuaugccugguuuucgcucaaaaacuucccggaaaugacaacagcacggcaacgcugugucuggggcaucaugcagugccaaacggaacgcuagugaaaacaaucacgaaugaccaaauugaaguaacuaaugcuacugagcugguucagaguuccucaacagguagaauaugcgacaguccucaccaaauccuugauggagaaaacugcacacuaauagaugcucuauugggagacccucauugugauggcuuccaaaauaaggaaugggaccuuuuuguugaacgcagcaaagccuacagcaacuguuacccuuaugaugugccggauuaugucucccuuaggucacuaguugccucaucaggcacgcuggaguuuaacaaugaaagcuucaauuggacuggagucgcucagaauggaacaagcucugcuugcaaaaggagaucugauaaaaguuucuuuaguaaauugaauugguugcaccaauuaaaauacaaauauccagcacugaacgugacuaugccaaacaaugaaaaauuugacaaauuguacauuugggggguucaccacccggguacagacagugaccaaaucagccuauaugcucaagcaucagggagagucacagucucuaccaaaagaagccaacaaacuguaaucccgaauaucggaucuagacccuggguaaggggugucuccagcagaauaagcaucuauuggacaauaguaaaaccgggagacauacuuuugauuaacagcacagggaaucuaauugcuccucgggguuacuucaaaauacgaagugggaaaagcucaauaaugaggucagaugcacccauuggcaaaugcaauucugaaugcaucacuccaaauggaagcauucccaaugacaaaccauuucaaaauguaaacaggaucacauauggggccugucccagauauguuaagcaaaacacucugaaauuggcaacagggaugcggaaugugccagagaaacaaacuagaggcauauucggugcaaucgcgggcuucauagaaaaugguugggagggaaugauggacgguugguacgguuucaggcaucaaaauucugagggcacagggcaagcagcagaucucaaaagcacucaagcagcaaucaaccaaaucaacgggaaacugaauagguuaaucgagaaaacgaacgagaaauuccaucaaauugaaaaagaauucucagaaguagaagggagaauucaggaccucgagaaauauguugaggacacuaaaauagaucucuggucguacaaugcggagcuucuuguugcccuggagaaccaacauacaauugaucuaacugacucagaaaugaacaaacuguuugaaagaacaaagaagcaacugagggaaaaugcugaggauaugggcaaugguuguuucaaaauauaccacaaaugugacaaugccugcauagggucaaucagaaauggaacuuaugaccaugauguauacagagacgaagcauugaacaaccgguuccagaucaaagguguugagcugaagucaggauacaaagauuggguccuauggauuuccuuugccauaucauguuuuuugcuuuguauuguuuugcugggguucaucaugugggccugccaaaaaggcaacauuaggugcaacauuugcauuuga

SEQ ID NO: 33204 - RNA, 1701 nt, Artificial Sequence; identical to SEQ ID NO: 32582
  derived and/or modified CDS sequence (wt) from hemagglutinin__InfluenzaA__ABI21035

SEQ ID NO: 33205 - RNA, 1701 nt, Artificial Sequence
  derived and/or modified CDS sequence (wt) from hemagglutinin__InfluenzaA__ABI21046
augaagacuaucauugcuuugagcuacauucuaugucugguuuucgcucaaaaacuucccggaaaugacaacagcacggcaacgcugugccuugggcaccaugcaguaccaaacggaacgauagugaaaacaaucacaaaugaccaaauugaaguuacuaaugcuacugagcugguucagaguuccucaacagguggaauaugcgacaguccucaucagauccuugauggagaaaacugcacacuaauagaugcucuauugggagacccucagugugauggcuuccaaaauaagaaaugggaccuuuuuguugaacgcagcaaagccuacagcaacuguuacccuuaugaugugccggaucaugccucccuuaggucacuaguugccucauccggcacacuggaguuuaacaaugaaagcuucgauuggacuggagucacucagaauggaacaagcucugcuugcaaaaggagaucuaauaaaaguuucuuuaguagauugaauugguugacccacuuaaaauacaaauacccagcauugaacgugacuaugccaaacaaugaaaaauuugacaaauuguacauuugggggguucaccacccggguacggacaaugaccaaaucagccuauaugcucaagcaucaggaagaaucacagucucuaccaaaagaagccaacaaacuguaaucccgaauaucggaucuagacccaggguaagggaugucuccagccgaauaagcaucuauuggacaauaguaaaaccgggagacauacuuuugauuaacagcacagggaaucuaauugcuccucgggguuacuucaaaauacgaagugggaaaagcucaauaaugagaucagaugcacccauuggcaaaugcaauucugaaugcaucacuccaaauggaagcauuccaaaugacaaaccauuucaaaauguaaacaggaucacauauggggccugccccagauauguuaagcaaaacacucugaaauuggcaacagggaugcgaaauguaccagagaaacaaacuagaggcauauuuggcgcaaucgcggguuucauagaaaaugguugggagggaaugguggacgguugguacgguuucaggcaucaaaauucugagggcacaggacaagcagcagaucucaaaagcacucaagcagcaaucaaccaaaucaaugggaaacugaauagguuaaucgggaaaacaaacgagaaauuccaucagauugaaaaagaauucucagaaguagaagggagaauucaggaccucgagaaauauguugaggacacuaaaauagaucucuggucauacaacgcggagcuucuuguugcccuggagaaccaacauacaauugaucuaacugacucagaaaugaacaaacuguuugaaagaacaaagaagcaacugagggaaaaugcugaggauaugggcaaugguuguuucaaaauauaccacaaaugugacaaugccugcauagggucaaucagaaauggaacuuaugaccaugauguguacagagaugaagcauuaaacaaccgguuccagaucaaagguguugagcugaagucaggauauaaagauuggauccuauggauuuccuuugccauaucauguuuuuugcuuuguguugcuuuguugggguucaucaugugggccugccaaaaaggcaacauuaggugcaacauuugcauuuga

SEQ ID NO: 33206 - RNA, 1701 nt, Artificial Sequence
  derived and/or modified CDS sequence (wt) from hemagglutinin__InfluenzaA__ABI21057
augaagacuaucauugcuuugagcuacauucuaugucugguuuucgcucaaaaacuucccggaaaugacaacagcacggcaacgcugugccuugggcaccaugcaguaccaaacggaacgauagugaaaacaaucacaaaugaccaaauugaaguuacuaaugcuacugagcugguucagaauuccucaacagguggaauaugcgacaguccucaucagauccuugauggagaaaacugcacacuaauagaugcucuauugggagacccucagugugauggcuuccaaaauaagaaaugggaccuuuuuguugaacgcagcaaagccuacagcaacuguuacccuuaugaugugccggaucaugccucccuuaggucacuaguugccucauccggcacacuggaguuuaacaaugaaagcuucgauuggacuggagucacucagaauggaacaagcucugcuugcaaaaggagaucuaauaaaaguuucuuuaguagauugaauugguugacccacuuaaaauacaaauacccagcauugaacgugacuaugccaaacaaugaaaaauuugacaaauuguacauuugggggguucaccacccggguacggacagugaccaaaucagccuauaugcucaagcaucaggaagaaucacagucucuaccaaaagaagccaacaaacuguaaucccgaauaucggaucuagacccaggguaagggaugucuccagccgaauaagcaucuauuggacaauaguaaaaccgggagacauacuuuugauuaacagcacagggaaucuaauugcuccucgggguuacuucaaaauacgaagugggaaaagcucaauaaugagaucagaugcacccauuggcaaaugcaauucugaaugcaucacuccaaauggaagcauucccaaugacaaaccauuucaaaauguaaacaggaucacauauggggccugucccagauauguuaagcaaaacacucugaaauuggcaacagggaugcgaaauguaccagagaaacaaacuagaggcauauuuggcgcaaucgcggguuucauagaaaaugguugggagggaaugguggacgguugguacgguuucaggcaucaaaauucugagggcacaggacaagcagcagaucucaaaagcacucaagcagcaaucaaccaaaucaaugggaaacugaauagguuaaucgggaaaacaaacgagaaauuccaucagauugaaaaagaauucucagaaguagaagggagaauucaggaccucgagaaauauguugaggacacuaaaauagaucucuggucauacaacgcggagcuucuuguugcccuggagaaccaacauacaauugaucuaacugacucagaaaugaacaaacuguuugaaagaacaaagaagcaacugagggaaaaugcugaggauaugggcaaugguuguuucaaaauauaccacaaaugugacaaugccugcauagggucaaucagaaauggaacuuaugaccaugauguguacagagaugaagcauuaaacaaccgguuccagaucaaagguguugagcugaagucaggauauaaagauuggauccuauggauuuccuuugccauaucauguuuuuugcuuuguguugcuuuguugggguucaucaugugggccugccaaaaaggcaacauuaggugcaacauuugcauuuga

SEQ ID NO: 33207 - RNA, 1701 nt, Artificial Sequence
  derived and/or modified CDS sequence (wt) from hemagglutinin__InfluenzaA__ABI21068
augaagacuaucauugcuuugagcuacauucuaugucugguuuucgcucaaaaacuucccggaaaugacaacagcacggcaacgcugugccuugggcaccaugcaguaccaaacggaacgauagugaaaacaaucacgaaugaccaaauugaaguuacuaaugcuacugagcugguucagaguuccucaacagguggaauaugcgacaguccucaucagauccuugauggagaaaacugcacacuaauagaugcucuauugggagacccucagugugauggcuuccaaaauaagaaaugggaccuuuuuguugaacgcagcaaagccuacagcaacuguuacccuuaugaugugccggauuaugccucccuuaggucacuaguugccucauccggcacacuggaguuuaacaaugaaagcuucaauuggacuggagucacucaaaauggaacaagcucugcuugcaaaaggagaucuaauaacaguuucuuuaguagauugaauugguugacccauuuaaaauucaaauacccagcauugaacgugacuaugccaaacaaugaaaaauuugacaaauuguacauuugggggguucaccacccggguacggacaaugaccaaaucagccuauaugcucaagcaucaggaagaaucacagucucuaccaaaagaagccaacaaacuguaaucccgaauaucggaucuagacccaggguaagggauauccccagcagaauaagcaucuauuggacaauaguaaaaccgggagacauacuuuugauuaacagcacagggaaucuaauugcuccucgggguuacuucaaaauacgaagugggaaaagcucaauaaugagaucagaugcacccauuggcaaaugcaauucugaaugcaucacuccaaauggaagcauucccaaugacaaaccauuucaaaauguaaacaggaucacauauggggccugucccagauauguuaagcaaaacacucugaaauuggcaacagggaugcgaaauguaccagagaaacaaacuagaggcauauuuggcgcaaucgcggguuucauagaaaaugguugggagggaaugguggaugguugguacgguuucaggcaucaaaauucugagggaauaggacaagcagcagaucucaaaagcacucaagcagcaaucaaccaaaucaaugggaagcugaauagguugaucgggaaaaccaacgagaaauuccaucagauugaaaaagaauucucagaaguagaagggagaauucaggaccucgagaaauauguugaggacacuaaaauagaucucuggucauacaacgcggagcuucuuguugcccuggagaaccaacauacaauugaucuaacugacucagaaaugaacaaacuguuugaaagaacaaagaagcaacugagggaaaaugcugaggauaugggcaaugguuguuucaaaauauaccacaaaugugacaaugccugcauagggucaaucagaaauggaacuuaugaccaugauguauacagagaugaagcauuaaacaaccgguuccagaucaaagguguugagcugaagucaggauacaaagauuggauccuauggauuuccuuugccauaucauguuuuuugcuuuguguugcuuuguugggguucaucaugugggccugccaaaaaggcaacauuagaugcaacauuugcauuuga

SEQ ID NO: 33208 - RNA, 1701 nt, Artificial Sequence; identical to SEQ ID NO: 32334
  derived and/or modified CDS sequence (wt) from hemagglutinin__InfluenzaA__ABI21079

SEQ ID NO: 33209 - RNA, 1701 nt, Artificial Sequence
  derived and/or modified CDS sequence (wt) from hemagglutinin__InfluenzaA__ABI21090
augaagacuaucauugcuuugagcuacauucuaugucugguuuucgcucaaaaacuucccggaaaugacaacagcacggcaacgcugugccuugggcaccaugcaguaccaaacggaacgguagugaaaacaaucacaaaugaccaaauugaaguuacuaaugcuacugagcugguucagaguuccucaacagguggaauaugcgacaguccucaucagauccuugauggagaaaacugcacacuaauggaugcucuauugggagacccucagugugauggcuuccaaaauaagaaaugggaccuuuuuguugaacgcagcaaagccuacagcaacuguuacccuuaugaugugccggauuaugccucccuuaggucacuaguugccucauccggcacacuggaguuuaacaaugaaagcuucaauuggacuggagucacucaaaauggaacaagcucugcuugcaaaaggagaucuaauaacaguuucuuuaguagauugaauugguugacccacuuaaaauucaaauacccagcauugaacgugacuaugccaaacaaugaaaaauuugacaaauuguacauuugggggguucaccacccggguacggacaaugaccaaaucagccuauaugcucaagcaucaggaagaaucacagucucuaccaaaagaagccaacaaacuguaaucccgaauaucggaucuagacccaggguaagggauauccccagcagaauaagcaucuauuggacaauaguaaaaccgggagacauacuuuugauuaacagcacagggaaucuaauugcuccucgggguuacuucaaaauacgaagugggaaaagcucaauaaugagaucagaugcacccauuggcaaaugcaauucugaaugcaucacuccaaauggaagcauucccaaugacaaaccauuucaaaauguaaacaggaucacauauggggccugucccagauauguuaagcaaaacacucugaaauuggcaacagggaugcgaaauguaccagagaaacaaacuagaggcauauuuggcgcaaucgcggguuucauagaaaaugguugggagggaaugguggaugguugguacgguuucaggcaucaaaauucugagggaacaggacaagcagcagaucucaaaagcacucaagcagcaaucaaccaaaucaaugggaagcugaauagguugaucgggaaaaccaacgagaaauuccaucagauugaaaaagaauucucagaaguagaagggagaauucaggaccucgagaaauauguugaggacacuaaaauagaucucuggucauacaacgcggagcuucuuguugcccuggagaaccaacauacaauugaucuaacugacucagaaaugaacaaacuguuugaaagaacaaaaaagcaacugagggaaaaugcugaggauaugggcaaugguuguuucaaaauauaccacaaaugugacaaugccugcauaggaucaaucagaaauggaacuuaugaccaugauguauacagagaugaagcauuaaacaaccgguuccagaucaaagguguugagcugaagucaggauacaaagauuggauccuauggauuuccuuugccauaucauguuuuuugcuuuguguugcuuuguugggguucaucaugugggccugccaaaaaggcaacauuaggugcaacauuugcauuuga

SEQ ID NO: 33210 - RNA, 1701 nt, Artificial Sequence; identical to SEQ ID NO: 33209
  derived and/or modified CDS sequence (wt) from hemagglutinin__InfluenzaA__ABI21101

SEQ ID NO: 33211 - RNA, 1701 nt, Artificial Sequence
  derived and/or modified CDS sequence (wt) from hemagglutinin__InfluenzaA__ABI21123
augaagacuaucauugcuuugagcuacauucuaugucugguuuucgcucaaaaacuucccggaaaugacaacagcacggcaacgcugugccuugggcaccaugcaguaccaaacggaacgauagugaaaacaaucacgaaugaccaaauugaaguuacuaaugcuacugagcugguucagaguuccucaacagguggaauaugcgacaguccucaucagauccuugauggagaaaacugcacacuaauagaugcucuauugggagacccucagugugauggcuuccaaaauaagaaaugggaccuuuuuguugaacgcagcaaagccuacagcaacuguuacccuuaugaugugccggauuaugccucccuuaggucacuaguugccucauccggcacacuggaguuuaacaaugaaagcuucaauuggacuggagucacucaaaauggaacaagcucugcuugcaaaaggagaucuaauaacaguuucuuuaguagauugaauugguugacccauuuaaaauucaaauacccagcauugaacgugacuaugccaaacaaugaaaaauuugacaaauuguacauuugggggguucaccacccggguacgaacaaugaccaaaucagccuauaugcucaagcaucaggaagaaucacagucucuaccaaaagaagccaacaaacuguaaucccgaauaucggaucuagacccaggguaagggauauccccagcagaauaagcaucuauuggacaauaguaaaaccgggagacauacuuuugauuaacagcacagggaaucuaauugcuccucgggguuacuucaaaauacgaagugggaaaagcucaauaaugagaucagaugcacccauuggcaaaugcaauucugaaugcaucacuccaaauggaagcauucccaaugacaaaccauuucaaaauguaaacaggaucacauauggggccugucccagauauguuaagcaaaacacucugaaauuggcaacagggaugcgaaauguaccagagaaacaaacuagaggcauauuuggcgcaaucgcggguuucauagaaaaugguugggagggaaugguggaugguugguacgguuucaggcaucaaaauucugagggaauaggacaagcagcagaucucaaaagcacucaagcagcaaucaaccaaaucaaugggaagcugaauagguugaucgggaaaaccaacgagaaauuccaucagauugaaaaagaauucucagaaguagaagggagaauucaggaccucgagaaacacguugaggacacuaaaauagaucucuggucauacaacgcggagcuucuuguugcccuggagaaccaacauacaauugaucuaacugacucagaaaugaacaaacuguuugaaagaacaaagaagcaacugagggaaaaugcugaggauaugggcaaugguuguuucaaaauauaccacaaaugugacaaugccugcauagggucaaucagaaauggaacuuaugaccaugauguauacagagaugaagcauuaaacaaccgguuccagaucaaagguguugagcugaagucaggauacaaagauuggauccuauggauuuccuuugccauaucauguuuuuugcuuuguguugcuuuguugggguucaucaugugggccugccaaaaaggcaacauuaggugcaacauuugcauuuga

SEQ ID NO: 33212 - RNA, 1701 nt, Artificial Sequence
  derived and/or modified CDS sequence (wt) from hemagglutinin__InfluenzaA__ABI21134
augaagacuaucauugcuuugagcuacauucuaugucugguuuucgcucaaaaacuucccggaaaugacaacagcacggcaacgcugugccuugggcaccaugcaguaccaaacggaacgguagugaaaacaaucacaaaugaccaaauugaaguuacuaaugcuacugagcugguucagaguuccucaacagguggaauaugcgacaguccucaucagauccuugauggagaaaacugcacacuaauggaugcucuauugggagacccucagugugauggcuuccaaaauaagaaaugggaccuuuuuguugaacgcagcaaagccuacagcaacuguuacccuuaugaugugccggauuaugccucccuuaggucacuaguugccucauccggcacacuggaguuuaacaaugaaagcuucaauuggacuggagucacucaaaauggaacaagcucugcuugcaaaaggagaucuaauaacaguuucuuuaguagauugaauugguugacccacuuaaaauucaaauacccagcauugaacgugacuaugccaaacaaugaaaaauuugacaaauuguacauuugggggguucaccacccggguacggacaaugaccaaaucagccuauaugcucaagcaucaggaagaaucacagucucuaccaaaagaagccaacaaacuguaaucccgaauaucggaucuagauccaggguaagggauauccccagcagaauaagcaucuauuggacaauaguaaaaccgggagacauacuuuugauuaacagcacagggaaucuaauugcuccucgggguuacuucaaaauacgaagugggaaaagcucaauaaugagaucagaugcacccauuggcaaaugcaauucugaaugcaucacuccaaauggaagcauucccaaugacaaaccauuucaaaauguaaacaggaucacauauggggccugucccagauauguuaagcaaaacacucugaaauuggcaacagggaugcgaaauguaccagagaaacaaacuagaggcauauuuggcgcaaucgcggguuucauagaaaaugguugggagggaaugguggaugguugguacgguuucaggcaucaaaauucugagggaacaggacaagcagcagaucucaaaagcacucaagcagcaaucaaccaaaucaaugggaagcugaauagguugaucgggaaaaccaacgagaaauuccaucagauugaaaaagaauucucagaaguagaagggagaauucaggaccucgagaaauauguugaggacacuaaaauagaucucuggucauacaacgcggagcuucuuguugcccuggagaaccaacauacaauugaucuaacugacucagaaaugaacaaacuguuugaaagaacaaaaaagcaacugagggaaaaugcugaggauaugggcaaugguuguuucaaaauauaccacaaaugugacaaugccugcauaggaucaaucagaaauggaacuuaugaccaugauguauacagagaugaagcauuaaacaaccgguuccagaucaaagguguugagcugaagucaggauacaaagauuggauccuauggauuuccuuugccauaucauguuuuuugcuuuguguugcuuuguugggguucaucaugugggccugccaaaaaggcaacauuaggugcaacauuugcauuuga

SEQ ID NO: 33213 - RNA, 1701 nt, Artificial Sequence; identical to SEQ ID NO: 32334
  derived and/or modified CDS sequence (wt) from hemagglutinin__InfluenzaA__ABI21156

SEQ ID NO: 33214 - RNA, 1701 nt, Artificial Sequence
  derived and/or modified CDS sequence (wt) from hemagglutinin__InfluenzaA__ABI21167
augaagacuaucauugcuuugggcuacauucuaugucugguuuucgcucaaaaacuucccggaaaugacaacagcacggcaacgcugugccuugggcaccaugcaguaccaaacggaacgauagugaaaacaaucacgaaugaccaaauugaaguuacuaaugcuacugagcugguucagaguuccucaacagguggaauaugcgacaguccucaucagauccuugauggagaaaacugcacacuaauagaugcucuauugggagacccucagugugauggcuuccaaaauaagaaaugggaccuuuuuguugaacgcagcaaagccuacagcaacuguuacccuuaugaugugccggauuaugccucccuuaggucacuaguugccucauccggcacacuggaguuuaacaaugaaagcuucaauuggacuggagucacucaaaauggaacaagcucugcuugcaaaaggagaucuaauaacaguuucuuuaguagauugaauugguugacccauuuaaaauucaaauacccagcauugaacgugacuaugccaaacaaugaaaaauuugacaaauuguacauuugggggguucaccacccggguacgaacaaugaccaaaucagccuauaugcucaagcaucaggaagaaucacagucucuaccaaaagaagccaacaaacuguaaucccgaauaucggaucuagacccaggguaagggauauccccagcagaauaagcaucuauuggacaauaguaaaaccgggagacauacuuuugauuaacagcacagggaaucuaauugcuccucgggguuacuucaaaauacgaagugggaaaagcucaauaaugagaucagaugcacccauuggcaaaugcaauucugaaugcaucacuccaaauggaagcauucccaaugacaaaccauuucaaaauguaaacaggaucacauauggggccugucccagauauguuaagcaaaacacucugaaauuggcaacagggaugcgaaauguaccagagaaacaaacuagaggcauauuuggcgcaaucgcggguuucauagaaaaugguugggagggaaugguggaugguugguacgguuucaggcaucaaaauucugagggaauaggacaagcagcagaucucaaaagcacucaagcagcaaucaaccaaaucaaugggaagcugaauagguugaucgggaaaaccaacgagaaauuccaucagauugaaaaagaauucucagaaguagaagggagaauucaggaccucgagaaauauguugaggacacuaaaauagaucucuggucauacaacgcggagcuucuuguugcccuggagaaccaacauacaauugaucuaacugacucagaaaugaacaaacuguuugaaagaacaaagaagcaacugagggaaaaugcugaggauaugggcaaugguuguuucaaaauauaccacaaaugugacaaugccugcauagggucaaucagaaauggaacuuaugaccaugaaguauacagagaugaagcauuaaacaaccgguuccagaucaaagguguugagcugaagucaggauacaaagauuggauccuauggauuuccuuugccauaucauguuuuuugcuuuguguugcuuuguugggguucaucaugugggccugccaaaaaggcaacauuaggugcaacauuugcauuuga

SEQ ID NO: 33215 - RNA, 1701 nt, Artificial Sequence
  derived and/or modified CDS sequence (wt) from hemagglutinin__InfluenzaA__ABI21178
augaagacuaucauugcuuugagcuacauucuaugucugguuuucgcucaaaaacuucccggaaaugacaacagcacggcaacgcugugccuugggcaccaugcaguaccaaacggaacgauagugaaaacaaucacgaaugaccaaauugaaguuacuaaugcuacugagcugguucagaguuccucaacagguggaauaugcgacaguccucaucagauccuugauggagaaaacugcacacuaauagaugcucuauugggagacccucagugugauggcuuccaaaauaagaaaugggaccuuuuuguugaacgcagcaaagccuacagcagcuguuacccuuaugaugugccggauuaugccucccuuaggucacuaguugccucauccggcacacuggaguuuaacaaugaaagcuucaauuggacuggagucacucaaaauggaacaagcucugcuugcaaaaggagaucuaauaacaguuucuuuaguagauugaauugguugacccauuuaaaauucaaauacccagcauugaacgugacuaugccaaacaaugaaaaauuugacaaauuguacauuugggggguucaccacccggguacgaacaaugaccaaaucagccuauaugcucaagcaucaggaagaaucacagucucuaccaaaagaagccaacaaacuguaaucccgaauaucggaucuagacccaggguaagggauauccccagcagaauaagcaucuauuggacaauaguaaaaccgggagacauacuuuugauuaacagcacagggaaucuaauugcuccucgggguuacuucaaaauacgaagugggaaaagcucaauaaugagaucagaugcacccauuggcaaaugcaauucugaaugcaucacuccaaauggaagcauucccaaugacaaaccauuucaaaauguaaacaggaucacauauggggccugucccagauauguuaagcaaaacacucugaaauuggcaacagggaugcgaaauguaccagagaaacaaacuagaggcauauuuggcgcaaucgcggguuucauagaaaaugguugggagggaaugguggaugguugguacgguuucaggcaucaaaauucugagggaauaggacaagcagcagaucucaaaagcacucaagcagcaaucaaccaaaucaaugggaagcugaauagguugaucgggaaaaccaacgagaaauuccaucagauugaaaaagaauucucagaaguagaagggagaauucaggaccucgagaaauauguugaggacacuaaaauagaucucuggucauacaacgcggagcuucuuguugcccuggagaaccaacauacaauugaucuaacugacucagaaaugaacaaacuguuugaaagaacaaagaagcaacugagggaaaaugcugaggauaugggcaaugguuguuucaaaauauaccacaaaugugacaaugccugcauagggucaaucagaaauggaacuuaugaccaugauguauacagagaugaagcauuaaacaaccgguuccagaucaaagguguugagcugaagucaggauacaaagauuggauccuauggauuuccuuugccauaucauguuuuuugcuuuguguugcuuuguugggguucaucaugugggccugccaaaaaggcaacauuaggugcaacauuugcauuuga

SEQ ID NO: 33216 - RNA, 1698 nt, Artificial Sequence
  derived and/or modified CDS sequence (wt) from hemagglutinin__InfluenzaA__ABI21200
augaaaguaaaacuacugguucuguuauguacauuuacagcuacauaugcagacacaauauguauaggcuaccaugccaacaacucgaccgacacuguugacacaguacuugagaagaaugugacagugacacacucugucaaccuacuugaggacagucacaauggaaaacuaugucuacuaaaaggaauagccccacuacaauuggguaauugcagcguugccggauggaucuuaggaaacccagaaugcgaauuacugauuuccaaggaaucaugguccuacauuguagaaacaccaaauccugagaauggaacauguuacccaggguauuucgccgacuaugaggagcugagggagcaauugaguucaguaucuucauuugagagguucgaaauauuccccaaagagagcucauggcccaaccacaccguaaccggaguaucagcaucaugcucccauaacgggaaaagcaguuuuuacaggaauuugcuauggcugacggggaagaaugguuuguauccaaaccugagcaaguccuaugcaaacaacaaagagaaagagguccuuguacugugggguguucaucacccgccuaacauaggggaccaaagggcccucuaucauacagaaaaugcuuaugucucuguagugucuucacauuauagcagaagauucaccccagaaauagccaaaagacccaaggugagagaucaggaaggaagaaucaacuacuacuggacucugcuggaacccggggauacaauaauauuugaggcaaauggaaaucuaauagcgccaagguuugcuuucgcacugaguagaggcuuuggaucaggaaucaucaccucaaaugcaccaauggaugaaugugaugcgaagugucaaacaccucagggagcuauaaacagcagucuuccuuuccagaauguacacccagucacaauaggagaguguccaaaguaugucaggagugcaaaauuaagaaugguuacaggacuaaggaacaucccauccauucaauccagagguuuguuuggagccauugccgguuucauugaagggggguggacuggaaugguagaugguugguaugguuaucaccaucagaaugagcaaggaucuggguaugcugcagaucaaaaaagcacacaaaaugccauuaacgggauuacaaacaaggugaauucuguaauugagaaaaugaacacucaauucacagcugugggcaaagaauucaacaaauuggaaagaaggauggaaaacuuaaauaaaaaaguugaugauggguuucuagacauuuggacauauaacgcagaauuguugguucuacuggaaaaugaaaggacuuuggacuuccaugacuccaacgugaagaaucuguaugagaaaguaaaaagccaauuaaagaauaaugccaaagaaauaggaaacggguguuuugaauucuaucacaaguguaacgaugaaugcauggagagugugaaaaauggaacuuaugacuauccaaaauauuccgaagaaucaaaguugaacagggagagaauugauggagugaaauuggaaucaaugggagucuaucagauucuggcgaucuacucaacagucgccaguucccugguucuuuuggucucccugggggcaaucagcuucuggauguguuccaaugggucuuugcaguguagaauaugcaucuaa

SEQ ID NO: 33217 - RNA, 1698 nt, Artificial Sequence
  derived and/or modified CDS sequence (wt) from hemagglutinin__InfluenzaA__ABI21211
augaaaguuaaacuacugguucuguuauguacauuuacagcuacauaugcagacacaauauguauaggcuaccaugccaacaacucgaccgacacuguugacacaguacuugagaagaaugugacagugacacacucugucaaccuacuugaggacagucacaauggaaaacuaugucuacuaaaaggaauagccccacuacaauuggguaauugcagcguugccggauggaucuuaggaaacccagaaugcgaauuacugauuuccaaggaaucaugguccuacauuguagaaacaccaaauccugagaauggaacauguuacccaggguauuucgccgacuaugaagagcugagggagcaauugaguucaguaucuucauuugagagguucgaaauauuccccaaagagagcucauggcccaaccacaccguaaccggaguaucagcaucaugcucccauaacgggaaaagcaguuuuuacagaaauuugcuauggcugacggggaagaaugguuuguauccaaaccugagcaaguccuaugcaaacaacaaagagaaagaaguccuuguacugugggguguucaucacccgccuaacauaggggaccaaagggcccucuaucauacagaaaaugcuuaugucucuguagugucuucacauuacagcagaagauucaccccagaaauagccaaaagacccaaggugagagaucaggaaggaagaaucaacuacuacuggacucugcuggaacccggggauacaauaauauuugaggcaaauggaaaucuaauagcgccaagguuugcuuucgcacugaguagaggcuuuggaucaggaaucaucaccucaaaugcaccaauggaugaaugugaugcgaagugucaaacaccucagggagcuauaaacagcagucuuccuuuccagaauguacacccagucacaauaggagaguguccaaaguaugucaggagugcaaaauuaagaaugguuacaggacuaaggaacaucccauccauucaauccagagguuuguuuggagcuauugccgguuucauugaagggggguggacuggaaugguagaugguugguaugguuaucaccaucagaaugagcaaggaucuggguaugcugcagaucaaaaaagcacacaaaaugccauuaacgggauuacaaacaaggugaauucuguaauugagaaaaugaacacucaauucacagcugugggcaaagaauucaacaaauuggaaagaaggauggaaaacuuaaauaaaaaaguugaugauggguuucuagacauuuggacauauaacgcagaauuguugguucuacuggaaaaugaaaggacuuuggacuuccaugacuccaacgugaagaaucuguaugagaaaguaaaaagccaauuaaagaauaaugccaaagaaauaggaaacggguguuuugaauucuaucacaaguguaacgaugaaugcauggagagugugaaaaauggaacuuaugacuauccaaaauauuccgaagaaucaaaguugaacagggagagaauugauggagugaaauuggaaucaaugggagucuaucagauucuggcgaucuacucaacagucgccaguucccugguucuuuuggucucccugggggcaaucagcuucuggauguguuccaaugggucuuugcaguguagaauaugcaucuaa

SEQ ID NO: 33218 - RNA, 1698 nt, Artificial Sequence
  derived and/or modified CDS sequence (wt) from hemagglutinin__InfluenzaA__ABI21233
augaaaguaaaacuacugguucuguuauguacauuuacagcuacauaugcagacacaauauguauaggcuaccaugccaacaacucgaccgacacuguugacacaguacuugagaagaaugugacagugacacacucugucaaccuacuugaggacagucacaauggaaaacuaugucuacuaaaaggaauagccccacuacaauuggguaauugcagcguugccggauggaucuuaggaaacccagaaugcgaauuacugauuuccaaggaaucaugguccuacauuguagaaacaccaaauccugagaauggaacauguuacccaggguauuucgccgacuaugaggagcugagggagcaauugaauucaguaucuucauuugagagguucgaaauauuccccaaagagagcucauggcccaaccacaccguaaccggaguaucagcaucaugcucccauaacgggaaaagcaguuuuuacaggaauuugcuauggcugacggggaagaaugguuuguauccaaaccugagcaaguccuaugcaaacaacaaagagaaagaaguccuuguacugugggguguucaucacccgccuaacauaggggaccaaagggcccucuaucauacagaaaaugcuuaugucucuguagugucuucacauuauagcagaagauucaccccagaaauagccaaaagacccaaggugagagaucaggaaggaagaaucaacuacuacuggacucugcuggaacccggggauacaauaauauuugaggcaaauggaaaucuaauagcgccaagguuugcuuucgcacugaguagaggcuuuggaucaggaaucaucaccucaaaugcaccaauggaugaaugugaugcgaagugucaaacaccucagggagcuauaaacagcagucuuccuuuccagaauguacacccagucacaauaggagaguguccaaaguaugucaggagugcaaaauuaagaaugguuacaggacuaaggaacaucccauccauucaauccagagguuuguuuggagccauugccgguuucauugaagggggguggacuggaaugguagaugguugguaugguuaucaccaucagaaugagcaaggaucuggguaugcugcagaucaaaaaagcacacaaaaugccauuaacgggauuacaaacaaggugaauucuguaauugagaaaaugaacacucaauucacagcugugggcaaagaauucaacaaauuggaaagaaggauggaaaacuuaaauaaaaaaguugaugauggguuucuagacauuuggacauauaacgcagaauuguugguucuacuggaaaaugaaaggacuuuggacuuccaugacuccaacgugaagaaucuguaugagaaaguaaaaagccaauuaaagaauaaugccaaagaaauaggaaacggguguuuugaauucuaucacaaguguaacgaugaaugcauggagagugugaaaaauggaacuuaugacuauccaaaauauuccgaagaaucaaaguugaacagggagagaauugauggagugaaauuggaaucaaugggagucuaucagauucuggcgaucuacucaacagucgccaguucccugguucuuuuggucucccugggggcaaucagcuucuggauguguuccaaugggucuuugcaguguagaauaugcaucuaa

SEQ ID NO: 33219 - RNA, 1701 nt, Artificial Sequence
  derived and/or modified CDS sequence (wt) from hemagglutinin__InfluenzaA__ABI21244
augaagacuaucauugcuuugagcuacauuuuaugucugguuuucgcucaaaaacuucccggaaaugacaacagcacagcaacgcugugccugggacaccaugcagugccaaacggaacgcuagugaaaacaaucacgaaugaucaaauugaagugacuaaugcuacugagcugguucagaguuccucaacagguagaauaugcgacaguccucaccgaauccuugauggaaaaaacugcacacugauagaugcucuauugggagacccucauugugauggcuuccaaaauaaggaaugggaccuuuuuguugaacgcagcaaagcuuacagcaacuguuacccuuaugaugugccggauuaugccucccuuaggucacuaguugccucaucaggcacccugaaguuuaucaaugaagacuucaauuggacuggagucgcucaggaugggaaaagcuaugcuugcaaaaggggaucuguuaacaguuucuuuaguagauugaauugguugcacaaauuagaauacaaauauccagcgcugaacgugacuaugccaaacaauggcaaauuugacaaauuguacauuugggggguucaccacccgagcacggacagugaccaaaccagccuauauguucgagcaucagggagagucacagucucuaccaaaagaagccaacaaacuguaaucccgaauaucgggucuagacccuggguaaggggucuguccaguagaauaagcaucuauuggacaauaguaaaaccgggagacauacuuuugauuaauagcacagggaaucuaauugcuccucgggguuacuucaaaauacgaagugggaaaagcucaauaaugaggucagaugcacccauuggcaacugcaguuccgaaugcaucacuccaaauggaagcauucccaaugacaaaccuuuucaaaauguaaacaggaucacauauggggccugccccagauauguuaagcaaaacacucugaaauuggcaacagggaugcggaauguaccagagaaacaaacuagaggcauauucggcgcaaucgcagguuucauagaaaaugguugggagggaaugguagacgguugguacgguuucaggcaucaaaauucugagggcacaggacaagcagcagaucuuaaaagcacucaagcagcaaucgaccaaaucaacgggaaacugaauagguuaaucgagaaaacgaacgagaaauuccaucaaaucgaaaaagaauucucagaaguagaagggagaauucaggaccucgagaaauauguugaagacacuaaaauagaucucuggucuuacaacgcggagcuucuuguugcccuggagaaccaacauacaauugaucuaacugacucagaaaugaacaaacuguuugaaagaacaaggaagcaacugagggaaaaugcugaggacaugggcaaugguugcuucaaaauauaccacaaaugugacaaugccugcauagggucaaucagaaauggaacuuaugaccaugauguauacagagacgaagcauuaaacaaccgguuccagaucaaagguguugagcugaagucaggauacaaagauuggauccuauggauuuccuuugccauaucaugcuuuuugcuuuguguuguuuugcuaggguucaucaugugggccugccaaaaaggcaacauuaggugcaacauuugcauuuga

SEQ ID NO: 33220 - RNA, 1701 nt, Artificial Sequence
  derived and/or modified CDS sequence (wt) from hemagglutinin__InfluenzaA__ABI21255
augaagacuaucauugcuuugagcuacauuuuaugucugguuuucgcucaaaaacuucccggaaaugacaacagcacagcaacgcugugccuaggacaccaugcagugccaaacggaacgcuagugaaaacaaucacgaaugaucaaauugaagugacuaaugcuacugagcugguucagaguuccucaacagguagaauaugcgacaguccucaccgaauccuugauggaaaaaacugcacacugauagaugcucuauugggagacccucauugugauggcuuccaaaauaaggaaugggaccuuuuuguugaacgcagcaaagcuuacagcaacuguuacccuuaugaugugccggauuaugccucccuuaggucacuaguugccucaucaggcacccuggaguuuaucaaugaagacuucaauuggacuggagucgcucaggaugggaaaagcuaugcuugcaaaaggggaucuguuaacaguuucuuuaguagauugaauugguugcacaaauuagaauacaaauauccagcgcugaacgugacuaugccaaacaauggcaaauuugacaaauuguacauuugggggguucaccacccgagcacggacagugaccaaaccagccuauauguucgagcaucagggagagucacagucucuaccaaaagaagccaacaaacuguaaucccgaauaucgggucuagacccuggguaaggggucuguccaguagaauaagcaucuauuggacaauaguaaaaccgggagacauacuuuugauuaauagcacagggaaucuaauugcuccucgggguuacuucaaaauacgaaaugggaaaagcucaauaaugaggucagaugcacccauuggcaacugcaguuccgaaugcaucacuccaaauggaagcauucccaaugacaaaccuuuucaaaauguaaacaggaucacauauggggccugccccagauauguuaagcaaaacacucugaaauuggcaacagggaugcggaauguaccagagaaacaaacuagaggcauauucggcgcaaucgcagguuucauagaaaaugguugggagggaaugguagacgguugguacgguuucaggcaucaaaauucugagggcacaggacaagcagcagaucuuaaaagcacucaagcagcaaucgaccaaaucaacgggaaacugaauagguuaaucgagaaaacgaacgagaaauuccaucaaaucgaaaaagaauucucagaaguagaagggagaauucaggaccucgagaaauauguugaagacacuaaaauagaucucuggucuuacaacgcggagcuucuuguugcccuggagaaccaacauacaauugaucuaacugacucagaaaugaacaaacuguuugaaagaacaaggaagcaacugagggaaaaugcugaggacaugggcaaugguugcuucaaaauauaccacaaaugugacaaugccugcauagggucaaucagaaauggaacuuaugaccaugauguauacagagacgaagcauuaaacaaccgguuccagaucaaagguguugagcugaagucaggauacaaagauuggauccuauggauuuccuuugccauaucaugcuuuuugcuuuguguuguuuugcugggguucaucaugugggccugccaaaaaggcaacauuaggugcaacauuugcauuuga

SEQ ID NO: 33221 - RNA, 1701 nt, Artificial Sequence; identical to SEQ ID NO: 33067
  derived and/or modified CDS sequence (wt) from hemagglutinin__InfluenzaA__ABI21266

SEQ ID NO: 33222 - RNA, 1701 nt, Artificial Sequence; identical to SEQ ID NO: 33067
  derived and/or modified CDS sequence (wt) from hemagglutinin__InfluenzaA__ABI21277

SEQ ID NO: 33223 - RNA, 1701 nt, Artificial Sequence
  derived and/or modified CDS sequence (wt) from hemagglutinin__InfluenzaA__ABI21299
augaagacuaucauugcuuugagcuacauuuuaugucugguuuucgcucaaaaacuucccggaaaugacaacagcacagcaacgcugugccugggacaccaugcagugccaaacggaacgcuagugaaaacaaucacgaaugaucaaauugaagugacuaaugcuacugagcugguucagaguuccucaacagguagaauaugcgacaguccucaccgaauccuugauggaaaaaacugcacacugauagaugcucuauugggagacccucauugugauggcuuccaaaauaaggaaugggaccuuuuuguugaacgcagcaaagcuuacagcaacuguuacccuuaugaugugccggauuaugccucccuuaggucacuaguugccucaucaggcacccuggaguuuaucaaugaagacuucaauuggacuggagucgcucaggaugggaaaagcuaugcuugcaaaaggggaucuguuaacaguuucuuuaguagauugaauugguugcacaaauuagaauacaaauauccagcgcugaacgugacuaugccaaacaaugacaaauuugacaaauuguacauuugggggguucaccacccgagcacggacagugaccaaaccagccuauauguucgagcaucagggagagucacagucucuaccaaaagaagucaacaaacuguaaucccgaauaucgggucuagacccuggguaaggggucuguccaguagaauaagcaucuauuggacaauaguaaaaccgggagacauacuuuugauuaauagcacagggaaucuaauugcuccucgggguuacuucaaaauacgaaaugggaaaagcucaauaaugaggucagaugcacccauuggcaacugcaguucugaaugcaucacuccaaauggaagcauucccaaugacaaaccuuuucaaaauguaaacaggaucacauauggggccugccccagauauguuaagcaaaacacucugaaauuggcaacagggaugcggaauguaccagagaaacaaacuagaggcauauucggcgcaaucgcagguuucauagagaaugguugggagggaaugguagacgguugguacgguuucaggcaucaaaauucugagggcacaggacaagcagcagaucuuaaaagcacucaagcagcaaucgaccaaaucaacgggaaacugaauagguuaaucgagaaaacgaacgagaaauuccaucaaaucgaaaaagaauucucagaaguagaagggagaauucaggaccucgagaaauauguugaagacacuaaaauagaucucuggucuuacaacgcggagcuucuuguugcccuggagaaccaacauacaauugaucuaacugacucagaaaugaacaaacuguuugaaagaacaaggaagcaacugagggaaaaugcugaggacaugggcaaugguugcuucaaaauauaccacaaaugugacaaugccugcauagggucaaucagaaauggaacuuaugaccaugauguauacagagacgaagcauuaaacaaccgguuccagaucaaagguguugagcugaagucaggauacaaagauuggauccuauggauuuccuuugccauaucaugcuuuuugcuuuguguuguuuugcugggguucaucaugugggccugccaaaaaggcaacauuaggugcaacauuugcauuuga

SEQ ID NO: 33224 - RNA, 1701 nt, Artificial Sequence; identical to SEQ ID NO: 33065
  derived and/or modified CDS sequence (wt) from hemagglutinin__InfluenzaA__ABI21310

SEQ ID NO: 33225 - RNA, 1701 nt, Artificial Sequence
  derived and/or modified CDS sequence (wt) from hemagglutinin__InfluenzaA__ABI21321
augaagacuaucauugcuuugagcuacauuuuaugucugguuuucgcucaaaaacuucccggaaaugacaacagcacagcaacgcugugccugggacaccaugcagugccaaacggaacgcuagugaaaacaaucacgaaugaucaaauugaagugacuaaugcuacugagcugguucagaguuccucaacagguagaauaugcgacaguccucaccgaauccuugauggaaaaaacugcacacugauagaugcucuauugggagacccucauugugauggcuuccaaaauaaggaaugggaccuuuuuguugaacgcagcaaagcuuacagcaacuguuacccuuaugaugugccggauuaugccucccuuaggucacuaguugccucaucaggcacccuagaguuuaucaaugaagacuucaauuggacuggaguagcucaggaugggaaaagcuaugcuugcaaaaggggaucuguuaacaguuucuuuaguagauugaauugguugcacaaauuagaauacaaauauccagcgcugaacgugacuaugccaaacaauggcaaauuugacaaauuguacauuugggggguucaccacccgagcacggacagugaccaaaccagccuauauguucgagcaucagggagagucacagucucuaccaaaagaagccaacaaacuguaaucccgaauaucgggucuagacccuggguaaggggucuguccaguagaauaagcaucuauuggacaauaguaaaaccgggagacauacuuuugauuaauagcacagggaaucuaauugcuccucgggguuacuucaaaauacgaaaugggaaaagcucaauaaugaggucagaugcacccauuggcaacugcaguucugaaugcaucacuccaaauggaagcauucccaaugacaaaccuuuucaaaauguaaacaggaucacauauggggccugccccagauauguuaagcaaaacacucugaaauuggcaacagggaugcggaauguaccagagaaacaaacuagaggcauauucggcgcaaucgcagguuucauagaaaaugguugggagggaaugguagacgguugguacgguuucaggcaucaaaauucugagggcacaggacaagcagcagaucuuaaaagcacucaagcagcaaucgaccaaaucaacgggaaacugaauagguuaaucgagaaaacgaacgagaaauuccaucaaaucgaaaaagaauucucagaaguagaagggagaauucaggaccucgagaaauauguugaagacacuaaaauagaucucuggucuuacaacgcggagcuucuuguugcccuggagaaccaacauacaauugaucuaacugacucagaaaugaacaaacuguuugaaaaaacaaggaagcaacugagggaaaaugcugaggacaugggcaaugguugcuucaaaauauaccacaaaugugacaaugccugcauagggucaaucagaaauggaacuuaugaccaugauguauacagagacgaagcauuaaacaaccgguuccagaucaaagguguugagcugaagucaggauacaaagauuggauccuauggauuuccuuugccauaucaugcuuuuugcuuuguguuguuuugcugggguucaucaugugggccugccaaaaaggcaacauuaggugcaacauuugcauuuga

SEQ ID NO: 33226 - RNA, 1701 nt, Artificial Sequence
  derived and/or modified CDS sequence (wt) from hemagglutinin__InfluenzaA__ABI21332
augaagacuaucauugcuuugagcuacauuuuaugucugguuuucgcucaaaaacuucccggaaaugacaacagcacagcaacgcugugccugggacaccaugcagugccaaacggaacgcuagugaaaacaaucacgaaugaucaaauugaagugacuaaugcuacugagcugguucagaguuccucaacagguagaauaugcgacaguccucaccgaauccuugauggaaaaaacugcacacugauagaugcucuauugggagacccucauugugauggcuuccaaaauaaggaaugggaccuuuuuguugaacgcagcaaagcuuacagcaacuguuacccuuaugaugugccggauuaugccucccuuaggucacuaguugccucaucaggcacccuagaguuuaucaaugaagacuucaauuggacuggaguagcucaggaugggaaaagcuaugcuugcaaaaggggaucuguuaacaguuucuuuaguagauugaauugguugcacaaauuagaauacaaauauccagcgcugaacgugacuaugccaaacaauggcaaauuugacaaauuguacauuugggggguucaccacccgagcacggacagugaccaaaccagccuauauguucaagcaucagggagagucacagucucuaccaaaagaagccaacaaacuguaaucccgaauaucgggucuagacccuggguaaggggucuguccaguagaauaagcaucuauuggacaauaguaaaaccgggagacauacuuuugauuaauagcacagggaaucuaauugcuccucgggguuacuucaaaauacgaaaugggaaaagcucaauaaugaggucagaugcacccauuggcaacugcaguucugaaugcaucacuccaaauggaagcauucccaaugacaaaccuuuucaaaauguaaacaggaucacauauggggccugccccagauauguuaagcaaaacacucugaaauuggcaacagggaugcggaauguaccagagaaacaaacuagaggcauauucggcgcaaucgcagguuucauagaaaaugguugggagggaaugguagacgguugguacgguuucaggcaucaaaauucugagggcacaggacaagcagcagaucuuaaaagcacucaagcagcaaucgaccaaaucaacgggaaacugaauagguuaaucgagaaaacgaacgagaaauuccaucaaaucgaaaaagaauucucagaaguagaagggagaauucaggaccucgagaaauauguugaagacacuaaaauagaucucuggucuuacaacgcggagcuucuuguugcccuggagaaccaacauacaauugaucuaacugacucagaaaugaacaaacuguuugaaagaacaaggaagcaacugagggaaaaugcugaggacaugggcaaugguugcuucaaaauauaccacaaaugugacaaugccugcauagggucaaucagaaauggaacuuaugaccaugauguauacagagacgaagcguuaaacaaccgguuccagaucaaagguguugagcugaagucaggauacaaagauuggauccuauggauuuccuuugccauaucaugcuuuuugcuuuguguuguuuugcugggguucaucaugugggccugccaaaaaggcaacauuaggugcaacauuugcauuuga

SEQ ID NO: 33227 - RNA, 1701 nt, Artificial Sequence
  derived and/or modified CDS sequence (wt) from hemagglutinin__InfluenzaA__ABI21343
augaagacuaucauugcuuugagcuacauuuuaugucugguuuucgcucaaaaacuucccggaaaugacaacagcacagcaacgcugugccugggacaccaugcagugccaaacggaacgcuagugaaaacaaucacgaaugaucaaauugaagugacuaaugcuacugagcugguucagaguuccucaacagguagaauaugcgacaguccucaccgaauccuugauggaaaaaacugcacacugauagaugcucuauugggagacccucauugugauggcuuccaaaauaaggaaugggaccuuuuuguugaacgcagcaaagcuuacagcaacuguuacccuuaugaugugccggauuaugccucccuuaggucacuaguugccucaucaggcacccuggaguuuaucaaugaagacuucaauuggacuggagucgcucaggaugggaaaagcuaugcuugcaaaaggggaucuguuaacaguuucuuuaguagauugaauugguugcacaaauuagaguacaaauauccagcgcugaacgugacuaugccaaacaauggcaaauuugacaaauuguacauuugggggguucaccacccgagcacggacagugaccaaaccagccuauauguucgagcaucagggagagucacagucucuaccaaaagaagccaacaaacuguaaucccgaauaucgggucuagacccuggguaaggggucuguccaguagaauaagcaucuauuggacaauaguaaaaccgggagacauacuuuugauuaauagcacagggaaucuaauugcuccucgggguuacuucaaaauacgaaaugggaaaagcucaauaaugaggucagaugcacccauuggcaacugcaguuccgaaugcaucacuccaaauggaagcauucccaaugacaaaccuuuucaaaauguaaacaggaucacauauggggccugccccagauauguuaagcaaaacacucugaaauuggcaacagggaugcggaauguaccagagaaacaaacuagaggcauauucggcgcaaucgcagguuucauagaaaaugguugggagggaaugguagacgguugguacgguuucaggcaucaaaauucugagggcacaggacaagcagcagaucuuaaaagcacucaagcagcaaucgaccaaaucaacgggaaacugaauagguuaaucgagaaaacgaacgagaaauuccaucaaaucgaaaaagaauucucagaaguagaagggagaauucaggaccucgagaaauauguugaagacacuaaaauagaucucuggucuuacaacgcggagcuucuuguugcccuggagaaccaacauacaauugaucuaacugacucagaaaugaacaaacuguuugaaagaacaaggaagcaacugagggaaaaugcugaggacaugggcaaugguugcuucaaaauauaccacaaaugugacaaugccugcauagggucaaucagaaauggaacuuaugaccaugauguauacagagacgaagcauuaaacaaccgguuccagaucaaagguguugagcugaagucaggauacaaagauuggauccuauggauuuccuuugccauaucaugcuuuuugcuuuguguuguuuugcugggguucaucaugugggccugccaaaaaggcaacauuaggugcaacauuugcauuuga

SEQ ID NO: 33228 - RNA, 1701 nt, Artificial Sequence
  derived and/or modified CDS sequence (wt) from hemagglutinin__InfluenzaA__ABI21354
augaagacuaucauugcuuugagcuacauuucaugucugguuuucgcucaaaaacuucccggaaaugacaacagcacagcaacgcugugccugggacaccaugcagugccaaacggaacgcuagugaaaacaaucacgaaugaucaaauugaagugacuaaugcuacugagcugguucagaguuccucaacagguagaauaugcgacaguccucaccgaauccuugauggaaaaaacugcacacugauagaugcucuauugggagacccucauugugauggcuuccaaaauaaggaaugggaccuuuuuguugaacgcagcaaagcuuacagcaacuguuacccuuaugaugugccggauuaugccucccuuaggucacuaguugccucaucaggcacccuagaguuuaucaaugaagacuucaauuggacuggaguagcucaggaugggaaaagcuaugcuugcaaaaggggaucuguuaacaguuucuuuaguagauugaauugguugcacaaauuagaauacaaauauccagcgcugaacgugacuaugccaaacaauggcaaauuugacaaauuguacauuugggggguucaccacccgagcacggacagugaccaaaccagccuauauguucgagcaucagggagagucacagucucuaccaaaagaagccaacaaacuguaaucccgaauaucgggucuagacccuggguaaggggucuguccaguagaauaagcaucuauuggacaauaguaaaaccgggagacauacuuuugauuaauagcacagggaaucuaauugcuccucgggguuacuucaaaauacgaaaugggaaaagcucaauaaugaggucagaugcacccauuggcaacugcaguucugaaugcaucacuccaaauggaagcauucccaaugacaaaccuuuucaaaauguaaacaggaucacauauggggccugccccagauauguuaagcaaaacacucugaaauuggcaacagggaugcggaauguaccagagaaacaaacuagaggcauauucggcgcaaucgcagguuucauagaaaaugguugggagggaaugguagacgguugguacgguuucaggcaucaaaauucugagggcacaggacaagcagcagaucuuaaaagcacucaagcagcaaucgaccaaaucaacgggaaacugaauagguuaaucgagaaaacgaacgagaaauuccaucaaaucgaaaaagaauucucagaaguagaagggagaauucaggaccucgagaaauauguugaagacacuaaaauagaucucuggucuuacaacgcggagcuucuuguugcccuggagaaccaacauacaauugaucuaacugacucagaaaugaacaaacuguuugaaagaacaaggaagcaacugagggaaaaugcugaggacaugggcaaugguugcuucaaaauauaccacaaaugugacaaugccugcauagggucaaucagaaauggaacuuaugaccaugauguauacagagacgaagcauuaaacaaccgguuccagaucaaagguguugagcugaagucaggauacaaagauuggauccuauggauuuccuuugccauaucaugcuuuuugcuuuguguuguuuugcugggguucaucaugugggccugccaaaaaggcaacauuaggugcaacauuugcauuuga

SEQ ID NO: 33229 - RNA, 1701 nt, Artificial Sequence
  derived and/or modified CDS sequence (wt) from hemagglutinin__InfluenzaA__ABI21365
augaagacuaucauugcuuugagcuacauuuuaugucugguuuucgcucaaaaacuucccggaaaugacaacagcacagcaacgcugugccugggacaccaugcagugccaaacggaacgcuagugaaaacaaucacgaaugaucaaauugaagugacuaaugcuacugagcugguucagaguuccucaacagguagaauaugcgacaguccucaccgaauccuugauggaaaaaacugcacacugauagaugcucuauugggagacccucauugugauggcuuccaaaauaaggaaugggaccuuuuuguugaacgcagcaaagcuuacagcaacuguuacccuuaugaugugccggauuaugccucccuuaggucacuaguugccucaucaggcacccuggaguuuaucaaugaagacuucaauuggacuggagucgcucaggaugggaaaagcuaugcuugcaaaaggggaucuguuaacaguuucuuuaguagauugaauugguugcacaaauuagaauacaaauauccagcgcugaacgugacuaugccaaacaauggcaaauuugacaaauuguacauuugggggguucaccacccgagcacggacagugaccaaaccagccuauauguucgagcaucagggagagucacagucucuaccaaaagaagccaacaaacuguaaucccgaauaucgggucuagacccuggguaaggggucuguccaguagaauaagcaucuauuggacaauaguaaaaccgggagacauacuuuugauuaauagcacagggaaucuaauugcuccucgggguuacuucaaaauacgaaaugggaaaagcucaauaaugaggucagaugcacccauuggcaacugcaguucugaaugcaucacuccaaauggaagcauucccaaugacaaaccuuuucaaaauguaaacaggaucacauauggggccugccccagauauguuaagcaaaacacucugaaauuggcaacagggaugcggaauguaccagagaaacaaacuagaggcauauucggcgcaaucgcagguuucauagaaaaugguugggagggaaugguagacgguugguacgguuucaggcaucaaaauucugagggcacaggacaagcagcagaucuuaaaagcacucaagcagcaaucgaccaaaucaacgggaaacugaauagguuaaucgagaaaacgaacgagaaauuccaucaaaucgaaaaagaauucucagaaguagaagggagaauucaggaccucgagaaauauguugaagacacuaaaauagaucucuggucuuacaacgcggagcuucuuguugcccuggagaaccaacauacaauugaucuaacugacucagaaauggacaaacuguuugaaagaacaaggaagcaacugagggaaaaugcugaggacaugggcaaugguugcuucaaaauauaccacaaaugugacaaugccugcauagggucaaucagaaauggaacuuaugaccaugauguauacagagacgaagcauuaaacaaccgguuccagaucaaagguguugagcugaagucaggauacaaagauuggauccuauggauuuccuuugccauaucaugcuuuuugcuuuguguuguuuugcugggguucaucaugugggccugccaaaaaggcaacauuaggugcaacauuugcauuuga

SEQ ID NO: 33230 - RNA, 1701 nt, Artificial Sequence
  derived and/or modified CDS sequence (wt) from hemagglutinin__InfluenzaA__ABI21376
augaagacuaucauugcuuugagcuacauuuuaugucugguuuucgcucaaaaacuucccggaaaugacaacagcacagcaacgcugugccugggacaccaugcagugccaaacggaacgcuagugaaaacaaucacgaaugaucaaauugaagugacuaaugcuacugagcugguucagaguuccucaacagguagaauaugcgacaguccucaccgaauccuugauggaaaaaacugcacacugauagaugcucuauugggagacccucauugugauggcuuccaaaauaaggaaugggaccuuuuuguugaacgcagcaaagcuuacagcaacuguuacccuuaugaugugccggauuaugccucccuuaggucacuaguugccucaucaggcacccuggaguuuaucaaugaagacuucaauuggacuggagucgcucaggaugggaaaagcuauucuugcaaaaggggaucuguuaacaguuucuuuaguagauugaauugguugcacaaauuagaauacaaauauccagcgcugaacgugacuaugccaaacaaugacaaauuugacaaauuguacauuugggggguucaccacccgagcacggacagugaccaaaccagccuauauguucgagcaucagggagagucacagucucuaccaaaagaagucaacaaacuguaaucccgaauaucgggucuagacccuggguaaggggucuguccaguagaauaagcaucuauuggacaauaguaaaaccgggagacauacuuuugauuaauagcacagggaaucuaauugcuccucgggguuacuucaaaauacgaaaugggaaaagcucaauaaugaggucagaugcacccauuggcaacugcaguucugaaugcaucacuccaaauggaagcauucccaaugacaaaccuuuucaaaauguaaacaggaucacauauggggccugccccagauauguuaagcaaaacacucugaaauuggcaacagggaugcggaauguaccagagaaacaaacuagaggcauauucggcgcaaucgcagguuucauagagaaugguugggagggaaugguagacgguugguacgguuucaggcaucaaaauucugagggcacaggacaagcagcagaucuuaaaagcacucaagcagcaaucgaccaaaucaacgggaaacugaauagguuaaucgagaaaacgaacgagaaauuccaucaaaucgaaaaagaauucucagaaguagaagggagaauucaggaccucgagaaauauguugaagacacuaaaauagaucucuggucuuacaacgcggagcuucuuguugcccuggagaaccaacauacaauugaucuaacugacucagaaaugaacaaacuguuugaaagaacaaggaagcaacugagggaaaaugcugaggacaugggcaaugguugcuucaaaauauaccacaaaugugacaaugccugcauagggucaaucagaaauggaacuuaugaccaugauguauacagagacgaagcauuaaacaaccgguuccagaucaaagguguugagcugaagucaggauacaaagauuggauccuauggauuuccuuugccauaucaugcuuuuugcuuuguguuguuuugcugggguucaucaugugggccugccaaaaaggcaacauuaggugcaacauuugcauuuaa

SEQ ID NO: 33231 - RNA, 1701 nt, Artificial Sequence; identical to SEQ ID NO: 33065
  derived and/or modified CDS sequence (wt) from hemagglutinin__InfluenzaA__ABI21387

SEQ ID NO: 33232 - RNA, 1701 nt, Artificial Sequence
  derived and/or modified CDS sequence (wt) from hemagglutinin__InfluenzaA__ABI21398
augaagacuaucauugcuuugagcuacauuuuaugucugguuuucgcucaaaaacuucccggaaaugacaacagcacagcaacgcugugccugggacaccaugcagugccaaacggaacgcuagugaaaacaaucacgaaugaucaaauugaagugacuaaugcuacugagcugguucagaguuccucaacagguagaauaugcgacaguccucaccgaauccuugauggaaaaaacugcacacugauagaugcucuauugggagacccucauugugauggcuuccaaaauaaggaaugggaccuuuuuguugaacgcagcaaagcuuacagcaacuguuacccuuaugaugugccggauuaugccucccuuaggucacuaguugccucaucaggcacccuggaguuugucaaugaagacuucaauuggacuggagucgcucaggaugggaaaagcuaugcuugcaaaaggggaucuguuaacaguuucuuuaguagauugaauugguugcacaaauuagaauacaaauauccagcgcugaacgugacuaugccaaacaauggcaaauuugacaaauuguacauuugggggguucaccacccgagcacggacagugaccaaaccagccuauauguucgagcaucagggagagucacagucucuaccaaaagaagccaacaaacuguaaucccgaauaucgggucuagacccuggguaaggggucuguccaguagaauaagcaucuauuggacaauaguaaaaccgggagacauacuuuugauuaauagcacagggaaucuaauugcuccucgggguuacuucaaaauacgaaaugggaaaagcucaauaaugaggucagaugcacccauuggcaacugcaguuccgaaugcaucacuccaaauggaagcauucccaaugacaaaccuuuucaaaauguaaacaggaucacauauggggccugccccagauauguuaagcaaaacacucugaaauuggcaacagggaugcggaauguaccagagaaacaaacuagaggcauauucggcgcaaucgcagguuucauagaaaaugguugggagggaaugguagacgguugguacgguuucaggcaucaaaauucugagggcacaggacaagcagcagaucuuaaaagcacucaagcagcaaucgaccaaaucaacgggaaacugaauagguuaaucgagaaaacgaacgagaaauuccaucaaaucgaaaaagaauucucagaaguagaagggagaauucaggaccucgagaaauauguugaagacacuaaaauagaucucuggucuuacaacgcggagcuucuuguugcccuggagaaccaacauacaauugaucuaacugacucagaaaugaacaaacuguuugaaagaacaaggaagcaacugagggaaaaugcugaggacaugggcaaugguugcuucaaaauauaccacaaaugugacaaugccugcauagggucaaucagaaauggaacuuaugaccaugauguauacagagacgaagcauuaaacaaccgguuccagaucaaagguguugagcugaagucaggauacaaagauuggauccuauggauuuccuuugccauaucaugcuuuuugcuuuguguuguuuugcugggguucaucaugugggccugccaaaaaggcaacauuaggugcaacauuugcauuuga

SEQ ID NO: 33233 - RNA, 1701 nt, Artificial Sequence
  derived and/or modified CDS sequence (wt) from hemagglutinin__InfluenzaA__ABI21409
augaagacuaucauugcuuugagcuacauuuuaugucugguuuucgcucaaaaacuucccggaaaugacaacagcacagcaacgcugugccugggacaccaugcagugccaaacggaacgcuagugaaaacaaucacgaaugaucaaauugaagugacuaaugcuacugagcugguucagaguuccucaacagguagaauaugcgacaguccucaccgaauccuugauggaaaaaacugcacacugauagaugcucuguugggagacccucauugugauggcuuccaaaauaaggaaugggaccuuuuuguugaacgcagcaaagcuuacagcaacuguuacccuuaugaugugccggauuaugccucccuuaggucacuaguugccucaucaggcacccuagaguuuaucaaugaagacuucaauuggacuggaguagcucaggaugggaaaagcuaugcuugcaaaaggggaucuguuaacaguuucuuuaguagauugaauugguugcacaaauuagaauacaaauauccagcgcugaacgugacuaugccaaacaauggcaaauuugacaaauuguacauuugggggguucaccacccgagcacggacagugaccaaaccagccuauauguucgagcaucagggagagucacagucucuaccaaaagaagccaacaaacuguaaucccgaauaucgggucuagacccuggguaaggggucuguccaguagaauaagcaucuauuggacaauaguaaaaccgggagacauacuuuugauuaauagcacagggaaucuaauugcuccucgggguuacuucaaaauacgaaaugggaaaagcucaauaaugaggucagaugcacccauuggcaacugcaguucugaaugcaucacuccaaauggaagcauucccaaugacaaaccuuuucaaaauguaaacaggaucacauauggggccugccccagauauguuaagcaaaacacucugaaauuggcaacagggaugcggaauguaccagagaaacaaacuagaggcauauucggcgcaaucgcagguuucauagaaaaugguugggagggaaugguagacgguugguacgguuucaggcaucaaaauucugagggcacaggacaagcagcagaucuuaaaagcacucaagcagcaaucgaccaaaucaacgggaaacugaauagguuaaucgagaaaacgaacgagaaauuccaucaaaucgaaaaagaauucucagaaguagaagggagaauucaggaccucgagaaauauguugaagacacuaaaauagaucucuggucuuacaacgcggagcuucuuguugcccuggagaaccaacauacaauugaucuaacugacucagaaaugaacaaacuguuugaaagaacaaggaagcaacugagggaaaaugcugaggacaugggcaaugguugcuucaaaauauaccacaaaugugacaaugccugcauagggucaaucagaaauggaacuuaugaccaugauguauacagagacgaagcauuaaacaaccgguuccagaucaaagguguugagcugaagucaggauacaaagauuggauccuauggauuuccuuugccauaucaugcuuuuugcuuuguguuguuuugcugggguucaucaugugggccugccaaaaaggcaacauuaggugcaacauuugcauuuga

SEQ ID NO: 33234 - RNA, 1701 nt, Artificial Sequence
  derived and/or modified CDS sequence (wt) from hemagglutinin__InfluenzaA__ABI21420
augaagacuaucauugcuuugagcuacauuuuaugucugguuuucacucaaaaacuucccggaaaugacaacagcacagcaacgcugugccugggacaucaugcagugccaaacggaacgcuagugaaaacaaucacgaaugaucaaauugaagugacuaaugcuacugagcugguucagaguuccucaacagguagaauaugcgacaguccucaccgaauccuugauggaaaaaacugcacacugauagaugcucuauugggagacccucauugugauggcuuccaaaauaaggaaugggaccuuuuuguugaacgcagcaaagcuuacagcaacuguuacccuuaugaugugccggauuaugccucccuuaggucacuaguugccucaucaggcacccuggaguuuaucaaugaagacuucaauuggacuggagucgcucaggaugggggaagcuauucuugcaaaaggggaucuguuaacaguuucuuuaguagauugaauugguugcacaaauuagaauacaaauauccagcgcugaacgugacuaugccaaacaauggcaaauuugacaaauuguacauuugggggguucaccacccgagcacggacagugaccaaaccagccuauauguucgagcaucagggagagucacagucucuaccaaaagaagccaacaaacuguaaucccgaauaucgggucuagacccuggguaaggggucuguccaguagaauaagcaucuauuggacaauaguaaaaccgggagacauacuuuugauuaauagcacagggaaucuaauugcuccucgggguuacuucaaaauacgaaaugggaaaagcucaauaaugagaucagaugcacccauuggcaacugcaguucugaaugcaucacuccaaauggaagcauucccaaugacaaaccuuuucaaaauguaaacaggaucacauauggggccugccccagauauguuaagcaaaacacucugaaauuggcaacagggaugcggaauguaccagagaaacaaacuagaggcauauucggcgcaaucgcagguuucauagaaaaugguugggagggaaugguagacgguugguacgguuucaggcaucagaauucugagggcacaggacaagcagcagaucuuaaaagcacucaagcagcaaucgaccaaaucaacgggaaacugaauagguuaaucgagaaaacgaacgagaaauuccaucaaaucgaaaaagaauucucagaaguagaagggagaauucaggaccucgagaaauauguugaagacacuaaaauagaucucuggucuuacaacgcggagcuucuuguugcccuggagaaccaacauacaauugaucuaacugacucagaaaugaacaaacuguuugaaagaacaaggaagcaacugagggaaaaugcugaggacaugggcaaugguugcuucaaaauauaccacaaaugugauaaugccugcauagggucaaucagaaauggaacuuaugaccaugauguauacagagacgaagcauuaaacaaccgguuccagaucaaaaguguugagcugaagucaggauacaaagauuggauccuauggauuuccuuugccauaucaugcuuuuugcuuuguguuguuuugcugggguucaucaugugggccugccaaaaaggcaacauuaggugcaacauuugcauuuga

SEQ ID NO: 33235 - RNA, 1701 nt, Artificial Sequence; identical to SEQ ID NO: 33065
  derived and/or modified CDS sequence (wt) from hemagglutinin__InfluenzaA__ABI21431

SEQ ID NO: 33236 - RNA, 1701 nt, Artificial Sequence; identical to SEQ ID NO: 33067
  derived and/or modified CDS sequence (wt) from hemagglutinin__InfluenzaA__ABI21442

SEQ ID NO: 33237 - RNA, 1701 nt, Artificial Sequence; identical to SEQ ID NO: 33067
  derived and/or modified CDS sequence (wt) from hemagglutinin__InfluenzaA__ABI21453

SEQ ID NO: 33238 - RNA, 1701 nt, Artificial Sequence; identical to SEQ ID NO: 33233
  derived and/or modified CDS sequence (wt) from hemagglutinin__InfluenzaA__ABI21464

SEQ ID NO: 33239 - RNA, 1701 nt, Artificial Sequence; identical to SEQ ID NO: 33067
  derived and/or modified CDS sequence (wt) from hemagglutinin__InfluenzaA__ABI21475

SEQ ID NO: 33240 - RNA, 1701 nt, Artificial Sequence
  derived and/or modified CDS sequence (wt) from hemagglutinin__InfluenzaA__ABI21486
augaagacuaucauugcuuugagcuacauuuuaugucugguuuucgcucaaaaacuucccggaaaugacaacagcacagcaacgcugugccugggacaccaugcagugccaaacggaacgcuagugaaaacaaucacgaaugaucaaauugaagugacuaaugcuacugagcugguucagaguuccucaacagguagaauaugcgacaguccucaccgaauccuugauggaaaaaacugcacacugauagaugcucuauugggagacccucauugugauggcuuccaaaauaaggaaugggaccuuuuuguugaacgcagcaaagcuuacagcaacuguuacccuuaugaugugccggauuaugccucccuuaggucacuaguugccucaucaggcacccuggaguuuaucaaugaagacuucaauuggacuggagucgcucaggaugggaaaagcuaugcuugcaaaaggggaucuguuaacaguuucuuuaguagauugaauugguugcacaaauuagaauacaaauauccagcgcugaacgugacuaugccaaacaauggcaaauuugacaaauuguacauuugggggguucaccacccgagcacggacagugaccaaaccagccuauauguucgagcaucagggagagucacagucucuaccaaaagaagccaacaaacuguaaucccgaauaucgggucuagacccuggguaaggggucuguccaguagaauaagcaucuauuggacaauaguaaaaccgggagacauacuuuugauuaauagcacagggaaucuaauugcuccucgggguuacuucaaaauacgaaaugggaaaagcucaauaaugaggucagaugcacccauuggcaacugcaguuccgaaugcaucacuccaaauggaagcauucccaaugacaaaccuuuucaaaauguaaacaggaucacauauggggccugccccagauauguuaagcaaaacacucugaaauuggcaacagggaugcggaauguaccagagaaacaaacuagaggcauauucggcgcaaucgcagguuucauagaaaaugguugggagggaaugguagacgguugguacgguuucaggcaucaaaauucugagggcacaggacaagcagcagaucuuaaaagcacucaagaagcaaucgaccaaaucaacgggaaacugaauagguuaaucgagaaaacgaacgagaaauuccaucaaaucgaaaaagaauucucagaaguagaagggagaauucaggaccucgagaaauauguugaagacacuaaaauagaucucuggucuuacaacgcggagcuucuuguugcccuggagaaccaacauacaauugaucuaacugacucagaaaugaacaaacuguuugaaagaacaaggaagcaacugagggaaaaugcugaggacaugggcaaugguugcuucaaaauauaccacaaaugugacaaugccugcauagggucaaucagaaauggaacuuaugaccaugauguauacagagacgaagcauuaaacaaccgguuccagaucaaagguguugagcugaagucaggauacaaagauuggauccuauggauuuccuuugccauaucaugcuuuuugcuuuguguuguuuugcugggguucaucaugugggccugccaaaaaggcaacauuaggugcaacauuugcauuuga

SEQ ID NO: 33241 - RNA, 1701 nt, Artificial Sequence; identical to SEQ ID NO: 33067
  derived and/or modified CDS sequence (wt) from hemagglutinin__InfluenzaA__ABI21497

SEQ ID NO: 33242 - RNA, 1698 nt, Artificial Sequence
  derived and/or modified CDS sequence (wt) from hemagglutinin__InfluenzaA__ABI21530
augaaagcaaaacuacuaguccuguuauguacauuuacagcuacauaugcagacacaauauguauaggcuaccaugccaacaacucaaccgacacuguugacacaguacuugagaagaaugugacagugacacacucugucaaccuacuugaggacagucacaauggaaaacuaugucuacuaaaaggaauagccccacuacaauuggguaauugcagcguugccggauggaucuuaggaaacccagaaugcgaaucacugauuucuaaggaaucaugguccuacauuguagagacaccaaacccugagaauggaacauguuacccaggguauuucgccgacuaugaggaacugagggagcaauugaguucaguaucuucauuugagagguucgaaauauuccccaaagaaagcucauggcccaaccacaccguaaccggaguaucggcaucaugcucccauaaugggaaaagcaguuuuuacagaaauuugcuauggcugacggagaagaauggcuuguacccaaaucugagcaaguccuauguaaacaacaaggagaaagaaguccuuguacuaugggguguucaucacccgucuaacauagggguccaaagggccaucuaucguacagaaaaugcuuaugucucuguagugucuucacauuauagcagaagauucaccccagaaauagcaaaaagacccaaaguaagagaucaggaaggaagaaucaacuacuacuggacucugcuggaacccggggacacaauaauauuugaggcaaauggaaaucuaauagcgccaugguaugcuuucgcacugaguagaggcuuugagucaggaaucaucaccucaaaugcaccaaugaaugaaugugaugcaaagugucaaacaccucagggagcuauaaacaguagucuuccuuuccagaauguacacccagucacaauaggagaguguccaaaguaugucaggagugcaaaauuaaggaugguuacaggacuaaggaacaucccauccauucaauccagagguuuguuuggagccauugccgguuucauugaagggggguggacuggaaugauagaugggugguaugguuaucaucaucagaaugagcaaggaucuggcuaugcugcagaucaaaaaagcacacaaaaugccauuaacgggauuacaaacaaggugaauucuguaauugagaaaaugaacacucaauucacagcugugggcaaagaauucaacaaauuagaaagaaggauggaaaacuuaaauaaaaaaguugaugauggauuucuagacauuuggacauauaaugcagaauuguugguucuacuggaaaaugaaaggacuuuggauuuccaugacucaaaugugaagaaucuguaugagaaaguaaaaagccaauuaaagaauaaugccaaagaaauaggaaacggguguuuugaauucuaucacaaguguaacaaugaaugcauggaaagugugaaaaauggaacuuaugacuauccaaaauauuccgaagaaucaaaguuaaacagggagaaaauugauggagugaaauuggaaucaaugggagucuaucagauucuggcgaucuacucaacugucgccaguucacugguucuuuuagucucccugggggcaaucagcuucuggauguguuccaaugggucuuugcaguguagaauaugcaucuga

SEQ ID NO: 33243 - RNA, 1698 nt, Artificial Sequence
  derived and/or modified CDS sequence (wt) from hemagglutinin__InfluenzaA__ABI21552
augaaagcaaaacuacuaguccuguuauguacauuuacagcuacauaugcagacacaauauguauaggcuaccaugccaacaacucaaccgacacuguugacacaguacuugagaagaaugugacagugacacacucugucaaccuacuugaggacagucacaauggaaaacuaugucuacuaaaaggaauagccccacuacaauuggguaauugcagcguugccggauggaucuuaggaaacccagaaugcgaaucacugauuucuaaggaaucaugguccuacauuguagagacaccaaacccugagaauggaacauguuacccaggguauuucgccgacuaugaggaacugagggagcaauugaguucaguaucuucauuugagagguucgaaauauuccccaaagaaagcucauggcccaaccacaccguaaccggaguaucggcaucaugcucccauaaugggaaaagcaguuuuuacagaaauuugcuauggcugacggagaagaauggcuuguacccaaaucugagcaaguccuauguaaacaacaaggagaaagaaguccuuguacuaugggguguucaucacccgucuaacauagggguccaaagggccaucuaucauacagaaaaugcuuaugucucuguagugucuucacauuauagcagaagauucaccccagaaauagcaaaaagacccaaaguaagagaucaggaaggaagaaucaacuacuacuggacucugcuggaacccggggacacaauaauauuugaggcaaauggaaaucuaauagcgccaugguaugcuuucgcacugaguagaggcuuugagucaggaaucaucaccucaaaugcaccaauggaugaaugugaugcaaagugucaaacaccucagggagcuauaaacaguagucuuccuuuccagaauguacacccagucacaauaggagaguguccaaaguaugucaggagugcaaaauuaaggaugguuacaggacuaaggaacaucccauccauucaauccagagguuuguuuggagccauugccgguuucauugaagggggguggacuggaaugauagaugggugguaugguuaucaucaucagaaugagcaaggaucuggcuaugcugcagaucaaaaaagcacacaaaaugccauuaacgggauuacaaacaaggugaauucuguaauugagaaaaugaacacucaauucacagcugugggcaaagaauucaacaaauuagaaagaaggauggaaaacuuaaauaaaaaaguugaugauggauuucuagacauuuggacauauaaugcagaauuguugguucuacuggaaaaugaaaggacuuuggauuuccaugacucaaaugugaagaaucuguaugagaaaguaaaaagccaauuaaagaauaaugccaaagaaauaggaaacggguguuuugaauucuaucacaaguguaacaaugaaugcauggaaagugugaaaaauggaacuuaugacuauccaaaauauuccgaagaaucaaaguuaaacagggagaaaauugauggagugaaauuggaaucaaugggagucuaucagauucuggcgaucuacucaacugucgccaguucacugguucuuuuagucucccugggggcaaucagcuucuggauguguuccaaugggucuuugcaguguagaauaugcaucuga

SEQ ID NO: 33244 - RNA, 1698 nt, Artificial Sequence
  derived and/or modified CDS sequence (wt) from hemagglutinin__InfluenzaA__ABI21563
augaaagcaaaacuacuaguccuguuauguacauuuacagcuacauaugcagacacaauauguauaggcuaccaugccaacaacucaaccgacacuguugacacaguacuugagaagaaugugacagugacacacucugucaaccuacuugaggacagucacaauggaaaacuaugucuacuaaaaggaauagccccacuacaauuggguaauugcagcguugccggauggaucuuaggaaacccagaaugcgaaucacugauuucuaaggaaucaugguccuacauuguagagacaccaaacccugagaauggaacauguuacccaggguauuucgccgacuaugaggaacugagggagcaauugaguucaguaucuucauuugagagguucgaaauauuccccaaagaaagcucauggcccaaccacaccguaaccggaguaucggcaucaugcucccauaaugggaaaagcaguuuuuacagaaauuugcuauggcugacggagaagaauggcuuguacccaaaucugagcaaguccuauguaaacaacaaggagaaagaaguccuuguacuaugggguguucaucacccgucuaacauagggguccaaagggccaucuaucauacagaaaaugcuuaugucucuguagugucuucacauuauagcagaagauucaccccagaaauagcaaaaagacccaaaguaagaggucaggaaggaagaaucaacuacuacuggacucugcuggaacccggggacacaauaauauuugaggcaaauggaaaucuaauagcgccaugguaugcuuucgcacugaguagaggcuuugagucaggaaucaucaccucaaaugcaccaaugaaugaaugugaugcaaagugucaaacaccucagggagcuauaaacaguagucuuccuuuccagaauguacacccagucacaauaggagaguguccaaaguaugucaggagugcaaaauuaaggaugguuacaggacuaaggaacaucccauccauucaauccagagguuuguuuggagccauugccgguuucauugaagggggguggacuggaaugauagaugggugguaugguuaucaucaucagaaugagcaaggaucuggcuaugcugcagaucaaaaaagcacacaaaaugccauuaacgggauuacaaacaaggugaauucuguaauugagaaaaugaacacucaauucacagcugugggcaaagaauucaacaaauuagaaagaaggauggaaaacuuaaauaaaaaaguugaugauggauuucuagacauuuggacauauaaugcagaauuguugguucuacuggaaaaugaaaggacuuuggauuuccaugacucaaaugugaagaaucuguaugagaaaguaaaaagccaauuaaagaauaaugccaaagaaauaggaaacggguguuuugaauucuaucacaaguguaacaaugaaugcauggaaagugugaaaaauggaacuuaugacuauccaaaauauuccgaagaaucaaaguuaaacagggagaaaauugauggagugaaauuggaaucaaugggagucuaucagauucuggcgaucuacucaacugucgccaguucacugguucuuuuagucucccugggggcaaucagcuucuggauguguuccaaugggucuuugcaguguagaauaugcaucuga

SEQ ID NO: 33245 - RNA, 1698 nt, Artificial Sequence
  derived and/or modified CDS sequence (wt) from hemagglutinin__InfluenzaA__ABI21574
augaaagcaaaacuacuaguccuguuauguacauuuacagcuacauaugcagacacaauauguauaggcuaccaugccaacaacucaaccgacacuguugacacaguacuugagaagaaugugacagugacacacucugucaaccuacuugaggacagucacaauggaaaacuaugucuacuaaaaggaauagccccacuacaauuggguaauugcagcguugccggauggaucuuaggaaacccagaaugcgaaucacugauuucuaaggaaucaugguccuacauuguagagacaccaaacccugagaauggaacauguuacccaggguauuucgccgacuaugaggaacugagggagcaauugaguucaguaucuucauuugagagguucgaaauauuccccaaagaaagcucauggcccaaccacaccguaaccggaguaucggcaucaugcucccauaaugggaaaagcaguuuuuacagaaauuugcuauggcugacggagaagaauggcuuguacccaaaucugagcaaguccuauguaaacaacaaagagaaagaaguccuuguacuaugggguguucaucacccgucuaacauagggguccaaagggccaucuaucauacagaaaaugcuuaugucucuguagugucuucacauuauagcagaagauucaccccagaaauagcaaaaagacccaaaguaagaggucaggaaggaagaaucaacuacuacuggacucugcuggaacccggggacacaauaauauuugaggcaaauggaaaucuaauagcgccaugguaugcuuucgcacugaguagaggcuuugagucaggaaucaucaccucaaaugcaccaaugaaugaaugugaugcaaagugucaaacaccucagggagcuauaaacaguagucuuccuuuccagaauguacacccagucacaauaggagaguguccaaaguaugucaggagugcaaaauuaaggaugguuacaggacuaaggaacaucccauccauucaauccagagguuuguuuggagccauugccgguuucauugaagggggguggacuggaaugauagaugggugguaugguuaucaucaucagaaugagcaaggaucuggcuaugcugcagaucaaaaaagcacacaaaaugccauuaacgggauuacaaacaaggugaauucuguaauugagaaaaugaacacucaauucacagcugugggcaaagaauucaacaaauuagaaagaaggauggaaaacuuaaauaaaaaaguugaugauggauuucuagacauuuggacauauaaugcagaauuguugguucuacuggaaaaugaaaggacuuuggauuuccaugacucaaaugugaagaaucuguaugagaaaguaaaaagccaauuaaagaauaaugccaaagaaauaggaaacggguguuuugaauucuaucacaaguguaacaaugaaugcauggaaagugugaaaaauggaacuuaugacuauccaaaauauuccgaagaaucaaaguuaaacagggagaaaauugauggagugaaauuggaaucaaugggagucuaucagauucuggcgaucuacucaacugucgccaguucacugguucuuuuagucucccugggggcaaucagcuucuggauguguuccaaugggucuuugcaguguagaauaugcaucuga

SEQ ID NO: 33246 - RNA, 1701 nt, Artificial Sequence
  derived and/or modified CDS sequence (wt) from hemagglutinin__InfluenzaA__ABI21736
augaagacuaucauugcuuugagcuacauuuuaugucugguuuucgcucaaaaacuucccggaaaugacaacagcacggcaacgcugugccuggggcaccaugcagugccaaacggaacgcuagugaaaacaaucacgaaugaccaaauugaagugaccaaugcuacugagcugguucagaguuccucaacagguggaauaugcgacaguccucaccaaauccuugauggagaaaacugcacacuaauagaugcucuauugggagacccucauugugauggcuuccaaaauaaggaaugggaccuuuuuguugaacgcagcaaagccuacagcaacuguuacccuuaugaugugccggauuaugccucccuuaggucacuaguugccucauccggcacacuggaguuuaacaaugaaagcuucaauuggacuggagucgcucagaauggaacaagcucugcuugcaaaaggagaucuaauaaaaguuucuuuaguagauugaauugguugcaccaauuaaaauacaaauacccagcacugaacgugacuaugccaaacaaugaaaaauuugacaaauuguacauuugggggguucaccacccgaguacggacagugaccaaaucagccuauaugcucaagcaccagggagagucacagucucuaccaaaagaagccaacaaacuguaaucccgaauaucggaucuagacccuggguaaggggugucuccagcagaauaagcaucuauuggacaauaguaaagccgggagacauacuuuugauuaacugcacagggaaucuaauugcuccucgggguuacuucaaaauacgaagugggaaaagcucaauaaugaggucagaugcauccauuggcaaaugcaauucugaaugcaucacuccaaauggaagcauucccaaugacaaaccauuucaaaauguaaacaggaucacauauggggccugucccagauauguuaagcaaaacacucugaaauuggcaacagggaugcggaauguaccagagaaacaaacuagaggcauauucggcgcaaucgcggguuucauagaaaaugguugggagggaaugguggacgguugguacgguuucaggcaucaaaauucugagggcacaggacaagcagcagaucucaaaagcacucaagcagcaaucaaccaaaucaacgggaaacugaauagguuaaucgagaaaacgaacgagaaauuccaucaaauugaaaaagaauucucagaaguggaagggagaauucaggaccucgagaaauauguugaggacacuaaaauagaucucuggucguacaacgcggagcuucuuguugcccuggagaaccagcauacaauugaucuaacugacucagaaaugaacaaacuauuugaaagaacaaagaagcaacugagggaaaaugcugaggaugugggcaaugguuguuucaaaauauaccacaaaugugacaaugccugcauagggucaaucagaaaugggacuuaugaccaugauguauacagagacgaagcauuaaacaaccgguuccagaucaaagguguugagcugaagucaggauacaaagauuggauccuauggauuuccuuugccauaucauguuuuuugcuuuguguugucuugcugggguucaucaugugggccugccaaaaaggcaacauuaggugcaacauuugcauuuga

SEQ ID NO: 33247 - RNA, 1701 nt, Artificial Sequence
  derived and/or modified CDS sequence (wt) from hemagglutinin__InfluenzaA__ABI22159
augaagacuaucauugcuuugagcuacauucuaugucugguuuucgcccaaaaacuucccggaaaugacaacagcacggcaacgcugugccuugggcaccaugcaguaccaaacggaacgauagugaaaacaaucacgaaugaccaaauugaaguuacuaaugcuacugagcugguucagaguuccucaacaggugaaauaugcgacaguccucaucagauccuugauggagaaaacugcacacuaauagaugcucuauugggagacccucagugugauggcuuccaaaauaagaaaugggaccuuuuuguugaacgcagcaacgccuacagcaacuguuacccuuaugaugugccggauuaugccucccuuaggucacuaguugccucauccggcacacuggaguuuaacaaugaaagcuucaauuggacuggagucacucaaaauggaacaagcucugcuugcaaaaggagaucuaauaacaguuucuuuaguagauugaauugguugacccacuuaaaauucaaauacccagcauugaacgugacuaugccaaacaaugaaaaauuugacaaauuguacauuugggggguucaccacccggguacggacaaugaccaaaucuuccuguaugcucaagcaucaggaagaaucacagucucuaccaaaagaagccaacaaacuguaaucccgaauaucggaucuagacccagaguaaggaauauccccagcagaauaagcaucuauuggacaauaguaaaaccgggagacauacuuuugauuaacagcacagggaaucuaauugcuccuagggguuacuucaaaauacgaagugggaaaagcucaauaaugagaucagaugcacccauuggcaaaugcaauucugaaugcaucacuccaaauggaagcauucccaaugacaaaccauuucaaaauguaaacaggaucacauauggggccugucccagauauguuaagcaaaacacucugaaauuggcaacagggaugcgaaauguaccagagaaacaaacuagaggcauauuuggcgcaaucgcggguuucauagaaaaugguugggagggaaugguggaugguugguacgguuucaggcaucaaaauucugagggaauaggacaagcagcagaucucaaaagcacucaagcagcaaucaaucaaaucaaugggaagcugaauagguugaucgggaaaaccaacgagaaauuccaucagauugaaaaagaauucucagaaguagaagggagaauucaggaccucgagaaauauguugaggacacuaaaauagaucucuggucauacaacgcagagcuucuuguugcccuggagaaccaacauacaauugaucuaacugacucagaaaugaacaaacuguuugaaagaacaaagaagcaacugagggaaaaugcugaggauaugggcaaugguuguuucaaaauauaccacaaaugugacaaugccugcauaggaucaaucagaaauggaacuuaugaccaugauguauacagagaugaagcauuaaacaaccgguuccagaucaaaggcguugagcugaagucaggauacaaagauuggauccuauggauuuccuuugccauaucauguuuuuugcuuuguguugcuuuguugggguucaucaugugggccugccaaaaaggcaacauuaggugcaacauuugcauuuga

SEQ ID NO: 33248 - RNA, 1707 nt, Artificial Sequence
  derived and/or modified CDS sequence (wt) from hemagglutinin__InfluenzaA__ABI23979
auggagaaaauaguacuucuucuugcaauaaucagucuuguuaaaagugaucagauuugcauugguuaccaugcaaacaacucgacagagcagguugacacaauaauggaaaagaacgucacuguuacacacgcccaagacauacuggaaaagacacacaacgggaagcucugcgaucuagacggagugaagccucuaauuuuaagagauuguaguguagcuggauggcuccucgggaauccaaugugugacgaauuccucaaugugccggaauggucuuacauaguggagaagaucaauccagccaaugaccucuguuacccagggaauuucaacgacuaugaagaacugaaacaccuauugagcagaauaaaccauuuugagaaaauucagaucauccccaaaaguucuugguccgaucaugaagccucaucaggggugagcucagcauguccauaccagggaagguccuccuuuuuuagaaaugugguauggcuuaucaaaaaggacaaugcauacccaacaauaaagagaaguuacaauaauaccaaccaagaagaucuuuugguacugugggggauucaccauccaaaugaugcggcagagcagacaaggcucuaucaaaacccaaccaccuauauuuccguugggacaucaacacuaaaccagagauugguaccaaaaauagcuacuagauccaagguaaacgggcaaaguggaaggauggaguucuuuuggacaauuuuaaaaccgaaugaugcaauaaauuuugagaguaauggaaauuucauugcuccagaaaaugcauacaaaauugucaagaaaggggacucaacaaucaugaaaagugaauuggaauaugguaacugcaacaccaagugucaaacuccaauaggggcgauaaacucuaguaugccauuccacaacauccacccucucaccaucggggaaugccccaaauaugugaaaucaaacagauuaguccuugcgacugggcucagaaauagcccucaaggagagagaagaagaaaaaagagaggacuauuuggagcuauagcagguuuuauagagggaggauggcagggaaugguagaugguugguauggguaccaccauagcaacgagcaggggaguggguacgcugcagacaaagaauccacucaaaaggcaauagauggagucaccaauaaggucaacucgaucauugacaaaaugaacacucaguuugaggccguuggaagggaauuuaauaacuuagaaaggagaauagagaauuuaaacaagaagauggaagacggauuucuagaugucuggacuuauaaugcugaacuucugguucucauggaaaaugagagaacucuagacuuucaugacucaaaugucaagaaccuuuacgacaagguccgacuacagcuuagggauaaugcaaaggagcuugguaacgguuguuucgaguucuaucacagaugugauaaugaauguauggaaaguguaagaaacggaacguaugacuacccgcaguauucagaagaaucaagauuaaaaagagaggaaauaaguggaguaaaauuggaaucaauaggaacuuaucaaauacugucaauuuauucaacaguggcgagcucccuagcacuggcaaucaugguggcuggucuaucuuuauggaugugcuccaauggaucguuacaaugcagaauuugcauuuaa

SEQ ID NO: 33249 - RNA, 1701 nt, Artificial Sequence; identical to SEQ ID NO: 32334
  derived and/or modified CDS sequence (wt) from hemagglutinin__InfluenzaA__ABI26646

SEQ ID NO: 33250 - RNA, 1701 nt, Artificial Sequence
  derived and/or modified CDS sequence (wt) from hemagglutinin__InfluenzaA__ABI30367
augaaagcaaaacuacuaguccuguugugugcauuuacagcuacauaugcagacacaauauguauaggcuaccaugcgaacaacucaaccgacacuguugacacaguacuugagaagaacgugacagugacacacucugucaaccuacuugaggacagucacaacggaaaacuaugccgacuaaaaggaacagccccacuacaauuggguaauugcagcguugccggauggaucuuaggaaacccagaaugcgaaucacuguuuucuaaggaaucaugguccuacauugcagaaacaccaaacccugagaauggaacauguuacccaggguauuucgccgacuaugaggaacugagggagcaauugagcucaguaucaucauucgagagauucgaaauauuccccaaggaaagcucauggcccaaccacaccguaaccaaaggagugacggcaucaugcucacauaaugggaaaagcaguuuuuacaaaaauuugcuauggcugacggaaaagaauggcuuguacccaaaucugagcaaguccuauguaaacaacaaggagaaagaaguccuuguacuaugggguguucaucacccgucuaacauaggggaccaaagggccaucuaucauacagaaaaugcuuaugucucuguagugucuucacauuauaguagaagauucaccccagaaauaacaaaaagacccaaaguaagagaucaagaagggagaauuaacuacuacuggacucugcuggaacccggggacacaauaauauuugaggcaaauggaaaucuaauagcgccaugguacgcuuucgcacugaguagaggcuuugggucaggaaucaucaccucaaacgcaucaaugggugaaugugacgcuaagugucaaacaccccaaggagcuauaaacaguagucuuccuuuccagaauguacacccagucacaauaggagagugucccaaguaugucaggaguacaaaauuaaggaugguuacaggacuaagaaacaucccauccauucaaucuagagguuuguuuggagccauugccgguuucauugaagggggguggacuggaaugauagauggaugguaugguuaccaucaucagaaugaacaaggaucuggcuaugcugcagaccaaaaaagcacacaaaaugccauugaugggauuacaaacaaggugaauucuguaaucgagaaaaugaacacucaauucacagcuguaggcaaagaauucaacaaauuagagagaaggauggaaaacuuaaauaagaaaguugaugauggguuucuggacauuuggacauauaaugcagaguuguugguucuccuggaaaaugaaaggacuuuggauuuucaugacucaaaugugaagaaucuguaugagaaaguaaaaacccaauugaagaauaaugccaaagaaaucgggaacggguguuuugaauucuaucacaaguguaacaaugaaugcauggaaagugugaaaaauggaacuuaugacuauccaaaauauuccgaagaaucaaaguuaaacagggaaaaaauugauggagugaaauuggaaucaaugggagucuaucagauucuggcgaucuacucaacugucgccaguucacuggugcuuuuggucucccugggggcaaucaguuucuggauguguucuaaugggucuuugcaguguagaauaugcaucuga

SEQ ID NO: 33251 - RNA, 1701 nt, Artificial Sequence
  derived and/or modified CDS sequence (wt) from hemagglutinin__InfluenzaA__ABI30378
augaaagcaaaacuacugguccuguuaugugcacuuucagcuacagaugcagacacaauauguauaggcuaccaugcgaacaacucaaccgacacuguugacacaguacucgaaaagaacgugacagugacacacucugucaaccuacuugaggacaaccacaacggaaaacuaugcaaacuaaaaggaauagccccacuacaauuggggaaaugcagcauugccggauggaucuuaggaaacccagaaugcgaaucacuguuuucuaagaaaucaugguccuacauugcagaaacaccaaacuccgagaauggaacauguuacccaggguauuucgccgacuaugaggaacugagggaacaauugaguucaguaucaucauucgagagauucgaaauauuccccaaggaaaguucauggcccaaacacaacguaaccaaaggaguaacggcaucaugcucccauaaggggaaaagcaguuuuuacagaaauuugcuauggcugacggagaaaaauggcucguacccaaaucugagcaaguccuaugugaacaacaaagagaaagaaguccuuguacuaugggguguucaucacccgucuaacauagaggaccaaaagaccaucuaucguaaagaaaaugcuuaugucucuguagugucuucacauuauaacaggagauucaccccagaaauagcaaaaagacccaaaguaagaaaucaagaagggagaauuaacuacuacuggacucugcuggaacccggggacacaauaauauuugaggcaaauggaaaucuaauagcgccaugguaugcuuucgcauugaguagaggcuuugggucaggaaucaucaccucaaacgcaucgauggaugaaugugacgcgaagugucaaacaccccagggagcuauaaacaguagucuuccuuuucagaauguacacccagucacaauaggagagugcccaaaguacgucaggaguacaaaauuaaggaugguuacaggacuaaggaacaucccauccauucaauccagagguuuguuuggagccauugccgguuucauugaagggggauggacuggaaugauugauggaugguaugguuaucaucaucagaaugaacagggaucuggcuaugcugcggaucaaaaaagcacacaaaaugccauuaacgggauuacaaacaaggugaacucuauaaucgagaaaaugaacacucaauucacagcuguggguaaagaauucaacaaacuagaaaaaaggauggaaaacuuaaauaaaaaaguugaugauggguuucuggacauuuggacauauaaugcagaauuguugguucuacuggaaaaugaaaggacuuuggauuuccaugacucaaaugugaagaaccuguaugagaaaguaaaaagccaauuaaagaauaaugccaaagaaauaggaaacggguguuuugaauucuaccacaaguguaacaaugaaugcauggaaaguguaaaaaaugggacuuaugacuauccaaaauauucagaagaaucaaaguuaaacagggaaaaaauugauggagugaaauuggaaucaaugggagucuaucagauucuggcgaucuacucaacugucgccaguucacuggugcuuuuggucucccugggggcaaucagcuucuggauguguucuaaugggucuuugcagugcagaauaugcaucuga

SEQ ID NO: 33252 - RNA, 1701 nt, Artificial Sequence
  derived and/or modified CDS sequence (wt) from hemagglutinin__InfluenzaA__ABI30400
augaagacuaucauugcuuugagcuacauuuuaugucugguuuucgcucaaaaacuucccggaaaugacaacagcacggcaacgcugugccuggggcaccaugcagugccaaacggaacgcuagugaaaacaaucacgaaugaccaaauugaagugacuaaugcuacugagcugguucagaguuccucaacagguggaauaugcgacaguccucaccaaauccuugauggagaaaacugcacacuaauagaugcucuauugggagacccucauugugauggcuuccaaaauaaggaaugggaccuuuuuguugaacgcagcaaagccuacagcaacuguuacccuuaugaugugccggauuaugccucccuuaggucacuaguugccucauccggcacacuggaguuuaacaaugaaagcuucaauuggacuggagucgcucagaauggaacaagcucugcuugcaaaaggagaucuaauaaaaguuucuuuaguagauugaauugguugcaccaauuaaaauacaaauacccagcacugaacgugacuaugccaaacaaugaaaaauuugacaaauuguacauuugggggguucaccacccgaguacggacagugaccaaaucagccuauaugcucaagcaccagggagagucacagucucuaccaaaagaagccaacaaacuguaaucccgaauaucggaucuagacccuggguaaggggugucuccagcagaauaagcaucuauuggacaauaguaaaaccgggagacauacuuuugauuaacugcacagggaaucuaauugcuccucgggguuacuucaaaauacgaagugggaaaagcucaauaaugaggucagaugcauccauuggcaaaugcaauucugaaugcaucacuccaaauggaagcauucccaaugacaaaccauuucaaaauguaaacaggaucacauauggggccugucccagauauguuaagcaaaacacucugaaauuggcaacagggaugcggaauguaccagagaaacaaacuagaggcauauucggcgcaaucgcggguuucauagaaaaugguugggagggaaugguggacgguugguacgguuucaggcaucaaaauucugagggcacaggacaagcagcagaucucaaaagcacucaagcagcaaucaaccaaaucaacgggaaacugaauagguuaaucgagaaaacgaacgagaaauuccaucaaauugaaaaagaauucucagaaguggaagggagaauucaggaccucgagaaauauguugaggacacuaaaauagaucucuggucguacaacgcggagcuucuuguugcccuggagaaccagcauacaauugaucuaacugacucagaaaugaacaaacuguuugaaagaacaaagaagcaacugagggaaaaugcugaggauaugggcaaugguuguuucaaaauauaccacaaaugugacaaugccugcauagggucaaucagaaaugggacuuaugaccaugauguauacagagacgaagcauuaaacaaccgguuccagaucaaagguguugagcugaagucaggauacaaagauuggauccuauggauuuccuuugccauaucauguuuuuugcuuuguguugucuugcugggauucaucaugugggccugccaaaaaggcaacauuaggugcaacauuugcauuuga

SEQ ID NO: 33253 - RNA, 1701 nt, Artificial Sequence
  derived and/or modified CDS sequence (wt) from hemagglutinin__InfluenzaA__ABI30411
augaagacuaucauugcuuugagcuacauuuuaugucugguuuucgcucaaaaacuucccggaaaugacaacagcacggcaacgcugugccuggggcaccaugcagugccaaacggaacgcuagugaaaacaaucacgaaugaccaaauugaagugacuaaugcuacugagcugguucagaguuccucaacagguggaauaugcgacaguccucaccaaauccuugauggagaaaacugcacacuaauagaugcucuauugggagacccucauugugauggcuuccaaaauaaggaaugggaccuuuuuguugaacgcagcaaagccuacagcaacuguuacccuuaugaugugccggauuaugccucccuuaggucacuaguugccucauccggcacacuggaguuuaacaaugaaagcuucaauuggacuggagucgcucagaauggaacaagcucugcuugcaaaaggagaucuaauaaaaguuucuuuaguagauugaauugguugcaccaauuaaaauacaaauacccagcacugaacgugacuaugccaaacaaugaaaaauuugacaaauuguacauuugggggguucaccacccgaguacggacagugaccaaaucagccuauaugcucaagcaccagggagagucacagucucuaccaaaagaagccaacaaacuguaaucccgaauaucggaucuagacccuggguaaggggugucuccagcagaauaagcaucuauuggacaauaguaaaaccgggagacauacuuuugauuaacugcacagggaaucuaauugcuccucgggguuacuucaaaauacgaagugggaaaagcucaauaaugaggucagaugcauccauuggcaaaugcaauucugaaugcaucacuccaaauggaagcauucccaaugacaaaccauuucaaaauguaaacaggaucacauauggggccugucccagauauguuaagcaaaacacucugaaauuggcaacagggaugcggaauguaccagagaaacaaacuagaggcauauucggcgcaaucgcggguuucauagaaaaugguugggagggaaugguggacgguugguacgguuucaggcaucaaaauucugagggcacaggacaagcagcagaucucaaaagcacucaagcagcaaucaaccaaaucaacgggaaacugaauagguuaaucgagaaaacgaacgagaaauuccaucaaauugaaaaagaauucucagaaguggaagggagaauucaggaccucgagaaauauguugaggacacuaaaauagaucucuggucguacaaugcggagcuucuuguugcccuggagaaccagcauacaauugaucuaacugacucagaaauggacaaacuguuugaaagaacaaagaagcaacugagggaaaaugcugaggauaugggcaaugguuguuucaaaauauaccacaaaugugacaaugccugcauagggucaaucagaaaugggacuuaugaccaugauguauacagagacgaagcauuaaacaaccgguuccagaucaaagguguugagcugaagucaggauacaaagauuggauccuauggauuuccuuugccauaucauguuuuuugcuuuguguugucuugcugggguucaucaugugggccugccaaaaaggcaacauuaggugcaacauuugcauuuga

SEQ ID NO: 33254 - RNA, 1701 nt, Artificial Sequence; identical to SEQ ID NO: 32603
  derived and/or modified CDS sequence (wt) from hemagglutinin__InfluenzaA__ABI30422

SEQ ID NO: 33255 - RNA, 1701 nt, Artificial Sequence; identical to SEQ ID NO: 32334
  derived and/or modified CDS sequence (wt) from hemagglutinin__InfluenzaA__ABI30433

SEQ ID NO: 33256 - RNA, 1701 nt, Artificial Sequence; identical to SEQ ID NO: 32603
  derived and/or modified CDS sequence (wt) from hemagglutinin__InfluenzaA__ABI30444

SEQ ID NO: 33257 - RNA, 1701 nt, Artificial Sequence; identical to SEQ ID NO: 32334
  derived and/or modified CDS sequence (wt) from hemagglutinin__InfluenzaA__ABI30455

SEQ ID NO: 33258 - RNA, 1701 nt, Artificial Sequence; identical to SEQ ID NO: 32334
  derived and/or modified CDS sequence (wt) from hemagglutinin__InfluenzaA__ABI30466

SEQ ID NO: 33259 - RNA, 1701 nt, Artificial Sequence; identical to SEQ ID NO: 32334
  derived and/or modified CDS sequence (wt) from hemagglutinin__InfluenzaA__ABI30477

SEQ ID NO: 33260 - RNA, 1701 nt, Artificial Sequence
  derived and/or modified CDS sequence (wt) from hemagglutinin__InfluenzaA__ABI30488
augaagacuaucauugcuuugagcuacauucuaugucugguuuucgcucaaaaacuucccggaaaugacaacagcacggcaacgcugugccuugggcaccaugcaguaccaaacggaacgauaguaaaaacaaucacgaaugaccaaauugaaguuacuaaugcuacugagcugguucagaguuccucaacagguggaauaugcgacaguccucaucagauccuugauggagaaaacugcacacuaauagaugcucuauugggagacccucagugugauggcuuccaaaauaagaaaugggaccuuuuuguugaacgcagcaaagccuacagcaacuguuacccuuaugaugugccggauuaugccucccuuaggucacuaguugccucauccggcacacuggaguuuaacaaugaaagcuucaauuggacuggagucacucaaaauggaacaagcucugcuugcaaaaggagaucuaauaacaguuucuuuaguagauugaauugguugacccauuuaaaauucaaauacccagcauugaacgugacuaugccaaacaaugaaaaauuugacaaauuguacauuugggggguucaccacccggguacgaacaaugaccaaaucagccuauaugcucaagcaucaggaagaaucacagucucuaccaaaagaagccaacaaacuguaaucccgaauaucggaucuagacccaggguaagggauauccccagcagaauaagcaucuauuggacaauaguaaaaccgggagacauacuuuugauuaacagcacagggaaucuaauugcuccucgggguuacuucaaaauacgaagugggaaaagcucaauaaugagaucagaugcacccauuggcaaaugcaauucugaaugcaucacuccaaauggaagcauucccaaugacaaaccauuucaaaauguaaacaggaucacauauggggccugucccagauauguuaagcaaaacacucugaaauuggcaacagggaugcgaaauguaccagagaaacaaacuagaggcauauuuggcgcaaucgcggguuucauagaaaaugguugggagggaaugguggaugguugguacgguuucaggcaucaaaauucugagggaauaggacaagcagcagaucucaaaagcacucaagcagcaaucaaccaaaucaaugggaagcugaauagguugaucgggaaaaccaacgagaaauuccaucagauugaaaaagaauucucagaaguagaagggagaauucaggaccucgagaaauauguugaggacacuaaaauagaucucuggucauacaacgcggagcuucuuguugcccuggagaaccaacauacaauugaucuaacugacucagaaaugaacaaacuguuugaaagaacaaagaagcaacugagggaaaaugcugaggauaugggcaaugguuguuucaaaauauaccacaaaugugacaaugccugcauagggucaaucagaaauggaacuuaugaccaugauguauacagagaugaagcauuaaacaaccgguuccagaucaaagguguugagcugaagucaggauacaaagauuggauccuauggauuuccuuugccauaucauguuuuuugcuuuguguugcuuuguugggguucaucaugugggccugccaaaaaggcaacauuaggugcaacauuugcauuuga

SEQ ID NO: 33261 - RNA, 1701 nt, Artificial Sequence; identical to SEQ ID NO: 32334
  derived and/or modified CDS sequence (wt) from hemagglutinin__InfluenzaA__ABI30499

SEQ ID NO: 33262 - RNA, 1701 nt, Artificial Sequence
  derived and/or modified CDS sequence (wt) from hemagglutinin__InfluenzaA__ABI30510
augaagacuaucauugcuuugagcuacauucuaugucugguuuucgcucaaaaacuucccggaaaugacaacagcacggcaacgcugugccuugggcaccaugcaguaccaaacgggacgauagugaaaacaaucacgaaugaccaaauugaagucacuaaugcuacugagcugguucagaguuccucaacagguggaauaugcgacaguccucaucagauccuugauggagaaaacugcacacuaauagaugcucuauugggagacccucagugugauggcuuccaaaauaagaaaugggaccuuuuuguugaacgcagcaaagccuacagcaacuguuacccuuaugaugugccggauuaugccucccuuaggucacuaguugccucauccggcacacuggaguuuaacaaugaaagcuucaauuggacuggagucacucaaaauggaacaagcucugcuugcaaaaggagaucuaauaacaguuucuuuaguagauugaauugguugacccauuuaaaauucaaauacccagcauugaacgugacuaugccaaacaaugaaaaauuugacaaauuguacauuugggggguucaccacccggguacggacaaugaccaaaucagccuauaugcucaagcaucaggaagaaucacagucucuaccaaaagaagccaacaaacuguaaucccgaauaucggaucuagacccaggguaagggauauccccagcagaauaagcaucuauuggacaauaguaaaaccgggagacauacuuuugauuaacagcacagggaaucuaauugcuccucgggguuacuucaaaauacgaagugggaaaagcucaauaaugagaucagaugcacccauuggcaaaugcaauucugaaugcaucacuccaaauggaagcauucccaaugacaaaccauuucaaaauguaaacaggaucacauauggggccugucccagauauguuaagcaaaacacucugaaauuggcaacagggaugcgaaauguaccagagaaacaaacuagaggcauauuuggcgcaaucgcggguuucauagaaaaugguugggagggaaugguggaugguugguacgguuucaggcaucaaaauucugagggaauaggacaagcagcagaucucaaaagcacucaagcagcaaucaaccaaaucaaugggaagcugaauagguugaucgggaaaaccaacgagaaauuccaucagauugaaaaagaauucucagaaguagaagggagaauucaggaccucgagaaauauguugaggacacuaaaauagaucucuggucauacaacgcggagcuucuuguugcccuggagaaccaacauacaauugaucuaacugacucagaaaugaacaaacuguuugaaagaacaaagaagcaacugagggaaaaugcugaggauaugggcaaugguuguuucaaaauauaccacaaaugugacaaugccugcauagggucaaucagaaauggaacuuaugaccaugauguauacagagaugaagcauuaaacaaccgguuccagaucaaagguguugagcugaagucaggauacaaagauuggauccuauggauuuccuuugccauaucauguuuuuugcuuuguguugcuuuguugggguucaucaugugggccugccaaaaaggcaacauuaggugcaacauuugcauuuga

SEQ ID NO: 33263 - RNA, 1701 nt, Artificial Sequence
  derived and/or modified CDS sequence (wt) from hemagglutinin__InfluenzaA__ABI30521
augaagacuaucauugcuuugagcuacauucuaugucugguuuucgcucaaaaacuucccggaaaugacaacagcacggcaacgcugugccuugggcaccaugcaguaccaaacggaacgauagugaaaacaaucacgaaugaccaaauugaaguuacuaaugcuacugagcugguucagaguuccucaacagguggaauaugcgacaguccucaucagauccuugauggagaaaacugcacacuaauagaugcucuauugggagacccucagugugauggcuuccaaaauaagaaaugggaccuuuuuguugaacgcagcaaagccuacagcaacuguuacccuuaugaugugccggauuaugccucccuuaggucacuaguugccucauccggcacacuggaguuuaacaaugaaagcuucaauuggacuggagucacucaaaauggaacaagcucugcuugcaaaaggagaucuaauaacaguuucuuuaguagauugaauugguugacccauuuaaaauucaaauacccagcauugaacgugacuaugccaaacaaugaaaaauuugacaaauuguacauuugggggguucaccacccggguacgaacaaugaccaaaucagccuauaugcucaagcaucaggaagaaucacagucucuaccaaaagaagccaacaaacuguaaucccgaauaucggaucuagacccaggguaagggauauccccagcagaauaagcaucuauuggacaauaguaaaaccgggagacauacuuuugauuaacagcacagggaaucuaauugcuccucgggguuacuucaaaauacgaagugggaaaagcucaauaaugagaucagaugcauccauuggcaaaugcaauucugaaugcaucacuccaaauggaagcauucccaaugacaaaccauuucaaaauguaaacaggaucacauauggggccugucccagauauguuaagcaaaacacucugaaauuggcaacagggaugcgaaauguaccagagaaacaaacuagaggcauauuuggcgcaaucgcggguuucauagaaaaugguugggagggaaugguggaugguugguacgguuucaggcaucaaaauucugagggaauaggacaagcagcagaucucaaaagcacucaagcagcaaucaaccaaaucaaugggaagcugaauagguugaucgggaaaaccaacgagaaauuccaucagauugaaaaagaauucucagaaguagaagggagaauucaggaccucgagaaauauguugaggacacuaaaauagaucucuggucauacaacgcggagcuucuuguugcccuggagaaccaacauacaauugaucuaacugacucagaaaugaacaaacuguuugaaagaacaaagaagcaacugagggaaaaugcugaggauaugggcaaugguuguuucaaaauauaccacaaaugugacaaugccugcauagggucaaucagaaauggaacuuaugaccaugauguauacagagaugaagcauuaaacaaccgguuccagaucaaagguguugagcugaagucaggauacaaagauuggauccuauggauuuccuuugccauaucauguuuuuugcuuuguguugcuuuguugggguucaucaugugggccugccaaaaaggcaacauuaggugcaacauuugcauuuga

SEQ ID NO: 33264 - RNA, 1701 nt, Artificial Sequence; identical to SEQ ID NO: 32332
  derived and/or modified CDS sequence (wt) from hemagglutinin__InfluenzaA__ABI30532

SEQ ID NO: 33265 - RNA, 1701 nt, Artificial Sequence; identical to SEQ ID NO: 33209
  derived and/or modified CDS sequence (wt) from hemagglutinin__InfluenzaA__ABI30543

SEQ ID NO: 33266 - RNA, 1701 nt, Artificial Sequence; identical to SEQ ID NO: 32332
  derived and/or modified CDS sequence (wt) from hemagglutinin__InfluenzaA__ABI30554

SEQ ID NO: 33267 - RNA, 1698 nt, Artificial Sequence
  derived and/or modified CDS sequence (wt) from hemagglutinin__InfluenzaA__ABI30565
augaaaguaaaacuacugguucuguuauguacauuuacagcuacauaugcagacacaauauguauaggcuaccaugccaacaacucgaccgacacuguugacacaguacuugagaagaaugugacagugacacacucugucaaccuacuugaggacagucacaauggaaaacuaugucuacuaaaaggaauagccccacuacaauuggguaauugcagcguugccggauggaucuuaggaaacccagaaugcgaauuacugauuuccaaggaaucaugguccuacauuguagaaacaccaaauccugagaauggaacauguuacccaggguauuucgccgacuaugaggagcugagggagcaauugaguucaguaucuucauuugagagguucgaaauauuccccaaagagagcucauggcccaaccacaccguaaccggaguaucagcaucaugcucccauaacgggaaaagcaguuuuuacaggaauuugcuauggcugacggggaagaaugguuuguauccaaaccugagcaaguccuaugcaaacaacaaagagaaagaaguccuuguacugugggguguucaucacccgccuaacauaggggaccaaagggcccucuaucauacagaaaaugcuuaugucucuguagugucuucacauuauagcagaagauucaccccagaaauagccaaaagacccaaggugagagaucaggaaggaagaaucaacuacuacuggacucugcuggaacccggggauacaauaauauuugaggcaaauggaaaucuaauagcgccaagguuugcuuucgcacugaguagaggcuuuggaucaggaaucaucaccucaaaugcaccaauggaugaaugugaugcgaagugucaaacaccucagggagcuauaaacagcagucuuccuuuccagaauguacacccagucacaauaggagaguguccaaaguaugucaggagugcaaaauuaagaaugguuacaggacuaaggaacaucccauccauucaauccagagguuuguuuggagccauugccgguuucauugaagggggguggacuggaaugguagaugguugguaugguuaucaccaucagaaugagcaaggaucuggguaugcugcagaucaaaaaagcacacaaaaugccauuaacgggauuacaaacaaggugaauucuguaauugagaaaaugaacacucaauucacagcugugggcaaagaauucaacaaauuggaaagaaggauggaaaacuuaaauaaaaaaguugaugauggguuucuagacauuuggacauauaacgcagaauuguugguucuacuggaaaaugaaaggacuuuggacuuccaugacuccaacgugaagaaucuguaugagaaaguaaaaagccaauuaaagaauaaugccaaagaaauaggaaacggguguuuugaauucuaucacaaguguaacgaugaaugcauggagagugugaaaaauggaacuuaugacuauccaaaauauuccgaagaaucaaaguugaacagggagagaauugauggagugaaauuggaaucaaugggagucuaucagauucuggcgaucuacucaacagucgccaguucccugguucuuuuggucucccugggggcaaucagcuucuggauguguuccaaugggucuuugcaguguagaauaugcaucuaa

SEQ ID NO: 33268 - RNA, 1701 nt, Artificial Sequence; identical to SEQ ID NO: 32669
  derived and/or modified CDS sequence (wt) from hemagglutinin__InfluenzaA__ABI30587

SEQ ID NO: 33269 - RNA, 1701 nt, Artificial Sequence
  derived and/or modified CDS sequence (wt) from hemagglutinin__InfluenzaA__ABI30609
augaagacuaucauugcuuugagcuacauucuaugucugguuuucgcucaaaaacuucccggaaaugacaacagcacggcaacgcugugccuugggcaccaugcaguaccaaacggaacgauagugaaaacaaucaugaaugaccaaauugaaguuacuaaugcuacugagcugguucagaguuccucaacagguggaauaugcgacaguccucaucagauccuugauggagaaaacugcacacuaauagaugcucuauugggagacccucagugugauggcuuccaaaauaagaaaugggaccuuuuuguugaacgcagcaaagccuacagcaacuguuacccuuaugaugugccggauuaugccucccuuaggucacuaguugccucauccggcacacuggaguuuaacaaugaaagcuucaauuggacuggagucacucaaaauggaacaagcucugcuugcaaaaggagaucuaauaacaguuucuuuaguagauugaauugguugacccacuuaaaauucaaauacccagcauugaacgugacuaugccaaacaaugaaaaauuugacaaauuguacauuugggggguucaccacccggguacggacaaugaccaaaucuuccuguaugcucaagcaucaggaagaaucacagucucuaccaaaagaagccaacaaacuguaaucccgaauaucggaucuagacccagaguaaggaauauccccaguagaauaagcauauauuggacaauaguaaaaccgggagacauacuuuugauuaacagcacagggaaucuaauugcuccuagggguuacuucaaaauacgaagugggaaaagcucaauaaugagaucagaugcacccauuggcaaaugcaauucugaaugcaucacuccaaauggaagcauucccaaugacaaaccauuucaaaauguaaacaggaucacauauggggccugucccagauauguuaagcaaaacacucugaaauuggcaacagggaugcgaaauguaccagagaaacaaacuagaggcauauuuggcgcaaucgcggguuucauagaaaaugguugggagggaaugguggaugguugguacgguuucaggcaucaaaauucugagggaacaggacaagcagcagaucucaaaagcacucaagcagcaaucaaucaaaucaaugggaagcugaauagguugaucgggaaaaccaacgagaaauuccaucagauugaaaaagaauucucagaaguagaagggagaauucaggaccucgagaaauauguugaggacacuaaaauagaucucuggucauacaacgcggagcuucuuguugcccuggagaaccaacauacaauugaucuaacugacucagaaaugaacaaacuguuugaaagaacaaagaagcaacugagggaaaaugcugaggauaugggcaaugguuguuucaaaauauaccacaaaugugacaaugccugcauagggucaaucagaaauggaacuuaugaccaugauguauacagagaugaagcauuaaacaaccgguuccagaucaaaggcguugagcugaagucaggauacaaagauuggauccuauggauuuccuuugccauaucauguuuuuugcuuuguguugcuuuguugggguucaucaugugggccugccaaaaaggcaacauuaggugcaacauuugcauuuga

SEQ ID NO: 33270 - RNA, 1701 nt, Artificial Sequence
  derived and/or modified CDS sequence (wt) from hemagglutinin__InfluenzaA__ABI30620
augaagacuaucauugcuuugagcuacauucuaugucugguuuucgcucaaaagcuucccggaaaugacaacagcacggcaacgcugugccuugggcaccaugcaguaccaaacggaacgauagugaaaacaaucacgaaugaccaaauugaaguuacuaaugcuacugagcugguucagaguuccucaacagguggaauaugcgacaguccucaucagauccuugauggagaaaacugcacacuaauagaugcucuauugggagacccucagugugauggcuuccaaaauaagaaaugggaccuuuuuauugaacgcagcaaagccuacagcaacuguuacccuuaugaugugccggauuaugccucccuuaggucacuaguugccucauccggcacacuggaauuuaacaaugaaagcuucaauuggacuggagucacucaaaauggaacaagcucugcuugcaaaaggagaucuaauaacaguuucuuuaguagauugaauugguugacccacuuaaaauucaaauacccagcauugaacgugacuaugccaaacaaugaaaaauuugacaaauuguacauuugggggguucaccacccggguacggacaaugaccaaaucagccuauaugcucaagcuucaggaaggaucacagucucuaccaaaagaagccaacaaacuguaaucccgaauaucggaucuagacccaggguaagggauauccccagcagaauaagcaucuauuggacaauaguaaaaccgggagacauacuuuugauuaacagcacagggaaucuaauugcuccucgggguuacuucaaaauacgaagugggaaaagcucaauaaugagaucagaugcacccauuggcaaaugcaauucugaaugcaucacuccaaauggaagcauucccaaugacaaaccguuucaaaauguaaacaggaucacauauggggccugucccagauauguuaagcaaaacacucugaaauuggcaacagggaugcgaaauguaccagagaaacaaacuagaggcauauuuggcgcaaucgcggguuucauagaaaaugguugggagggaaugguggaugguugguacgguuucaggcaucaaaauucugagggaauaggacaagcagcagaucucaaaagcacucaagcagcaaucaaccaaaucaaugggaagcugaauagguugaucgggaaaaccaacgagaaauuccaucagauugaaaaagaauucucagaaguagaagggagaauucaggaccucgagaaauauguugaggacacuaaaguagaucucuggucauacaacgcagagcuucuuguugcccuggagaaccaacauacaauugaucuaacugacucagaaaugaacaaacuguuugaaagaacaaagaagcaacugagggaaaaugcugaggauaugggcaaugguuguuucaaaauauaccacaaaugugacaaugccugcauagggucaaucagaaauggaacuuaugaccaugauguauacagagaugaagcauugaacaaccgguuccagaucaaagguguugagcugaagucaggauacaaagauuggauccuauggauuuccuuugccauaucauguuuuuugcuuuguguugcuuuguugggguucaucaugugggccugccaaaaaggcaacauuaggugcaacauuugcauuuga

SEQ ID NO: 33271 - RNA, 1701 nt, Artificial Sequence; identical to SEQ ID NO: 32645
  derived and/or modified CDS sequence (wt) from hemagglutinin__InfluenzaA__ABI30733

SEQ ID NO: 33272 - RNA, 1701 nt, Artificial Sequence
  derived and/or modified CDS sequence (wt) from hemagglutinin__InfluenzaA__ABI30744
augaagacuaucauugcuuugagcuacauucuaugucugguuuucgcucaaaaacuucccggaaaugacaacagcacggcaacgcugugccuugggcaccaugcaguaccaaacggaacgauagugaaaacaaucacgaaugaccaaauugaaguuacuaaugcuacugagcugguucagaguuccucaacagguggaauaugcgacaguccucaucagauccuugauggagaaaacugcacacuaauagaugcucuauugggagacccucagugugauggcuuccaaaauaagaaaugggaccuuuuuguugaacgcagcaaagccuacagcaacuguuacccuuaugaugugccggauuaugccucccuuaggucacuaauugccucauccggcacacuggaguuuaacaaugaaagcuucaauuggacuggagucacucaaaauggaacaagcucugcuugcaaaaggagaucuaauagcaguuucuuuaguagauugaauugguugacccacuuaaaauucaaauacccagcauugaacgugacuaugccaaacaaugaagaauuugacaaauuguacauuugggggguucaccacccggguacauacaaugaccaaaucagccuauaugcucaagcaucaggaagaaucacagugucuaccaaaagaagccaacaaacuguaaucccgaauaucgggucuagacccaggguaagggauauccccagcagaauaagcaucuauuggacaauaguaaaaccgggagacauacuuuugauuaacagcacagggaaucuaauugcuccucgggguuacuucaaaauacgaagugggaaaagcucaauaaugagaucagaugcacccauuggcaaaugcaauucugaaugcaucacuccaaauggaagcauucccaaugacaaaccauuucaaaauguaaacaggaucacauauggggccugucccagauauguuaagcaaaacacucugaaauuggcaacagggaugcgaaauguaccagagaaacaaacuagaggcauauuuggcgcaaucgcggguuucauagaaaaugguugggagggaaugguggaugguugguacgguuucaggcaucaaaauucugagggaauaggacaagcagcagaucucaaaagcacucaagcagcaaucgaccaaaucaaugggaagcugaauagguugaucgggaaaaccaacgagaaauuccaucagauugaaaaagaauucucagaaguagaagggagaauucaggaccucgaaaaauauguugaggacacuaaaauagaucucuggucauacaacgcggagcuucuuguugcccuggagaaccaacauacaauugaucuaacugacucagaaaugaacaaacuguuugaaagaacaaagaagcaacugagggaaaaugcugaggauaugggcaaugguuguuucaaaauauaccacaaaugugacaaugccugcauagggucaaucagaaauggaacuuaugaccaugauguauacagagaugaagcauuaaacaaccgguuccagaucaaagguguugagcugaagucaggauacaaagauuggauucuauggauuuccuuugccauaucauguuuuuugcuuuguguugcuuuguugggguucaucaugugggccugccaaaaaggcaacauuaggugcaacauuugcauuuga

SEQ ID NO: 33273 - RNA, 1701 nt, Artificial Sequence; identical to SEQ ID NO: 33272
  derived and/or modified CDS sequence (wt) from hemagglutinin__InfluenzaA__ABI30755

SEQ ID NO: 33274 - RNA, 1701 nt, Artificial Sequence; identical to SEQ ID NO: 32669
  derived and/or modified CDS sequence (wt) from hemagglutinin__InfluenzaA__ABI30766

SEQ ID NO: 33275 - RNA, 1701 nt, Artificial Sequence
  derived and/or modified CDS sequence (wt) from hemagglutinin__InfluenzaA__ABI30777
augaagacuaucauugcuuugagcuacauucuaugucugguuuucgcucaaaaacuucccggaaaugacaacagcacggcaacgcugugccuugggcaccaugcaguaccaaacggaacgauagugaaaacaaucacgaaugaccaaauugaaguuacuaaugcuacugaguugguucagaguuccucaacagguggaauaugcgacaguccucaucagauccuugauggagaaaacugcacacuaauagaugcucuauugggagacccucagugugauggcuuccaaaauaagaaaugggaccuuuuuguugaacgcagcaaagccuacagcaacuguuacccuuaugaugugccggauuaugccucccuuaggucacuaauugccucauccggcacacuggaguuuaacaaugaaagcuucaauuggacuggagucacucaaaauggaacaagcucugcuugcaaaaggagaucuaauagcaguuucuuuaguagauugaauugguugacccacuuaaaauucaaauacccagcauugaacgugacuaugccaaacaaugaagaauuugacaaauuguacauuugggggguucaccacccggguacauacaaugaccaaaucagccuauaugcucaagcaucaggaagaaucacagucucuaccaaaagaagccaacaaacuguaaucccgaauaucgggucuagacccaggguaagggauauccccagcagaauaagcaucuauuggacaauaguaaaaccgggagacauacuuuugauuaacagcacagggaaucuaauugcuccucgggguuacuucaaaauacgaagugggaaaagcucaauaaugagaucagaugcacccauuggcaaaugcaauucugaaugcaucacuccaaauggaagcauucccaaugacaaaccauuucaaaauguaaacaggaucacauauggggccugucccagauauguuaagcaaaacacucugaaauuggcaacagggaugcgaaauguaccagagaaacaaacuagaggcauauuuggcgcaaucgcggguuucauagaaaaugguugggagggaaugguggaugguugguacgguuucaggcaucaaaauucugagggaauaggacaagcagcagaucucaaaagcacucaagcagcaaucgaccaaaucaaugggaagcugaauagguugaucgggaaaaccaacgagaaauuccaucagauugaaaaagaauucucagaaguagaagggagaauucaggaccucgagaaauauguugaggacacuaaaauagaucucuggucauacaacgcggagcuucuuguugcccuggagaaccaacauacaauugaucuaacugacucagaaaugaacaaacuguuugaaagaacaaagaagcaacugagggaaaaugcugaggauaugggcaaugguuguuucaaaauauaccacaaaugugacaaugccugcauagggucaaucagaaauggaacuuaugaccaugauguauacagagaugaagcauuaaacaaccgguuccagaucaaagguguugagcugaagucaggauacaaagauuggauccuauggauuuccuuugccauaucauguuuuuugcuuuguguugcuuuguugggguucaucaugugggccugccaaaaaggcaacauuaggugcaacauuugcauuuga

SEQ ID NO: 33276 - RNA, 1701 nt, Artificial Sequence
  derived and/or modified CDS sequence (wt) from hemagglutinin__InfluenzaA__ABI30788
augaagacuaucauugcuuugagcuacauucuaugucugguuuucgcucaaaaacuuuccggaaaugacaacagcacggcaacacugugccuugggcaccaugcaguaccaaacggaacgauagugaaaacaaucacgaaugaccaaauugaaguuacuaaugcuacugagcugguucagaguuccucaacagguggaauaugcgacaguccucaucagauccuugauggagaaaacugcacacuaauagaugcucuauugggagacccucagugugauggcuuccaaaauaagaaaugggaccuuuuuguugaacgcagcaaagccuacagcaacuguuacccuuaugaugugccggauuaugccucccuuaggucacuaauugccucauccggcacacuggaguuuaacaaugaaagcuucaauuggacuggagucacucaaaauggaacaagcucugcuugcaaaaggagaucuaauagcaguuucuuuaguagauugaauugguugacccacuuaaaauucaaauacccagcauugaacgugacuaugccaaacaaugaagaauuugacaaauuguacauuugggggguucaccacccggguacauacaaugaccaaaucagccuauaugcucaagcaucaggaagaaucacagucucuaccaaaagaagccaacaaacuguaaucccgaauaucgggucuagacccaggguaagggauauccccagcagaauaagcaucuauuggacaauaguaaaaccgggagacauacuuuugauuaacagcacagggaaucuaauugcuccucgggguuacuucaaaauacgaagugggaaaagcucaauaaugagaucagaugcacccauuggcaaaugcaauucugaaugcaucacuccaaauggaagcauucccaaugacaaaccauuucaaaauguaaacaggaucacauauggggccugucccagauaugucaagcaaaacacucugaaauuggcaacagggaugcgaaauguaccagagaaacaaacuagaggcauauuuggcgcaaucgcggguuucauagaaaaugguugggagggaaugguggaugguugguacgguuucaggcaucaaaauucugagggaauaggacaagcagcagaucucaaaagcacucaagcagcaaucgaccaaaucaaugggaagcugaauagguugaucgggaaaaccaacgagaaauuccaucagauugaaaaagaauucucagaaguagaagggagaauucaggaccucgagaaauauguugaggacacuaaaauagaucucuggucauacaacgcggagcuucuuguugcccuggagaaccaacauacaauugaucuaacugacucagaaaugaacaaacuguuugaaagaacaaagaagcaacugagggaaaaugcugaggauaugggcaaugguuguuucaaaauauaccacaaaugugacaaugccugcauagggucaaucagaaauggaacuuaugaccaugauguauacagagaugaagcauuaaacaaccgguuccagaucaaagguguugagcugaagucaggauacaaagauuggauccuauggauuuccuuugccauaucauguuuuuugcuuuguguugcuuuguugggguucaucaugugggccugccaaaaaggcaacauuaggugcaacauuugcauuuga

SEQ ID NO: 33277 - RNA, 1701 nt, Artificial Sequence; identical to SEQ ID NO: 32645
  derived and/or modified CDS sequence (wt) from hemagglutinin__InfluenzaA__ABI30799

SEQ ID NO: 33278 - RNA, 1701 nt, Artificial Sequence
  derived and/or modified CDS sequence (wt) from hemagglutinin__InfluenzaA__ABI30810
augaagacuaucauugcuuugagcuacauucuaugucugguuuucgcucaaaaacuucccggaaaugacaacagcacggcaacgcugugccuugggcaccaugcaguaccaaacggaacgauagugaaaacaaucacgaaugaccaaauugaaguuacuaaugcuacugagcugguucagaguuccucaacagguggaauaugcgacaguccucaucagauccuugauggagaaaacugcacacuaauagaugcucuauugggagacccucagugugauggcuuccaaaauaagaaaugggaccuuuuuguugaacgcagcaaagccuacagcaacuguuacccuuaugaugugccggauuaugccucccuuaggucacuaauugccucauccggcacacuggaguuuaacaaugaaagcuucaauuggacuggagucacucaaaauggaacaagcucugcuugcaaaaggagaucuaauagcaguuucuuuaguagauugaauugguugacccacuuaaaauucaaauacccagcauugaacgugacuaugccaaacaaugaagaauuugacaaauuguacauuugggggguucaccacccggguacauacaaugaccaaaucagccuauaugcucaagcaucaggaagaaucacagucucuaccaaaagaagccaacaaacuguaaucccgaauaucgggucuagacccaggguaagggauauccccagcagaauaagcaucuauuggacaauaguaaaaccgggagacauacuuuugauuaacagcacagggaaucuaauugcuccucgggguuacuucaaaauacgaagugggaaaagcucaauaaugagaucagaugcacccauuggcaaaugcaauucugaaugcaucacuccaaauggaagcauucccaaugacaaaccauuucaaaauguaaacaggaucacauauggggccugucccagauauguuaagcaaaacacucugaaauuggcaacagggaugcgaaauguaccagagaaacaaacuagaggcauauuuggcgcaaucgcagguuucauagaaaaugguugggagggaaugguggaugguugguacgguuucaggcaucaaaauucugagggaauaggacaagcagcagaucucaaaagcacucaagcagcaaucgaccaaaucaaugggaagcugaauagguugaucgggaaaaccaacgagaaauuccaucagauugaaaaagaauucucagaaguagaagggagaauucaggaccucgagaaauauguugaggacacuaaaauagaucucuggucauacaacgcggagcuucuuguugcccuggagaaccaacauacaauugaucuaacugacucagaaaugaacaaacuguuugaaagaacaaagaagcaacugagggaaaaugcugaggauaugggcaaugguuguuucaaaauauaccacaaaugugacaaugccugcauagggucaaucaaaaauggaacuuaugaccaugauguauacagagaugaagcauuaaacaaccgguuccagaucaaagguguugagcugaagucaggauacaaagauuggauccuauggauuuccuuugccauaucauguuuuuugcuuuguguugcuuuguugggguucaucaugugggccugccaaaaaggcaacauuaggugcaacauuugcauuuga

SEQ ID NO: 33279 - RNA, 1701 nt, Artificial Sequence
  derived and/or modified CDS sequence (wt) from hemagglutinin__InfluenzaA__ABI30821
augaagacuaucauugcuuugagcuacauucuaugucugguuuucgcucaaaaacuucccggaaaugacaacagcacggcaacgcugugccuugggcaccaugcaguaccaaacggaacgauagugaaaacaaucacgaaugaccaaauugaaguuacuaaugcuacugagcugguucagaguuccucaacagguggaauaugcgacaguccucaucagauccuugauggagaaaacugcacacuaauagaugcucuauugggagacccucagugugauggcuuccaaaauaagaaaugggaccuuuuuguugaacgcagcaaagccuacagcaacuguuacccuuaugaugugccggauuaugccucccuuaggucacuaauugccucauccggcacacuggaguuuaacaaugaaagcuucaauuggacuggagucacucaaaauggaacaagcucugcuugcaaaaggagaucuaauagcaguuucuuuaguagauugaauugguugacccacuuaaaauucaaauacccagcauugaacguggcuaugccaaacaaugaagaauuugacaaauuguacauuugggggguucaccacccggguacauacaaugaccaaaucagccuauaugcucaagcaucaggaagaaucacagucucuaccaaaagaagccaacaaacuguaaucccgaauaucgggucuagacccaggguaagggauauccccagcagaauaagcaucuauuggacaauaguaaaaccgggagacauacuuuugauuaacagcacagggaaucuaauugcuccucgggguuacuucaaaauacgaagugggaaaagcucaauaaugagaucagaugcacccauuggcaaaugcaauucugaaugcaucacuccaaauggaagcauucccaaugacaaaccauuucaaaauguaaacaggaucacauauggggccugucccagauaugucaagcaaaacacucugaaauuggcaacagggaugcgaaauguaccagagaaacaaacuagaggcauauuuggcgcaaucgcggguuucauagaaaaugguugggagggaaugguggaugguugguacgguuucaggcaucaaaauucugagggaauaggacaagcagcagaucucaaaagcacucaagcagcaaucgaccaaaucaaugggaagcugaauagguugaucgggaaaaccaacgagaaauuccaucagauugaaaaagaauucucagaaguagaagggagaauucaggaccucgagaaauauguugaggacacuaaaauagaucucuggucauacaacgcggagcuucuuguugcccuggagaaccaacauacaauugaucuaacugacucagaaaugaacaaacuguuugaaagaacaaagaagcaacugagggaaaaugcugaggauaugggcaaugguuguuucaaaauauaccacaaaugugacaaugccugcauagggucaaucagaaauggaacuuaugaccaugauguauacagagaugaagcauuaaacaaccgguuccagaucaaagguguugagcugaagucaggauacaaagauuggauccuauggauuuccuuugccauaucauguuuuuugcuuuguguugcuuuguugggguucaucaugugggccugccaaaaaggcaacauuaggugcaacauuugcauuuga

SEQ ID NO: 33280 - RNA, 1701 nt, Artificial Sequence; identical to SEQ ID NO: 32645
  derived and/or modified CDS sequence (wt) from hemagglutinin__InfluenzaA__ABI30832

SEQ ID NO: 33281 - RNA, 1701 nt, Artificial Sequence
  derived and/or modified CDS sequence (wt) from hemagglutinin__InfluenzaA__ABI30843
augaagacuaucauugcuuugagcuacauucuaugucugguuuucgcucaaaaacuucccggaaaugacaacagcacggcaacgcugugccuugggcaccaugcaguaccaaacggaacgauagugaaaacaaucacgaaugaccaaauugaaguuacuaaugcuacugagcugguucagaguuccucaacagguggaauaugcgacaguccucaucagauccuugauggagaaaacugcacacuaauagaugcucuauugggagacccucagugugauggcuuccaaaauaagaaaugggaccuuuuuguugaacgcagcaaagccuacagcaacuguuacccuuaugaugugccggauuaugccucccuuaggucacuaauugccucauccggcacacuggaguuuaacaaugaaagcuucaauuggacuggagucacucaaaauggaacaagcucugcuugcaaaaggagaucuaauagcaguuucuuuaguagauugaauugguugacccacuuaaaauucaaauacccagcauugaacgugacuaugccuaacaaugaagaauuugacaaauuguacauuugggggguucaccacccggguacauacaaugaccaaaucagccuauaugcucaagcaucaggaagaaucacagucucuaccaaaagaagccaacaaacuguaaucccgaauaucgggucuagacccaggguaagggauauccccagcagaauaagcaucuauuggacaauaguaaaaccgggagacauacuuuugauuaacagcacagggaaucuaauugcuccucgggguuacuucaaaauacgaagugggaaaagcucaauaaugagaucagaugcacccauuggcaaaugcaauucugaaugcaucacuccaaauggaagcauucccaaugacaaaccauuucaaaauguaaacaggaucacauauggggccugucccagauauguuaagcaaaacacucugaaauuggcaacagggaugcgaaauguaccagagaaacaaacuagaggcauauuuggcgcaaucgcggguuucauagaaaaugguugggagggaaugguggaugguugguacgguuucaggcaucaaaauucugagggaauaggacaagcagcagaucucaaaagcacucaagcagcaaucgaccaaaucaaugggaagcugaauagguugaucgggaaaaccaacgagaaauuccaucagauugaaaaagaauucucagaaguagaagggagaauucaggaccucgagaaauauguugaggacacuaaaauagaucucuggucauacaacgcggagcuucuuguugcccuggagaaccaacauacaauugauuuaacugacucagaaaugaacaaacuguuugaaagaacaaggaagcaacugagggaaaaugcugaggauaugggcaaugguuguuucaaaauauaccacaaaugugacaaugccugcauagggucaaucagaaauggaacuuaugaccaugauguauacagagaugaagcauuaaacaaccgguuccagaucaaagguguugagcugaagucaggauacaaagauuggauccuauggauuuccuuugccauaucauguuuuuugcuuuguguugcuuuguugggguucaucaugugggccugccaaaaaggcaacauuaggugcaacauuugcauuuga

SEQ ID NO: 33282 - RNA, 1701 nt, Artificial Sequence
  derived and/or modified CDS sequence (wt) from hemagglutinin__InfluenzaA__ABI30865
augaagacuaucauugcuuugagcuacauuuuaugucugguuuucgcucaaaaacuucccggaaaugacaacagcacagcaacgcugugccugggacaccaugcagugccaaacggaacgcuagugaaaacaaucacgaaugaucaaauugaagugacuaaugcuacugagcugguucagaguuccucaacagguagaauaugcgacaguccucaccgaauccuugauggaaaaaacugcacacugauagaugcucuauugggagacccucauugugauggcuuccaaaauaaggaaugggaccuuuuuguugaacgcagcaaagcuuacagcaacuguuacccuuaugaugugccggauuaugccucccuuaggucacuaguugccucaucaggcacccuagaguuuaucaaugaagacuucaauuggacuggaguagcucaggaugggaaaagcuaugcuugcaaaaggggaucuguuaacaguuucuuuaguagauugaauugguugcacaaauuagaauacaaauauccagcgcugaacgugacuaugccaaacaauggcaaauuugacaaauuguacauuugggggguucaccacccgagcacggacagugaccaaaccagccuauauguucgagcaucagggagagucacagucucuaccaaaagaagccaacaaacuguaaucccgaauaucgggucuagacccuggguaaggggucuguccaguagaauaagcaucuauuggacaauaguaaaaccgggagacauacuuuugauuaauagcacagggaaucuaauugcuccucgggguuacuucaaaauacgaaaugggaaaagcucaauaaugaggucagaugcacccauuggcaacugcaguucugaaugcaucacuccaaauggaagcauucccaaugacaaaccuuuucaaaauguaaacaggaucacauauggggccugccccagauauguuaagcaaaacacucugaaauuggcaacagggaugcggaauguaccagagaaacaaacuagaggcauauucggcgcaaucgcagguuucauagaaaaugguugggagggaaugguagacgguugguacgguuucaggcaucaaaauucugagggcacaggacaagcagcagaucuuaaaagcacucaagcagcaaucgaccaaaucaacgggaaacugaauagguuaaucgagaaaacgaacgagaaauuccaucaaaucgaaaaagaauucucagaaguagaagggagaauucaggaccucgagaaauauguugaagacacuaaaauagaucucuggucuuacaacgcggagcuucuuguugcccuggagaaccaacauacaauugaucuaacugacucagaaaugaacaaacuguuugaaaaaacaaggaagcaacugagggaaaaugcugaggacaugggcaaugguugcuucaaaauauaccacaaaugugacaaugccugcauagggucaaucagaaauggaacuuaugaccaugauguauacagagacgaagcauuaaacaaccgguuccagaucaaagguguugagcugaagucaggauacaaagauuggauccuauggauuuccuuugccauaucaugcuuuuugcuuuguguuguuuugcugggguucauuaugugggccugccaaaaaggcaacauuaggugcaacauuugcauuuga

SEQ ID NO: 33283 - RNA, 1707 nt, Artificial Sequence
  derived and/or modified CDS sequence (wt) from hemagglutinin__InfluenzaA__ABI36155
auggagaaaauagugcuucuucuugcaacagucagucuuguuaaaagugaucagauuugcauugguuaccaugcaaacaauucaacagagcagguugacacaauaauggaaaagaacgucacugucacacaugcccaagacauacuggaaaagacacacaacgggaagcucugcgaucuagauggagugaagccucuaauuuuaagagauuguaguguagcuggauggcuccucgggaacccaaugugugacgaauucaucaauguaccggaauggucuuacauaguggagaaggccaauccagccaauggccucuguuacccagggaauuucaacgacuaugaagaacugaaacaccuauugagcagaauaaaucauuuugaaaaacuucagauaauccccaaaaguucuugguccgaucaugaagccucauuaggggugagcucagcauguccauaccugggaagguccuccuucuuuagaaaugugguauggcuuaucaaaaagaacaauacauacccaacaauaaagagaagcuacaauaauaccaaccaagaagaucuuuugguacugugggggauucaccauccuaaugaugcagcagagcagacaaggcuauaucaaaacccaaccacuuauauuuccguugggacaucaacacuaaaccagagauugguaccaaaaauagcuacuagauccaaaguaaaugggcaaaguggaaggauggaauucuucuggacaauuuuaaaaccgaaugaugcaaucaacuucgagaguaauggaaauuucauugcuccagaauaugcauacaaaauuguaaagaaaggggacucugcaauuaugaaaagugaauuggaauauggugacugcaacaccaagugucaaacuccaaugggggcgauaaacucuaguaugccacuccacaacauacacccucucaccaucggggaaugccccaaauaugugaagucaaacagauuaguccuugcgacugggcucagaaauagcccucaaagagagagaagaagaaaaaagagaggacuauuuggagcuauagcagguuuuauagaagggggauggcagggaaugguagaugguugguauggguaccaccauagcaaugagcaggggaguggguacgcugcagacaaagaauccacucaaaaggcaauagauggagucaccaauaaggucaacucgaucauugacaaaaugaacacucaguuugaggccguuggaagggaauuuaauaaccuagaaaggagaauagagaauuuaaacaagaaaauggaagauggauuccuagaugucuggacuuauaaugcugaacuacugguucucauggaaaaugagagaacuuuggacuuucaugauucaaauguuaagaaccucuaugacaagguccgauuacagcuuagggauaaugcaaaggagcugggcaaugguuguuucgaguucuaucacaaaugugauaaugaauguauggaaaguauaagaaacggaacguauaacuacccgcaguauucagaagaagcaagauuaaaaagagaggaaauaagcggaguaaaacuggaaucaauaggaauuuaccaaauacugucaauuuauucaacaguggcgaguucccuagcacuggcaaucaugauggcuggucuaucuuuauggaugugcuccaauggaucguuacaaugcagaguuugcauuuaa

SEQ ID NO: 33284 - RNA, 1707 nt, Artificial Sequence
  derived and/or modified CDS sequence (wt) from hemagglutinin__InfluenzaA__ABI36166
auggagaaaauagugcuucuucuugcaacagucagucuuguuaaaagugaucagauuugcauugguuaccaugcaaacaauucaacagagcagguugacacaauaauggaaaagaacgucacugucacacaugcccaagacauacuggaaaagacacacaacgggaagcucugcgaucuagauggagugaagccucuaauuuuaagagauuguaguguagcuggauggcuccucgggaacccaaugugugacgaauucaucaauguaccggaauggucuuacauaguggagaaggccaauccagccaauggccucuguuacccagggaauuucaacgacuaugaagaacugaaacaccuauugagcagaauaaaucauuuugaaaaacuucagauaauccccaaaaguucuugguccgaucaugaagccucauuaggggugagcucagcauguccauaccugggaagguccuccuucuuuagaaaugugguauggcuuaucaaaaagaacaauacauacccaacaauaaagagaagcuacaauaauaccaaccaagaagaucuuuugguacugugggggauucaccauccuaaugaugcagcagagcagacaaggcuauaucaaaacccaaccacuuauauuuccguugggacaucaacacuaaaccagagauugguaccaaaaauagcuacuagauccaaaguaaaugggcaaaguggaaggauggaauucuucuggacaauuuuaaaaccgaaugaugcaaucaacuucgagaguaauggaaauuucauugcuccagaauaugcauacaaaauuguaaagaaaggggacucugcaauuaugaaaagugaauuggaauauggugacugcaacaccaagugucaaacuccaaugggggcgauaaacucuaguaugccauuccacaacauacacccucucaccaucggggaaugccccaaauaugugaagucaaacagauuaguccuugcgacugggcucagaaauagcccucaaagagagagaagaagaaaaaagagaggacuauuuggagcuauagcagguuuuauagaagggggauggcagggaaugguagaugguugguauggguaccaccauagcaaugagcaggggaguggguacgcugcagacaaagaauccacucaaaaggcaauagauggagucaccaauaaggucaacucgaucauugacaaaaugaacacucaguuugaggccguuggaagggaauuuaauaaccuagaaaggagaauagagaauuuaaacaagaaaauggaagauggauuccuagaugucuggacuuauaaugcugaacuacugguucucauggaaaaugagagaacuuuggacuuucaugauucaaauguuaagaaccucuaugacaagguccgauuacagcuuagggauaaugcaaaggagcugggcaaugguuguuucgaguucuaucacaaaugugauaaugaauguauggaaaguauaagaaacggaacguauaacuacccgcaguauucagaagaagcaagauuaaaaagagaggaaauaagcggaguaaaacuggaaucaauaggaauuuaccaaauacugucaauuuauucaacaguggcgaguucccuagcacuggcaaucaugauggcuggucuaucuuuauggaugugcuccaauggaucguuacaaugcagaguuugcauuuaa

SEQ ID NO: 33285 - RNA, 1707 nt, Artificial Sequence; identical to SEQ ID NO: 33284
  derived and/or modified CDS sequence (wt) from hemagglutinin__InfluenzaA__ABI36177

SEQ ID NO: 33286 - RNA, 1707 nt, Artificial Sequence
  derived and/or modified CDS sequence (wt) from hemagglutinin__InfluenzaA__ABI36406
auggagaaaauagugcuucuucuugcaacagucagucuuguuaaaagugaucagauuugcauugguuaccaugcaaacaauucaacagagcagguugacacaauaauggaaaagaacgucacugucacacaugcccaagacauacuggaaaagacacacaacgggaagcucugcgaucuagauggagugaagccucuaauuuuaagagauuguaguguagcuggauggcuccucgggaacccaaugugugacgaauucaucaauguaccggaauggucuuacauaguggagaaggccaauccagccaauggccucuguuacccagggaauuucaacgacuaugaagaacugaaacaccuauugagcagaauaaaucauuuugaaaaacuucagauaauccccaaaaguucuugguccgaucaugaagccucauuaggggugagcucagcauguccauaccugggaagguccuccuucuuuagaaaugugguauggcuuaucaaaaagaacaauacauacccaacaauaaagagaagcuacaauaauaccaaccaagaagaucuuuugguacugugggggcuucaccauccuaaugaugcagcagagcagacaaggcuauaucaaaacccaaccacuuauauuuccguugggacaucaacacuaaaccagagauugguaccaaaaauagcuacuagauccaaaguaaaugggcaaaguggaaggauggaauucuucuggacaauuuuaaaaccgaaugaugcaaucaacuucgagaguaauggaaauuucauugcuccagaauaugcauacaaaauuguaaagaaaggggacucugcaauuaugaaaagugaauuggaauauggugacugcaacaccaagugucaaacuccaaugggggcgauaaacucuaguaugccauuccacaacauacacccucucaccaucggggaaugccccaaauaugugaagucaaacagauuaguccuugcgacugggcucagaaauagcccucaaagagagagaagaagaaaaaagagaggacuauuuggagcuauagcagguuuuauagaagggggauggcagggaaugguagaugguugguauggguaccaccauagcaaugagcaggggaguggguacgcugcagacaaagaauccacucaaaaggcaauagauggagucaccaauaaggucaacucgaucauugacaaaaugaacacucaguuugaggccguuggaagggaauuuaauaaccuagaaaggagaauagagaauuuaaacaagaaaauggaagauggauuccuagaugucuggacuuauaaugcugaacuacugguucucauggaaaaugagagaacuuuggacuuucaugauucaaauguuaagaaccucuaugacaagguccgauuacagcuuagggauaaugcaaaggagcugggcaaugguuguuucgaguucuaucacaaaugugauaaugaauguauggaaaguauaagaaacggaacguauaacuacccgcaguauucagaagaagcaagauuaaaaagagaggaaauaagcggaguaaaacuggaaucaauaggaauuuaccaaauacugucaauuuauucaacaguggcgaguucccuagcacuggcaaucaugauggcuggucuaucuuuauggaugugcuccaauggaucguuacaaugcagaguuugcauuuaa

SEQ ID NO: 33287 - RNA, 1707 nt, Artificial Sequence
  derived and/or modified CDS sequence (wt) from hemagglutinin__InfluenzaA__ABI36450
auggagaaaauagugcuucuucuugcaauagucagucuuguuaaaagugaucagauuugcauugguuaccaugcaaacaauucaacagagcagguugacacaaucauggaaaagaacguuacuguuacacaugcccaagacauacugggaaagacacacaacgggaagcucugcgaucuagauggagugaagccucuaauuuuaagagauuguaguguagcuggauggcuccucgggaacccaaugugugacgaauucaucaauguaccggaauggucuuacauaguggagaaggccaauccaaccaaugaccucuguuacccagggaguuucaacgacuaugaagaacugaaacaccuauugagcagaauaaaccauuuugagaaaauucaaaucauccccaaaaguucuugguccgaucaugaagccucaucaggagugagcucagcauguccauaccugggaaguccuuccuuuuuuagaaaugugguauggcuuaucaaaaagaacaguacauacccaacaauaaagacaagcuacaauaauaccaaccaagaagaucuuuugguacuguggggaauucaccauucuaaugaugcggcagagcagacaaggcuauaucaaaacccaaccaccuauauuuccauugggacaucaacacuaaaccagagauugguaccaaaaauagcuacuagauccaaaguaaacgggcaaaguggaaggauggaguucuucuggacaauuuuaaaaccuaaugaugcaaucaacuucgagaguaauggaaauuucauugcuccagaauaugcauacaaaauugucaagaaaggggacucagcaauuaugaaaagugaauuggaauaugguaacugcaacaccaagugucaaacuccaaugggggcaauaaacucuaguaugccauuccacaacauacacccucucaccaucggggaaugccccaaauaugugaaaucaaacagauuaguccuugcaacagggcucagaaauagcccucaaagagagagcagaagaaaaaagagaggucuauuuggagcuauagcaggcuuuauagagggaggauggcagggaaugguagaugguugguauggguaccaccauagcaaugagcaggggaguggguacgcugcagacaaagaauccacucaaaaggcaauagauggagucaccaauaaggucaacucaauuauugacaaaaugaacacucaguuugaggccguuggaagggaauuuaauaacuuagaaaggagaauagagaauuuaaacaagaagauggaagacggguuucuagauguuuggacuuauaaugccgaacuucugguucucauggaaaaugagagaacucuagacuuucaugacucgaauguuaagaaccucuacgacaagguccgacuacagcuuagggauaaugcaaaggagcuggguaacgguuguuucgaguucuaucacaaaugugauaaugaauguauggaaaguauaagaaacggaacguacaacuauccgcaguauucagaagaagcaagauuaaaaagagaggaaauaagugggguaaaauuggaaucaauaggaacuuaccaaauacugucaauuuauucaacaguggcgaguucccuagcacuggcaaucaugauagcuggucuaucuuuauggaugugcuccaauggaucguuacaaugcagaauuugcauuuaa

SEQ ID NO: 33288 - RNA, 1707 nt, Artificial Sequence
  derived and/or modified CDS sequence (wt) from hemagglutinin__InfluenzaA__ABI49396
auggagaaaauagugcuucuucuugcaauagucagucuuguuaaaagugaucagauuugcauugguuaccaugcaaacaauucaacagagcagguugacacaaucauggaaaagaacguuacuguuacacaugcccaagacauacugggaaaaacacacaacgggaagcucugcgaucuagauggagugaagccucuaauuuuaagagauuguaguguagcuggauggcuccucgggaacccaaugugugacgaauucaucaauguaccggaauggucuuacauaguggagaaggccaauccaaccaaugaccucuguuacccagggaguuucaacgacuaugaagaacugaaacaucuauugagcagaauaaaccauuuugagaaaauucaaaucauccccaaaaguucuugguccgaucaugaagccucaucaggagugagcucagcauguccauaccugggaagucccuccuuuuuuagaaaugugguauggcuuaucaaaaagaacaguacauacccaacaauaaagaaaagcuacaauaauaccaaccaagaagaucuuuugguacuguggggaauucaccauccuaaugaugcggcagagcagacaaggcuauaucaaaacccaaccaccuauauuuccauugggacaucaacacuaaaccagagauugguaccaaaaauagcuacuagauccaaaguaaacgggcaaaguggaaggauggaguucuucugggcaauuuuaaaaccuaaugaugcaaucaacuucgagaguaauggaaauuucauugcuccagaauaugcauacaaaauugucaagaaaggggacucagcaauuaugaaaagugaauuggaauaugguaacugcaacaccaagugucaaacuccaaugggggcgauaaacucuaguaugccauuccacaacauacacccucucaccaucggggaaugccccaaauaugugaaaucaaacagauuaguccuugcaacagggcucagaaauagcccacaaagagagagcagaagaaaaaagagaggacuauuuggagcuauagcagguuuuauagagggaggauggcagggaaugguagauggcugguauggguaccaccauagcaaugagcaggggaguggguacgcugcagacaaagaauccacucaaaaggcaauagauggagucaccaauaaggucaacucaauuauugacaaaaugaacacucaguuugaggcuguuggaagggaauuuaauaacuuagaaaggagaauagagaauuuaaacaagaagauggaagacggguuucuagauguuuggacuuauaaugccgaacuucugguucucauggaaaaugagagaacucuagacuuucaugacucaaauguuaagaaccucuacgacaagguccgacuacagcuuagggauaaugcaaaagagcuggguaacgguuguuucgaguucuaucacaaaugugauaaugaauguauggaaaguauaagaaacggaacguacaacuauccgcaguauucagaagaagcaagauuaaaaagagaggaaauaagugggguaaaauuggaaucaauaggaacuuaccaaauacugucaauuuauucaacaguagcgaguucccuagcacuggcaaucaugauagcuggucuaucuuuauggaugugcuccaauggaucguuacaaugcagaauuugcauuuaa

SEQ ID NO: 33289 - RNA, 1704 nt, Artificial Sequence
  derived and/or modified CDS sequence (wt) from hemagglutinin__InfluenzaA__ABI85000
augaauacucaaauuuuggcauucauugcuuguaugcugauuggaacuaaaggagacaaaauaugucuugggcaccaugcuguggcaaaugggacaaaagugaacacacuaacagagaggggaauugaaguagucaaugccacggagacgguggaaacuguaaauauuaagaaaauaugcacucaaggaaaaaggccaacagaucugggacaauguggacuucuaggaacccuaauaggaccuccccaaugcgaucaauuucuggaguuugacgcuaauuugauaauugaacgaagagaaggaaccgaugugugcuaucccgggaaguucacaaaugaagaaucacugaggcagauccuucgagggucaggaggaauugauaaagagucaauggguuucaccuauaguggaauaagaaccaauggggcgacgagugccugcagaagaucagguucuucuuucuaugcggagaugaaaugguuacugucgaauucagacaaugcggcauuuccccaaaugacuaagucguauaggaaucccaggaacaaaccagcucugauaaucuggggagugcaucacucuggaucagcuacugagcagaccaaacucuauggaaguggaaacaaguugauaacaguaggaagcucgaaauaccagcaaucauucacuccaaguccgggagcacggccacaagugaauggacaaucaggaaggauugauuuucauuggcuacuccuugaccccaaugacacagugaccuucacuuucaauggggcauucauagccccugacagggcaaguuucuuuagaggagaaucgcuaggaguccagagugauguuccuuuggauucugguugugaaggggauugcuuccacaguggggguacgauagucaguucccugccauuccaaaacaucaacccuagaacaguggggaaaugcccucgauaugucaaacagacaagccuccuuuuggcuacaggaaugagaaacgucccagagaaccccaagcaggccuaccagaaacggaugaccagaggccuuuuuggagcgauugcuggauucauagagaauggaugggaaggucucaucgauggaugguaugguuucagacaucaaaaugcacaaggagaaggaacugcagcugacuacaaaagcacccaaucugcaauagaucagaucacaggcaaauugaaucgucugauugacaaaacaaaccagcaguuugaacugauagacaaugaauucagugagauagaacaacaaaucgggaaugucauuaacuggacacgagacucaaugacugagguauggucguauaaugcugagcuguugguggcaauggagaaucagcauacaauagaucuugcagacucagaaaugaacaaacuuuacgaacgcgucagaaaacaacuaagggaaaaugcugaagaagauggaacuggaugcuuugagauauuccauaagugugaugaucaguguauggagagcauaaggaacaacacuuaugaccauacccaauacaggacagagucauugcagaauagaauacagauagacccagugaaauugaguaguggauacaaagacauaaucuuaugguuuagcuucggggcaucauguuuucuucuucuagccauugcaaugggauugguuuucauuugcauaaagaauggaaacaugcggugcacuauuuguauauag

SEQ ID NO: 33290 - RNA, 1701 nt, Artificial Sequence
  derived and/or modified CDS sequence (wt) from hemagglutinin__InfluenzaA__ABI92291
augaagacuaucauugcuuugagcuacauuuuaugucugguuuucgcucaaaaacuucccggaaaugacaacagcacggcaacgcugugccugggacaccaugcagugccaaacggaacgcuagugaaaacaaucacgaaugaccaaauugaagugacuaaugcuacugagcugguucagaauuccucaacagguaggauaugugacaguccucaccgaauccuugaugggaaaaacugcacacugauagaugcucuauugggagacccucauugugauggcuuccaaaauaaggaaugggaccuuuuuguugaacgcagcaaagcuuacagcaacuguuacccuuaugaugugccggauuaugccucccuuaggucacuaguugccucauccggcacccuggaguuuaacaaugaaagcuucaauuggacuggagucgcucagaauggaacaagcuaugcuugcaaaaggagaucuguuaaaaguuucuuuaguagauugaauugguugcacaaauuagaauacaaauauccagcacugaacgugacuaugccaaacaaugauaaauuugacaaauuguacauuugggggguucaccacccgaguacggacagugaccaaaccagccuauauguucaagcaucagggagagucacagucucuaccaaaagaagccaacaaacuguaaucccgaauaucggaucuagacccuggguaaggggugucuccagcagaauaagcaucuauuggacaauaguaaaaccgggagacauacuuuugauuaacagcacagggaaucuaauugcuccucgggguuacuucaaaauacgaagugggaaaagcucaauaaugaggucagaugcacccauuggcaacugcaauucugaaugcaucacuccaaauggaagcauucccaaugacaaaccauuucaaaauguaaacaggaucacauauggggccugucccagauauguuaagcaaaacacucugaaauuggcaacagggaugcggaauguaccagagaaacaaacuagaggcauauucggcgcaaucgcagguuucauagaaaaugguugggagggaaugguagacgguugguacgguuucaggcaucaaaauucugagggcacaggacaagcagcggaucuuaaaagcacucaagcagcaaucaaccaaaucaacgggaaacugaauagguuaaucgagaaaacgaacgagaaauuccaucaaaucgaaaaagaauucucagaaguagaagggagaauucaggaccucgagaaauauguugaagacacuaaaauagaucucuggucguacaacgcggagcuucuuguugcccuggagaaccaacauacaauugaucuaacugacucagaaaugaacaaacuguuugaaagaacaaggaagcaacugagggaaaaugcugaggacaugggcaaugguugcuucagaauauaccacaaaugugacaaugccugcauagggucaaucagaaauggaacuuaugaccaugauguauacagagacgaagcauuaaacaaccgguuccagaucaaagguguugagcugaagucaggauacaaagauuggauccuauggauuuccuuugccauaucauguuuuuugcuuuguguuguuuugcugggguucaucaugugggccugccaaaaaggcaacauuaggugcaacauuugcauuuga

SEQ ID NO: 33291 - RNA, 1701 nt, Artificial Sequence
  derived and/or modified CDS sequence (wt) from hemagglutinin__InfluenzaA__ABI92302
augaaagcaaaacugcugguccuguuaugugcacuuucagcuacagaugcagacacaauauguauaggcuaccaugcgaacaacucaaccgauacuguugacacaguacucgaaaagaacgugacagugacacacucugucaaccuacuugaggacagucacaacggaaaacuaugcagacuaaaaggaauagccccacuacaauuggggaaaugcagcauugccggauggaucuuaggaaacccagaaugugaaucacuguuuucuaagaaaucaugguccuacauugcagaaacaccaaacuccgagaaugggacauguuacccaggguauuucgccgacuaugaggaacugagggagcaauugaguucaguaucaucauucgagagauucgaaauauuccccaaggaaaguucauggcccaaacacaacguaaccagaggaguaacggcaucaugcucccauaaggggaaaagcaguuuuuacagaaauuugcuauggcugacggagaaaaauggcucguacccaaaucugagcaaguccuaugugaacaacaaagagaaagaaguccuuguacuaugggguguucaucacccgucuaacauagaggaccaaaagaccaucuaucguaaagaaaaugcuuaugucucuguagugucuucacauuauaacagaagauucaccccagaaauagcaaaacgacccaaaguaagagaucaagaagggagaauuaacuacuacuggacucugcuggaacccggggacacaauaauauuugaggcaaauggaaaucuaauagcgccaugguaugcuuucgcacugaguagaggcuuugggucaggaaucaucaccucaaacgcaucaauggaugaaugugacgcgaagugucaaacaccccagggagcuauaaacaguagucuuccuuuccagaauguacacccagucacaauaggagagugcccaaaauacgucaggaguacaaaauuaaggauggucacaggacuaaggaacauuccauccauucaauccagagguuuguuuggagccauugcugguuucauugaagggggauggacuggaaugauagauggaugguaugguuaucaucaucagaaugaacagggauccggcuaugcugcagaucaaaaaagcacacaaaaugccauuaacgggauuacaaacaaggugaacucuguuaucgagaaaaugaacauucaauucacagcuguagguaaagaauucaacaaauuagaaaaaaggauggaaaacuuaaauaaaaagguugaugauggguuucuggacauuuggacauauaaugcagaauuguugguucuacuggaaaaugaaaggacuuuggauuuucaugacucaaaugugaagaaccuguaugagaagguaaaaagccaauuaaagaauaaugccaaagaaauaggaaacggguguuuugaauucuaccacaaguguaacaaugaaugcauggaaaguguaaaaaauggaacuuaugacuauccaaaauauucagaggaaucaaaguuaaacagggaaaaaauugauggagugaaauuggaaucaaugggagucuaucagauucuggcgaucuacucaacugucgccaguucacuggugcuuuuggucucccugggggcaaucagcuucuggauguguucuaaugggucuuugcagugcagaauaugcaucuga

SEQ ID NO: 33292 - RNA, 1701 nt, Artificial Sequence
  derived and/or modified CDS sequence (wt) from hemagglutinin__InfluenzaA__ABI92313
augaaagcaaaacuacuaguccuguugugugcauuuacagcuacauaugcagacacaauauguauaggcuaccaugcgaacaacucaaccgacacuguugacacaguacuugagaagaacgugacagugacacacucugucaaccuacuugaggacagucacaacggaaaacuaugccgacuaaaaggaacagccccacuacaauuggguaauugcagcguugccggauggaucuuaggaaacccagaaugcgaaucacuguuuucuaaggaaucaugguccuacauugcagaaacaccaaacccugagaauggaacauguuacccaggguauuucgccgacuaugaggaacugagggagcaauugagcucaauaucaucauucgagagauucgaaauauuccccaaggaaagcucauggcccaaccacaccguaaccaaaggagugacggcaucaugcucccauaaugggaaaagcaguuuuuacaaaaauuugcuauggcugacggaaaagaauggcuuguacccaaaucugagcaaguccuauguaaacaacaaggagaaagaaguccuuguacuaugggguguucaucacccgucuaacauaggggaccaaagggccaucuaucauacagaaaaugcuuaugucucuguagugucuucacauuauagcagaagauucaccccagaaauaacaaaaagacccaaaguaagagaucaagaagggagaauuaacuacuacuggacucugcuggaacccggggacacaauaauauuugaggcaaauggaaaucuaauagcgccaugguacgcuuucgcacugaguagaggcuuugggucaggaaucaucaccucaaacgcaucaaugggugaaugugacgcuaagugucaaacaccccaaggagcuauaaacaguagucuuccuuuccagaauguacacccagucacaauaggagagugucccaaguaugucaggaguacaaaauuaaggaugguuacaggacuaagaaacaucccauccauucaaucuagagguuuguuuggagccauugccgguuucauugaagggggguggacuggaaugauagauggaugguaugguuaucaucaucagaaugaacaaggaucuggcuaugcugcagaccaaaaaagcacacaaaaugccauugaugggauuacaaacaaggugaauucuguaaucgagaaaaugaacacucaauucacagcuguaggcaaagaauucaacaaauuagagagaaggauggaaaacuuaaauaagaaaguugaugauggauuucuggacauuuggacauauaaugcagaguuguugguucuccuggaaaaugaaaggacuuuggauuuucaugacucaaaugugaagaaucuguaugagaaaguaaaaaaccaauugaagaauaaugccaaagaaaucgggaacggguguuuugaauucuaucacaaguguaacaaugaaugcauggaaagugugaaaaauggaacuuaugacuauccaaaauauuccgaagaaucaaaguuaaacagggaaaaaauugauggagugaaauuggaaucaaugggagucuaucauauucuggcgaucuacucaacugucgccaguucacuggugcuuuuggucucccugggggcaaucaguuucuggauguguucuaaugggucuuugcaguguagaauaugcaucuga

SEQ ID NO: 33293 - RNA, 1701 nt, Artificial Sequence
  derived and/or modified CDS sequence (wt) from hemagglutinin__InfluenzaA__ABI92324
augaagacuaucauugcuuugagcuacauuuuaugucugguuuucgcucaaaaacuucccggaaaugacaacagcacagcaacgcuaugccugggacaccaugcagugccaaacggaacgcuagugaaaacaaucacgaaugaucaaauugaagugacuaaugcuacugagcugguucagaguuccucaacagguagaauaugcgacaguccucaccgaauccuugauggaaaaaacugcacacugauagaugcucuauugggagacccucauugugauggcuuccaaaauaaggaaugggaccuuuuuguugaacgcagcaaagcuuacagcaacuguuacccuuaugaugugccggauuaugccucccuuaggucacuaguugccucaucaggcacccuggaguuuaucaaugaagacuucaauuggacuggagucgcucaggaugggaaaagcuaugcuugcaaaaggggaucuguuaacaguuucuuuaguagauugaauugguugcacaaauuagaauacaaauauccagcgcugaacgugacuaugccaaacaauggcaaauuugacaaauuguacauuugggggguucaccacccgagcacggacagugaccaaaccagccuauauguucgagcaucagggaaagucacagucucuaccaaaagaagccaacaaacuguaaucccgaauaucggguuuagacccuggguaaggggucuguccaguagaauaagcaucuauuggacaauaguaaaaccgggagacauacuuuugauuaauagcacagggaaucuaauugcuccucgggguuacuucaaaauacgaaaugggaaaagcucaauaaugaggucagaugcacccauuggcaacugcaguucugaaugcaucacuccaaauggaagcauucccaaugacaaaccuuuucaaaauguaaacaggaucacauauggggccugccccagauauguuaagcaaaacacucugaaguuggcaacagggaugcggaauguaccagagaaacaaacuagaggcauauucggcgcaaucgcagguuucauagaaaaugguugggagggaaugguagacgguugguacgguuucaggcaucaaaauucugagggcacaggacaagcagcagaucuuaaaagcacucaagcagcaaucgaccaaaucaacgggaaacugaauagguuaaucgagaaaacgaacgagaaauuccaucaaaucgaaaaagaauucucagaaguagaagggagaauucaggaccucgagaaauauguugaagacacuaaaauagaucucuggucuuacaacgcggggcuucuuguugcccuggagaaccaacauacaauugaucuaacugacucagaaaugaacaaacuguuugaaagaacaaggaagcaacugagggaaaaugcugaggacaugggcaaugguugcuucaaaauauaccacaaaugugacaaugccugcauagggucaaucagaaauggaacuuaugaccaugauguauacagagacgaagcauuaaacaaccgguuccagaucaaagguguugagcugaagucaggauacaaagauuggauccuauggauuuccuuugccauaucaugcuuuuugcuuuguguuguuuugcugggguucaucaugugggccugccaaaaaggcaacauuaggugcaacauuugcauuuga

SEQ ID NO: 33294 - RNA, 1701 nt, Artificial Sequence
  derived and/or modified CDS sequence (wt) from hemagglutinin__InfluenzaA__ABI92335
augaagacuaucauugcuuugagcuacauuuuaugccugguuuucgcucaaaaacuucccggaaaugacaacagcacggcaacgcugugccuggggcaccaugcagugccaaacggaacgcuagugaaaacaaucacgaaugaccaaauugaaguaacuaaugcuacugagcugguucagaguuccucaacaaguagaauaugcgacaguccucaccaaauccuugauggagaaaacugcacacuaauagaugcucuauugggagacccucauugugauggcuuccaaaauaaggaaugggaccuuuuuguugaacgcagcaaagccuacagcaacuguuacccuuaugaugugccggauuaugucucccuuaggucacuaguugccucaucaggcacgcuggaguuuaacaaugaaagcuucaauuggacuggagucgcucagaauggaacaagcucugcuugcaaaaggagaucugauaaaaguuucuuuaguagauugaauugguugcaccaauuaaaauacaaauauccagcacugaacgugacuaugccaaacaaugaaaaauuugacaaauuguacauuugggggguucaccacccggguacagacagugaccaaaucagccuauaugcucaagcaucagggagagucacagucucuaccaaaagaagccaacaaacuguaaucccgaauaucggaucuagacccuggguaaggggugucuccagcagaauaagcaucuauuggacaauaguaaaaccgggagacauacuuuugauuaacagcacagggaaucuaauugcuccucgggguuacuucaaaauacgaagugggaaaagcucaauaaugaggucagaugcacccauuggcaaaugcaauucugaaugcaucacuccaaauggaagcauucccaaugacaaaccauuucaaaauguaaacaggaucacauauggggccugucccagauauguuaagcaaaacacucugaaauuggcaacagggaugcggaauguaccagagaaacaaacuagaggcauauucggugcaaucgcgggcuucauagaaaaugguugggagggaaugauggacgguugguacgguuucaggcaucaaaauucugagggcacagggcaagcagcagaucuuaaaagcacucaagcagcaaucaaccaaaucaacgggaaacugaauagguuaaucgagaaaacgaacgagaaauuccaucaaauugaaaaagaauucucagaaguagaagggagaauucaggaccucgagaaauauguugaggacacuaaaauagaucucuggucguacaaugcggagcuucuuguugcccuggagaaccaacauacaauugaucuaacugacucagaaaugaacaaacuguuugaaagaacaaagaagcaacugagggaaaaugcugaggauaugggcaaugguuguuucaaaauauaccacaaaugugacaaugccugcauggggucaaucagaaauggaacuuaugaccaugauguauacagagacgaagcauugaacaaccgguuccagaucaaagguguugagcugaagucaggauacaaagauuggauccuauggauuuccuuugccauaucauguuuuuugcuuuguauuguuuugaugggguucaucaugugggccugccaaaaaggcaacauuaggugcaacauuugcauuuga

SEQ ID NO: 33295 - RNA, 1701 nt, Artificial Sequence
  derived and/or modified CDS sequence (wt) from hemagglutinin__InfluenzaA__ABI92346
augaagacuaucauugcuuugagcuacauuuuaugccugguuuucgcucaaaaacuucccggaaaugacaacagcacggcaacgcugugucuggggcaucaugcagugccaaacggaacgcuagugaaaacaaucacgaaugaccaaauugaaguaacuaaugcuacugagcugguucagaguuccucaacagguagaauaugcgacaguccucaccaaauccuugauggagaaaacugcacacuaauagaugcucuauugggagacccucauugugauggcuuccaaaauaaggaaugggaccuuuuuguugaacgcagcaaagccuacagcaacuguuacccuuaugaugugccggauuaugucucccuuaggucacuaguugccucaucaggcacgcuggaguuuaacaaugaaagcuucaauuggacuggagucgcucagaauggaacaagcucugcuugcaaaaggagaucugauaaaaguuucuuuaguagauugaauugguugcaccaauuaaaauacaaauauccagcacugaacgugacuaugccaaacaaugaaaaauuugacaaauuguacauuugggggguucaccacccggguacagacagugaccaaaucagccuauaugcucaagcaucggggagagucacagucucuaccaaaagaagccaacaaacuguaaucccgaauaucggaucuagacccuggguaaggggugucuccagcagaauaagcaucuauuggacaauaguaaaaccgggagacauacuuuugauuaacagcacagggaaucuaauugcuccucgggguuacuucaaaauacgaagugggaaaagcucaauaaugaggucagaugcacccauuggcaaaugcaauucugaaugcaucacuccaaauggaagcauucccaaugacaaaccauuucaaaauguaaacaggaucacauauggggcaugucccagauauguuaagcaaaacacucugaaauuggcaacagggaugcggaaugugccagagaaacaaacuagaggcauauucggugcaaucgcgggcuucauagaaaaugguugggagggaaugauggacgguugguacgguuucaggcaucaaaauucugagggcacagggcaagcagcagaucuuaaaagcacucaagcagcaaucaaccaaaucaacgggaaacugaauagguuaaucgagaaaacgaacgagaaauuccaucaaauugaaaaagaauucucagaaguagaagggagaauucaggaccucgagaaauauguugaggacacuaaaauagaucucuggucguacaaugcggagcuucuuguugcccuggagaaccaacauacaauugaucuaacugacucagaaaugaacaaacuguuugaaagaacaaagaagcaacugagggaaaaugcugaggauaugggcaaugguuguuucaaaauauaccacaaaugugacaaugccugcauagggucaaucagaaauggaacuuaugaccaugauguauacagagacgaagcauugaacaaccgguuccauaucaaagguguugagcugaagucaggauacaaagauuggguccuauggauuuccuuugccauaucauguuuuuugcuuuguauuguuuugcugggguucaucaugugggccugccaaaaaggcaacauuaggugcaacauuugcauuuga

SEQ ID NO: 33296 - RNA, 1701 nt, Artificial Sequence
  derived and/or modified CDS sequence (wt) from hemagglutinin__InfluenzaA__ABI92357
augaagacuaucauugcuuugagcuacauucuaugucugguuuucgcucaaaaacuucccggaaaugacaacagcacggcaacgcugugccuugggcaccaugcaguaccaaacggaacgauagugaaaacaaucacgaaugaccaaauugaaguuacuaaugcuacugagcugguucagaguuccucaacagguggaauaugcgacaguccucaucagauccuugauggagaaaacugcacacuaauagaugcucuauugggagacccucagugugauggcuuccaaaauaagaaaugggaccuuuuuguugaacgcagcaaagccuacagcaacuguuacccuuaugaugugccggauuaugccucccuuaggucacuaguugccucauccggcacacuggaguuuaacaaugaaagcuucaauuggacuggagucacucaaaauggaacaagcucugcuugcaaaaggagaucuaauaacaguuucuuuaguagauugaauugguugacccauuuaaaauucaaauacccagcauugaacgugacuaugccaaacaaugaaaaauuugacaaauuguacauuugggggguucaccacccggguacgaacaaugaccaaaucagccuauaugcucaagcaucaggaagaaucacagucucuaccaaaagaagccaacaaacuguaaucccgaauaucggaucuagacccaggguaagggauauccccagcagaauaagcaucuauuggacaauaguaaaaccgggagacauacuuuugauuaacagcacagggaaucuaauugcuccucgggguuacuucaaaauacgaagugggaaaagcucaauaaugagaucagaugcacccauuggcaaaugcaauucugaaugcaucacuccaaauggaagcauucccaaugacaaaccauuucaaaauguaaacaggaucacauauggggccugucccagauauguuaagcaaaacacucugaaauuggcaacagggaugcgaaauguaccagagaaacaaacuagaggcauauuuggcgcaaucgcggguuucauagaaaaugguugggagggaaugguggaugguugguacgguuucaggcaucaaaauucugagggaauaggacaagcagcagaucucaaaagcacucaagcagcaaucaaccaaaucaaugggaagcugaauagguugaucgggaaaaccaacgagaaauuccaucagauugaaaaagaauucucagaaguagaagggagaauucaggaccucgagaaauauguugaggacacuaaaauagaccucuggucauacaacgcggagcuucuuguugcccuggagaaccaacauacaauugaucuaacugacucagaaaugaacaaacuguuugaaagaacaaagaagcaacugagggaaaaugcugaggauaugggcaaugguuguuucaaaauauaccacaaaugugacaaugccugcauagggucaaucagaaauggaacuuaugaccaugauguauacagagaugaagcauuaaacaaccgguuccagaucaaagguguugagcugaagucaggauacaaagauuggauccuauggauuuccuuugccauaucauguuuuuugcuuuguguugcuuuguugggguucaucaugugggccugccaaaaaggcaacauuaggugcaacauuugcauuuga

SEQ ID NO: 33297 - RNA, 1701 nt, Artificial Sequence; identical to SEQ ID NO: 32334
  derived and/or modified CDS sequence (wt) from hemagglutinin__InfluenzaA__ABI92368

SEQ ID NO: 33298 - RNA, 1698 nt, Artificial Sequence
  derived and/or modified CDS sequence (wt) from hemagglutinin__InfluenzaA__ABI92379
augaaaguaaaacuacugguucuguuauguacauuuacagcuacauaugcagacacaauauguauaggcuaccaugccaacaacucgaccgacacuguugacacaguacuugagaagaaugugacagugacacacucugucaaccuacuugaggacagucacaauggaaaacuaugucuacuaaaaggaauagccccacuacaauuggguaauugcagcguugccggauggaucuuaggaaacccagaaugcgaauuacugauuuccaaggaaucaugguccuacauuguagaaacaccaaauccugagaauggaacauguuacccaggguauuucgccgacuaugaggagcugagggagcaauugaguucaguaucuucauuugagagguucgaaauauuccccaaagagagcucauggcccaaccacaccguaaccggaguaucagcaucaugcucccauaacgggaaaagcaguuuuuacaggaauuugcuauggcugacggggaagaaugguuuguauccaaaccugagcaaguccuaugcaaacaacaaagagaaagaaguccuuguacugugggguguucaucacccgccuaacauaggggaccaaagggcccucuaucauacagaaaaugcuuaugucucuguagugucuucacauuacagcagaagauucaccccagaaauagccaaaagacccaaggugagagaucaggaaggaagaaucaacuacuacuggacucugcuggaacccggggauacaauaauauuugaggcaaauggaaaucuaauagcgccaagguuugcuuucgcacugaguagaggcuuuggaucaggaaucaucaccucaaaugcaccaauggaugaaugugaugcgaagugucaaacaccucagggagcuauaaacagcagucuuccuuuccagaauguacacccagucacaauaggagaguguccaaaguaugucaggagugcaaaauuaagaaugguuacaggacuaaggaacaucccauccauucaauccagagguuuguuuggagccauugccgguuucauugaagggggguggacuggaaugguagaugguugguaugguuaucaccaucagaaugagcaaggaucuggguaugcugcagaucaaaaaagcacacaaaaugccauuaacgggauuacaaacaaggugaauucuguaauugagaaaaugaacacucaauucacagcugugggcaaagaauucaacaaauuggaaagaaggauggaaaacuuaaauaaaaaaguugaugauggguuucuagacauuuggacauauaacgcagaauuguugguucuacuggaaaaugaaaggacuuuggacuuccaugacuccaacgugaagaaucuguaugagaaaguaaaaagccaauuaaagaauaaugccaaagaaauaggaaacggguguuuugaauucuaucacaaguguaacgaugaaugcauggagagugugaaaaauggaacuuaugacuauccaaaauauuccgaagaaucaaaguugaacagggagagaauugauggagugaaauuggaaucaaugggagucuaucagauucuggcgaucuacucaacagucgccaguucccugguucuuuuggucucccugggggcaaucagcuucuggauguguuccaaugggucuuugcaguguagaauaugcaucuaa

SEQ ID NO: 33299 - RNA, 1701 nt, Artificial Sequence
  derived and/or modified CDS sequence (wt) from hemagglutinin__InfluenzaA__ABI92390
augaagacuaucauugcuuuuagcuacauucuaugucugguuuucgcucaaaaacuucccggaaaugacaacagcacggcaacgcugugccuugggcaccaugcaguaccaaacggaacgauagugaaaacaaucacgaaugaccaaauugaaguuacuaaugcuacugagcugguucagaguuccucaacagguggaauaugcgacaguccucaucagauccuugauggagaaaacugcacacuaauagaugcucuauugggagacccucagugugauggcuuccaaaauaagaaaugggaccuuuuuguugaacgcagcaaagccuacagcaacuguuacccuuaugaugugccggauuaugccucccuuagaucacuaguugccucauccggcacacuggaguuuaacaaugaaagcuucaauuggacuggagucacucaaaauggaacaagcucugcuugcaaaaggagaucuaauaacaguuucuuuaguagauugaauugguugacccacuuaaaauucaaauacccagcauugaacgugacuaugccaaacaaugaaaaauuugacaaauuguacauuugggggguucaccacccggguacggacaaugaccaaaccagccuauaugcucaagcaucaggaagaaucacagucucuaccaaaagaagccaacaaacuguaaccccgaauaucggaucuagacccaggguaagggauauccccagcagaauaagcaucuauuggacaauaguaaaaccgggagacauacuuuugauuaacagcacagggaaucuaauugcuccucgggguuacuucaaaauacgaagugggaaaagcucaauaaugagaucagaugcacccauuggcaaaugcaauucugaaugcaucacuccaaauggaagcauucccaaugacaaaccauuucaaaauguaaacaggaucacauauggggccugucccagauauguuaagcaaaacacccugaaauuggcaacagggaugcgaaauguaccagagaaacaaaccagaggcauauuuggcgcaaucgcggguuucauagaaaaugguugggagggaaugguggaugguugguacgguuucaggcaucaaaauucugagggaacaggacaagcagcagaucucaaaagcacucaagcagcaaucaaccaaaucaaugggaaguugaauagguugaucgggaaaaccaacgagaaauuccaucagauugaaaaagaauucucagaaguagaagggagaauucaggaccucgagaaauauguugaggacacuaaaauagaucucuggucauacaacgcggagcuucuuguugcccuggagaaccaacauacaauugaucuaacugacucagaaaugaacaaacuguuugaaagaacaaagaagcaacugagggaaaaugcugaggauaugggcaaugguuguuucaaaauauaccacaaaugugacaaugccugcauagggucaaucagaaauggaacuuaugaccaugauguauacagggaugaagcauuaaacaaccgguuccagaucaaagguguugagcugaagucaggauacaaagauuggauccuauggauuuccuuugccauaucauguuuuuugcuuuguguugcuuuguugggguucaucaugugggccugccaaaaaggcaacauuaggugcaacaucugcauuuga

SEQ ID NO: 33300 - RNA, 1701 nt, Artificial Sequence
  derived and/or modified CDS sequence (wt) from hemagglutinin__InfluenzaA__ABI92401
augaagacuaucauugcuuugagcuacauucuaugucugguuuucgcucaaaaacuucccggaaaugacaacagcacggcaacgcugugccuugggcaccaugcaguaccaaacggaacgauagugaaaacaaucacgaaugaccaaauugaaguuacuaaugcuacugagcugguucagaguuccucaacagguggaauaugcgacaguccucaucagauccuugauggagaaaacugcacacuaauagaugcucuauugggagacccucagugugauggcuuccaaaauaagaaaugggaccuuuuuguugaacgcagcaaagccuacagcaacuguuacccuuaugaugugccggauuaugccucccuuaggucacuaguugccucauccggcacacuggaguuuaacaaugaaagcuucaauuggacuggagucacucaaaauggaacaagcucugcuugcaaaaggagaucuaauaacaguuucuuuaguagauugaauugguugacccauuuaaaauucaaauacccagcauugaacgugacuaugccaaacaaugaaaaauuugacaaauuguacauuugggggguucaccacccggguacgaacaaugaccaaaucagccuauaugcucaagcaucaggaagaaucacagucucuaccaaaagaagccaacaaacuguaaucccgaauaucggaucuagacccaggguaagggauauccccagcagaauaagcaucuauuggacaauaguaaaaccgggagacauacuuuugauuaacagcacagggaaucuaauugcuccucgggguuacuucaaaauacgaagugggaaaagcucaauaaugagaucagaugcacccauuggcaaaugcaauucugaaugcaucacuccaaauggaagcauucccaaugacaaaccauuucaaaauguaaacaggaucacauauggggccugucccagauauguuaagcaaaacacucugaaauuggcaacagggaugcgaaauguaccagagaaacaaacuagaggcauauuuggcgcaaucgcggguuucauagaaaaugguugggagggaaugguggaugguugguacgguuucaggcaucaaaauucugagggaauaggacaagcagcagaucucaaaagcacucaagcagcaaucaaccaaaucaaugggaagcugaauagguugaucgggaaaaccaacgagaaauuccaucagauugaaaaagaauucucagaaguagaagggagaauucaggaccucgagaaauauguugaggacacuaaaauagaucucuggucauacaacgcggagcuucuuguugcccuggagaaccaacauacaauugaucuaacugacucagaaaugaacaaacuguuugaaagaacaaagaagcaacugagggaaaaugcugaggauaugggcaaugguuguuucaaaauauaccacaaaugugacaaugccugcauagggucaaucagaaauggaacuuaugaccaugauguauacagagaugaagcauuaaacaaccgguuccagaucaaagguguugagcugaagucaggauacaaagauuggauccuauggauuuccuuugccauaucauguuuuuugcuuuguguugcuuuguugggguucaucaugugggccugccaaaagggcaacauuaggugcaacauuugcauuuga

SEQ ID NO: 33301 - RNA, 1701 nt, Artificial Sequence
  derived and/or modified CDS sequence (wt) from hemagglutinin__InfluenzaA__ABI92412
augaagacuaucauugcuuugagcuacauucuaugucugguuuucgcucaaaaacuucccggaaaugacaacagcacggcaacgcugugccuugggcaccaugcaguaccaaacggaacgcuagugaaaacaaucacgaaugaccaaauugaaguuacuaaugcuacugagcugguucagaguuccucaacagguggaauaugcgacaguccucaucagauccuugauggagaaaacugcacacuaauagaugcucuauugggagacccucagugugauggcuuccaaaauaagaaaugggaccuuuuuguugaacgcagcaaagccuacagcaacuguuacccuuaugaugugccggauuaugccucccuuaggucacuaauugccucauccggcacacuggaguuuaacaaugaaagcuucaauuggacuggagucacucaaaauggaacaagcucugcuugcaaaaggagaucuaauagcaguuucuuuaguagauugaauugguugacccacuuaaaauucaaauacccagcauugaacgugacuaugccaaacaaugaagaauuugacaaauuguacauuugggggguucaccacccggguacauacaaugaccaaaucagccuauaugcucaagcaucaggaagaaucacagucucuaccaaaagaagccaacaaacuguaaucccgaauaucgggucuagacccaggguaagggauauccccagcagaauaagcaucuauuggacaauaguaaaaccgggagacauacuuuugauuaacagcacagggaaucuaauugcuccucgggguuacuucaaaauacgaagugggaaaagcucaauaaugagaucagaugcacccauuggcaaaugcaauucugaaugcaucacuccaaauggaagcauucccaaugacaaaccauuucaaaauauaaacaggaucacauauggggccugucccagauauguuaagcaaaacacucugaaauuggcaacagggaugcgaaauguaccagagaaacaaacuagaggcauauuuggcgcaaucgcggguuucauagaaaaugguugggagggaaugguggaugguugguacgguuucaggcaucaaaauucugagggaauaggacaagcagcagaucucaaaagcacucaagcagcaaucgaccaaaucaaugggaagcugaauagguugaucgggaaaaccaacgagaaauuccaucagauugaaaaagaauucucagaaguagaagggagaauucaggaccucgagaaauauguugaggacacuaaaauagaucucuggucauacaacgcggagcuucuuguugcccuggagaaccaacauacaauugaucuaacugacucagaaaugaacaaacuguuugaaagaacaaagaagcaacugagggaaaaugcugaggauaugggcaaugguuguuucaaaauauaccacaaaugugacaaugccugcauagggucaaucagaaauggaacuuaugaccaugauguauacagagaugaagcauuaaacaaccgguuccagaucaaagguguugagcugaagucaggauacaaagauuggauccuauggauuuccuuugccauaucauguuuuuugcuuuguguugcuuuguugggguucaucaugugggccugccaaaaaggcaacauuaggugcaacauuugcauuuga

SEQ ID NO: 33302 - RNA, 1701 nt, Artificial Sequence
  derived and/or modified CDS sequence (wt) from hemagglutinin__InfluenzaA__ABI92423
augaagacuaucauugcuuugagcuacauucuaugucugguuuucgcucaaaaacuucccggaaaugacaacagcacggcaacgcugugccuugggcaccaugcaguaccaaacggaacgauagugaaaacaaucacgaaugaccaaauugaaguuacuaaugcuacugagcugguucagaguuccucaacagguggaauaugcgacaguccucaucagauccuugauggagaaaacugcacacuaauagaugcucuauugggagacccucagugugauggcuuccaaaauaagaaaugggaccuuuuuguugaacgcagcaaagccuacagcaacuguuacccuuaugaugugccggauuaugccucccuuaggucacuaauugccucauccggcacacuggaguuuaacaaugaaagcuucaauuggacuggagucacucaaaauggaacaagcucugcuugcaaaaggagaucuaauagcaguuucuuuaguagauugaauugguugacccacuuaaaauucaaauacccagcauugaacgugacuaugccaaacaaugaagaauuugacaaauuguacauuugggggguucaccacccggguacauacaaugaccaaaucagccuauaugcucaagcaucaggaagaaucacagucucuaccaaaagaagccaacaaacuguaaucccgaauaucgggucuagacccaggguaagggauauccccagcagaauaagcaucuauuggacaauaguaaaaccgggagacauacuuuugauuaacagcacagggaaucuaauugcuccucgggguuacuucaaaauacgaagugggaaaagcucaauaaugagaucagaugcacccauuggcaaaugcaauucugaaugcaucacuccaaauggaagcauucccaaugacaaaccauuucaaaauguaaacaggaucacauauggggccugucccagauauguuaagcaaaacacucugaaauuggcaacagggaugcgaaauguaccagauaaacaaacuagaggcauauuuggcgcaaucgcggguuucauagaaaaugguugggagggaaugguggaugguugguacgguuucaggcaucaaaauucugagggaauaggacaagcagcagaucucaaaagcacucaagcagcaaucgaccaaaucaaugggaagcugaauagguugaucgggaaaaccaacgagaaauuccaucagauugaaaaagaauucucagaaguagaagggagaauucaggaccucgagaaauauguugaggacacuaaaauagaucucuggucauacaacgcggagcuucuuguugcccuggagaaccaacauacaauugaucuaacugacucagaaaugaacaaacuguuugaaagaacaaagaagcaacugagggaaaaugcugaggauaugggcaaugguuguuucaaaauauaccacaaaugugacaaugccugcauagggucaaucagaaauggaacuuaugaccaugauguauacagagaugaagcauuaaacaaccgguuccagaucaaagguguugagcugaagucaggauacaaagauuggauccuauggauuuccuuugccauaucauguuuuuugcuuuguguugcuuuguugggguucaucaugugggccugccaaaaaggcaacauuaggugcaacauuugcauuuga

SEQ ID NO: 33303 - RNA, 1701 nt, Artificial Sequence
  derived and/or modified CDS sequence (wt) from hemagglutinin__InfluenzaA__ABI92434
augaagacuaucauugcuuugagcuacauucuaugucugguuuucgcucaaaaacuucccggaaaugacaacagcacggcaacgcugugccuugggcaccaugcaguaccaaacggaacgauagugaaaacaaucacgaaugaccaaauugaaguuacuaaugcuacugagcugguucagaguuccucaacagguggaauaugcgacaguccucaucagauccuugauggagaaaacugcacacuaauagaugcucuauugggagacccucagugugauggcuuccaaaauaagaaaugggaccuuuuuguugaacgcagcaaagccuacagcaacuguuacccuuaugauguuccggauuaugccucccuuaggucacuaauugccucauccggcacacuggaguuuaacaaugaaagcuucaauuggacuggagucacucaaaauggaacaagcucugcuugcaaaaggagaucuaauagcagcuucuuuaguagauugaauugguugacccacuuaaaauucaaauacccagcauugaacgugacuaugccaaacaaugaagaauuugacaaauuguacauuugggggguucaccacccggguacauacaaugaccaaaucagccuauaugcucaagcaucaggaagaaucacagucucuaccaaaagaagccaacaaacuguaaucccgaauaucgggucuagacccaggguaagggauauccccagcagaauaagcaucuauuggacaauaguaaaaccgggagacauacuuuugauuaacagcacagggaaucuaauugcuccucgggguuacuucaaaauacgaagugggaaaagcucaauaaugagaucagaugcacccauuggcaaaugcaauucugaaugcaucacuccaaauggaagcauucccaaugacaaaccauuucaaaauguaaacaggaucacauauggggccugucccagauauguuaagcaaaacacucugaaauuggcaacagggaugcgaaauguaccagagaaacaaacuagaggcauauuuggcgcaaucgcggguuucauagaaaaugguugggagggaaugguggaugguugguacgguuucaggcaucaaaauucugagggaauaggacaagcagcagaucucaaaagcacucaagcagcaaucgaccaaaucaaugggaagcugaauagguugaucgggaaaaccaacgagaaauuccaucagauugaaaaagaauucucagaaguagaagggagaauucaggaccucgagaaauauguugaggacacuaaaauagaucucuggucauacaacgcggagcuucuuguugcccuggagaaccaacauacaauugaucuaacugacucagaaaugaacaaacuguuugaaagaacaaagaagcaacugagggaaaaugcugaggauaugggcaaugguuguuucaaaauauaccacaaaugugacaaugccugcauagggucaaucagaaauggaacuuaugaccaugauguauacagagaugaagcauuaaacaaccgguuccagaucaaagguguugagcugaagucaggauacaaagauuggauccuauggauuuccuuugccauaucauguuuuuugcuuuguguugcuuuguugggguucaucaugugggccugccaaaaaggcaacauuaggugcaacauuugcauuuga

SEQ ID NO: 33304 - RNA, 1701 nt, Artificial Sequence
  derived and/or modified CDS sequence (wt) from hemagglutinin__InfluenzaA__ABI92445
augaagacuaucauugcuuugagcuacauucuaugucugguuuucacucaaaaacuucccggaaaugacaacagcacggcaacgcugugccuugggcaccaugcaguaccaaacggaacgauagugaaaacaaucacgaaugaccaaauugaaguuacuaaugcuacugagcugguucagaguuccucaacagggggaauaugcgacaguccucaucagauccuugauggagaaaacugcacacuaauagaugcucuauugggagacccucagugugauggcuuccaaaauaagaaaugggaccuuuuuguugaacgcagcaaagccuacagcaacuguuacccuuaugaugugccggauuaugccucccuuaggucacuaauugccucauccggcacacuggaguuuaacaaugaaagcuucaauuggacuggagucaaucaaaauggaacaagcucugcuugcaaaaggagaucuaauagcaguuucuuuaguagauugaauugguugacccacuuaaaauucaaauacccagcauugaacgugacuaugccaaacaaugaagaauuugacaaauuguacauuugggggguucaccacccggguacauacaaugaccaaaucagccuauaugcucaagcaucaggaagaaucacagucucuaccaaaagaagccaacaaacuguaaucccgaauaucgggucuagacccaggguaagggauauccccagcagaauaagcaucuauuggacaauaguaaaaccgggagacauacuuuugauuaacagcacagggaaucuaauugcuccucgggguuacuucaaaauacgaagugggaaaagcucaauaaugagaucagaugcacccauuggcaaaugcaauucugaaugcaucacuccaaauggaagcauucccaaugacaaaccauuucaaaauguaaacaggaucacauauggggccugucccagauauguuaagcaaaacacucugaaauuggcaacagggaugcgaaauguaccagagaaacaaacuagaggcauauuuggcgcaaucgcggguuucauagaaaaugguugggagggaaugguggaugguugguacgguuucaggcaucaaaauucugagggaauaggacaagcagcagaucucaaaagcacucaagcagcaaucgaccaaaucaaugggaagcugaauagguugaucgggaaaaccaacgagaaauuccaucagauugaaaaagaauucucagaaguagaagggagaauucaggaccucgagaaauauguugaggacacuaaaauagaucucuggucauacaacgcggagcuucuuguugcccuagagaaccaacauacaauugaucuaacugacucagaaaugaacaaacuguuugaaagaacaaagaagcaacugagggaaaaugcugaggauaugggcaaugguuguuucaaaauauaccacaaaugugacaauaccugcauagggucaaucagaaauggaacuuaugaccaugauguauacagagaugaagcauuaaacaaccgguuccagaucaaagguguugagcugaagucaggauacaaagauuggauccuauggauuuccuuugccauaucauguuuuuugcuuuguguugcuuuguugggguucaucaugugggccugccaaaaaggcaacauuaggugcaacauuugcauuuga

SEQ ID NO: 33305 - RNA, 1701 nt, Artificial Sequence; identical to SEQ ID NO: 32669
  derived and/or modified CDS sequence (wt) from hemagglutinin__InfluenzaA__ABI92456

SEQ ID NO: 33306 - RNA, 1701 nt, Artificial Sequence
  derived and/or modified CDS sequence (wt) from hemagglutinin__InfluenzaA__ABI92467
augaagacuaucauugcuuugagcuacauuuuaugucugguuuucgcucaaaaacuucccggaaaugacaacagcacggcaacgcugugccuggggcaccaugcagugccaaacggaacgcuagugaaaacaaucacgaaugaccaaauugaagugacuaaugcuacugagcugguucagaguuccucaacagguggaauaugcgacaguccucaccaaauccuugauggagaaaacugcacacuaauagaugcucuauugggagacccucauugugauggcuuccaaaauaaggaaugggaccuuuuuguugaacgcagcaaagccuacagcaacuguuacccuuaugaugugccggauuaugccucccuuaggucacuaguugccucauccggcacacuggaguuuaacaaugaaagcuucaauuggacuggagucgcucagaauggaacaagcucugcuugcaaaaggagaucuaauaaaaguuucuuuaguagauugaauugguugcaccaauuaaaauacaaauacccagcacugaacgugacuaugccaaacaaugaaaaauuugacaaauuguacauuugggggguucaccacccgaguacggacagugaccaaaucagccuauaugcucaagcaccagggagagucacagucucuaccaaaagaagccaacaaacuguaaucccgaauaucggaucuagacccuggguaaggggugucuccagcagaauaagcaucuauuggacaauaguaaaaccgggagacauacuuuugauuaacugcacagggaaucuaauugcuccucgggguuacuucaaaauacgaagugggaaaagcucaauaaugaggucagaugcauccauuggcaaaugcaauucugaaugcaucacuccaaauggaagcauucccaaugacaaaccauuucaaaauguaaacaggaucacauauggggccugucccagauauguuaagcaaaacacucugaaauuggcaacagggaugcggaauguaccagagaaacaaacuagaggcauauucggcgcaaucgcggguuucauagaaaaugguugggagggaaugguggacgguugguacgguuucaggcaucaaaauucugagggcacaggacaagcagcagaucucaaaagcacucaagcagcaaucaaccaaaucaacgggaaacugaauagguuaaucgagaaaacgaacgagaaauuccaucaaauugaaaaagaauucucagaaguggaagggagaauucaggaccucgagaaauauguugaggacacuaaaauagaucucuggucguacaacgcggagcuucuuguugcccuggagaaccagcauacaauugaucuaacugacucagaaauggacaaacuguuugaaagaacaaagaagcaacugagggaaaaugcugaggauaugggcaaugguuguuucaaaauauaccacaaaugugacaaugccugcauagggucaaucagaaaugggacuuaugaccaugauguauacagagacgaagcauuaaacaaccgguuccagaucaaagguguugagcugaagucaggauacaaagauuggauccuauggauuuccuuugccauaucauguuuuuugcuuuguguugucuugcugggguucaucaugugggccugccaaaaaggcaacauuaggugcaacauuugcauuuga

SEQ ID NO: 33307 - RNA, 1701 nt, Artificial Sequence; identical to SEQ ID NO: 32662
  derived and/or modified CDS sequence (wt) from hemagglutinin__InfluenzaA__ABI92478

SEQ ID NO: 33308 - RNA, 1701 nt, Artificial Sequence; identical to SEQ ID NO: 33306
  derived and/or modified CDS sequence (wt) from hemagglutinin__InfluenzaA__ABI92489

SEQ ID NO: 33309 - RNA, 1701 nt, Artificial Sequence
  derived and/or modified CDS sequence (wt) from hemagglutinin__InfluenzaA__ABI92500
augaagacuaucauugcuuugagcuacauuuuaugucugguuuucgcucaaaaacuucccggaaaugacaacagcacggcaacgcugugccuggggcaccaugcagugccaaacggaacgcuagugaaaacaaucacgaaugaccaaauugaagugacuaaugcuacugagcugguucagaguuccucaacagguggaauaugcgacaguccucaccaaauccuugauggagaaaacugcacacuaauagaugcucuauugggagacccucauugugauggcuuccaaaauaaggaaugggaccuuuuuguugaacgcagcaaagccuacagcaacuguuacccuuaugaugugccggauuaugccucccuuaggucacuaguugccucauccggcacacuggaguuuaacaaugaaagcuucaauuggacuggagucgcucagaauggaacaagcucugcuugcaaaaggagaucuaauaaaaguuucuuuaguagauugaauugguugcaccaauuaaaauacaaauacccagcacugaacgugacuaugccaaacaaugaaaaauuugacaaauuguacauuugggggguucaccacccgaguacggacagugaccaaaucagccuauaugcucaagcaccagggagagucacagucucuaccaaaagaagccaacaaacuguaaucccgaauaucggaucuagacccuggguaaggggugucuccagcagaauaagcaucuauuggacaauaguaaaaccgggagacauacuuuugauuaacugcacagggaaucuaauugcuccucgggguuacuucaaaauacgaagugggaaaagcucaauaaugaggucagaugcauccauuggcaaaugcaauucugaaugcaucacuccaaauggaagcauucccaaugacaaaccauuucaaaauguaaacaggaucacauauggggccugucccagauauguuaagcaaaacacucugaaauuggcaacagggaugcggaauguaccagagaaacaaacuagaggcauauucggcgcaaucgcggguuucauagaaaaugguugggagggaaugguggacgguugguacgguuucaggcaucaaaauucugagggcacaggacaagcagcagaucucaaaagcacucaagcaguaaucaaccaaaucaacgggaaacugaauagguuaaucgagaaaacgaacgagaaauuccaucaaauugaaaaagaauucucagaaguggaagggagaauucaggaccucgagaaauauguugaggacacuaaaauagaucucuggucguacaacgcggagcuucuuguugcccuggagaaccagcauacaauugaucuaacugacucagaaaugaacaaacuguuugaaagaacaaagaagcaacugagggaaaaugcugaggauaugggcaaugguuguuucaaaauauaccacaaaugugacaaugccugcauagggucaaucagaaaugggacuuaugaccaugauguauacagagacgaagcauuaaacaaccgguuccagaucaaagguguugagcugaagucaggauacaaagauuggauccuauggauuuccuuugccauaucauguuuuuugcuuuguguugucuugcugggguucaucaugugggccugccaaaaaggcaacauuaggugcaacauuugcauuuga

SEQ ID NO: 33310 - RNA, 1701 nt, Artificial Sequence
  derived and/or modified CDS sequence (wt) from hemagglutinin__InfluenzaA__ABI92511
augaagacuaucauugcuuugagcuacauuuuaugucugguuuucgcucaaaaacuucccggaaaugacaacagcacagcgacgcugugccuggggcaccaugcagugccaaacggaacgcuagugaaaacaaucacgaaugaccaaauugaagugacuaaugcuacugagcugguucagaauuccucaacagguauaauaugcgacaguccucaccaaauccuugauggagaaaacugcacacuaauagaugcucuauugggagacccucauugugauggcuuccaaaauaaggaaugggaccuuuuuguugaacgcagcaaagccuacagcaacuguuacccuuaugaugugccggauuaugccucccuuagaucacuaguugccucauccggcacacuggaguuuaacaaugaaagcuucaauuggacuggagucgcucagaauggaacaagcucugcuugcaaaaggagaucugauaaaaguuucuuuaguagauugaauugguugcaccaauuaaaauacaaauacccagcauugaacgugacuaugccaaacacugaaaaauuugacaaauuguacauuugggggguucaccacccgaguacggacagcgaccaaaucagccuauaugcucaagcaucagggagagucacagucucuaccaaaagaagccaacaaacuguaaucccgaauaucggaucuagacccuggguaaggggugucuccagcagaguaagcaucuauuggacaauaguaaaaccgggagacauacuuuugauuaacagcacagggaaucuaauugcuccucgggguuacuucaaaauacgaagugggaaaagcucaauaaugaggucagacgcauccauuggcaaaugcaauucuaaaugcaucacuccaaauggaagcauucccaaugacaaaccauuucaaaauguaaacaggaucacauauggggccugucccagguauguuaagcaaaacacucugaaauuggcaacagggaugcggaauguaccagagaaacaaacuagaggcauauucggcgcaaucgcggguuucauagaaaaugguugggagggaaugguggacgguugguacgguuucagacaucaaaauucugagggcacaggacaagcagcagaucuuaaaagcacucaagcagcaaucaaccaaaucaacgggaaacugaauagguuaaucgagaaaacgaacgagaaauuccaucaaauugaaaaagaauucucagaaguagaagggagaauucaggaccucgagaaauauguugaggacacuaaaauagaucucuggucguacaacgcggagcuucuuguugcccuggagaaccaacauacaauugaucuaacugacucagaaaugaacaaacuguuugaaagaacaaagaagcaacugagggaaaaugcugaggauaugggcaaugguuguuucaaaauauaccacaaaugugacaauaccugcauaggaucaaucagaaauggaacuuaugaccaugauguauacagagacgaagcauuaaacaaccgguuccagaucaaagguguugagcugaagucaggauacaaagauuggauccuauggauuuccuuugccauaucauguuuuuugcuuuguguuguuuugcugggguucaucaugugggccugccaaaaaggcaacauuaggugcaacauuugcaucuga

SEQ ID NO: 33311 - RNA, 1701 nt, Artificial Sequence
  derived and/or modified CDS sequence (wt) from hemagglutinin__InfluenzaA__ABI92522
augaagacuaucauugcuuugagcuacauuuuaugucugguuuucgcucaaaaacuucccggaaaugacaacagcacggcaacgcugugccuggggcaccaugcagugccaaacggaacgcuagugaaaacaaucacgaaugaccaaauugaagugacuaaugcuacugagcugguucagaguuccucaacagguagaauaugcgacaguccucaccaaauccuugauggagaaaacugcacacuaauagaugcucuauugggagacccucauugugauggcuuccaaaauaaggaaugggaccuuuuuguugaacgcagcaaagccuacagcaacuguuacccuuaugaugugccggauuaugucucccuuaggucacuaguugccucaucaggcacgcuggaguuuaacaaugaaagcuucaauuggacuggagucgcucagaauggaacaagcucugcuugcaaaaggagaucuaauaaaaguuucuuuaguagauugaauugguugcaccaauuaaaauacaaauauccagcacugaacgugacuaugccaaacaaugaaaaauuugacaaauuauacauuugggggguucaccacccggguacagacagugaccaaaucagccuauaugcucaagcaucagggagagucacagucucuaccaaaagaagccaacaaacuguaaucccgaauaucggaucuagacccuggguaaggggugucuccagcagaauaagcaucuauuggacaauaguaaaaccgggagacauacuuuugauuaacagcacagggaaucuaauugcuccucgggguuacuucaaaauacgaagugggaaaagcucaauaaugaagucagaugcacccauuggcaaaugcaauucugaaugcaucacuccaaauggaagcauucccaaugacaaaccauuucaaaauguaaacaggaucacauauggggccugucccagauauguuaagcaaaacacucugaaauuggcaacagggaugcggaaugugccagagaaacaaacuagaggcauauucggugcaaucgcgggcuucauagaaaaugguugggagggaaugauggacgguugguacgguuucaggcaucaaaauucugagggcacagggcaagcagcagaucuuaaaagcacucaagcagcaaucaaccaaaucaacgggaaacugaauagguuaaucgagaaaacgaacgagaaauuccaucaaauugaaaaagaauucucagaaguagaagggagaauucaggaccucgagaaauauguugaggacacuaaaauagaucucuggucguacaaugcggagcuucuuguugcccuggagaaccaacauacaauugaucuaacugacucagaaaugaacaaacuguuugaaagaacaaagaagcaacugagggaaaaugcugaggauaugggcaaugguuguuucaaaauauaccacaaaugugacaaugccugcauagggucaaucagaaauggaacuuaugaccaugauguauacagagacgaagcauugaacaaccgguuccagaucaaagguguugagcugaagucaggauacaaagauuggauccuauggauuuccuuugccauaucauguuuuuugcuuuguauuguuuugcugggguucaucaugugggccugccaaaaaggcaacauuaggugcaacauuugcauuuga

SEQ ID NO: 33312 - RNA, 1701 nt, Artificial Sequence
  derived and/or modified CDS sequence (wt) from hemagglutinin__InfluenzaA__ABI92533
augaagacuaucauugcuuugagcuacauuuuaugucugguuuucgcucaaaaacuucccggaaaugacaacagcagggcaacgcugugccuggggcaccaugcagugccaaacggaacgcuagugaaaacaaucacgaaugaccaaauugaagugacuaaugcuacugagcugguucagaguuccucaacagguagaauaugcgacaguccucaccaaauccuugauggagaaaacugcacacuaauagaugcucuauugggagacccucauugugauggcuuccaaaauaaggaaugggaccuuuuuguugaacgcagcaaagccuacagcaacuguuacccuuaugaugugccggauuaugucucccuuaggucacuaguugccucaucaggcacgcuggaguuuaacaaugaaagcuucaauuggacuggagucgcucagaauggaacaagcucugcuugcaaaaggagaucugauaaaaguuucuuuaguagauugaauugguugcaccaauuaaaauacaaauauccagcacugaacgugacuaugccaaacaaugaaaaauuugacaaauuguacauuugggggguucaccacccggguacagacagugaccaaaucagccuauaugcucaagcaucagggagagucacagucucuaccaaaagaagccaacaaacuguaaucccgaauaucggaucuagacccuggguaaggggugucuccagcagaauaagcaucuauuggacaauaguaaaaccgggagacauacuuuugauuaacagcacagggaaucuaauugcuccucgggguuacuucaaaauacgaagugggaaaagcucaauaaugaggucagaugcacccauuggcaaaugcaauucugaaugcaucacuccaaauggaagcauucccaaugacaaaccauuucaaaauguaaacaggaucacauaugggcccugucccagauauguuaagcaaaacacucugaaauuggcaacagggaugcgaaaugugccagagaaacaaacuagaggcauauucggugcaaucgcgggcuucauagaaaaugguugggagggaaugauggacgguugguacgguuucaggcaucaaaauucugagggcacagggcaagcagcagaucuuaaaagcacucaagcagcaaucaaccaaaucaacgggaaacugaauagguuaaucgagaaaacgaacgagaaauuccaucaaauugaaaaagaauucucagaaguagaagggagaauucaggaccucgagaaauauguugaggacacuaaaauagaucucuggucguacaaugcggagcuucuuguugcccuggagaaccaacauacaauugaucuaacugacucagaaaugaacaaacuguuugaaagaacaaagaagcaacugagggaaaaugcugaggauaugggcaaugguuguuucaaaauauaccacaaaugugacaaugccugcauagggucaaucagaaauggaacuuaugaccaugauguauacagagacgaagcauugaacaaccgguuccagaucaaagguguugagcugaagucaggauacaaagauuggauccuauggauuuccuuugccauaucauguuuuuugcuuuguauuguuuugcugggguucaucaugugggccugccaaaaaggcaacauuaggugcaacauuugcauuuga

SEQ ID NO: 33313 - RNA, 1701 nt, Artificial Sequence; identical to SEQ ID NO: 33312
  derived and/or modified CDS sequence (wt) from hemagglutinin__InfluenzaA__ABI92544

SEQ ID NO: 33314 - RNA, 1701 nt, Artificial Sequence
  derived and/or modified CDS sequence (wt) from hemagglutinin__InfluenzaA__ABI92577
augaagacuaucauugcuuugagcuacauuuuaugucugguuuucgcucaaaaacuucccggaaaugacaacagcacggcaacgcugugccuggggcaccaugcagugccaaacggaacgcuagugaaaacaaucacgaaugaccaaauugaagugacuaaugcuacugagcugguucagaguuccucaacagguagaauaugcgacaguccucaccaaauccuugauggagaaaacugcacacuaauagaugcucuauugggagacccucauugugauggcuuccaaaauaaggaaugggaccuuuuuguugaacgcagcagagccuacagcaacuguuacccuuaugaugugccggauuaugucucccuuaggucacuaguugccucaucaggcacgcuggaguuuaacaaugaaagcuucaauuggacuggagucgcucagaauggaacaagcucugcuugcaaaagaagaucugauaaaaguuucuuuaguagauugaauugguugcaccaauuaaaauacaaauauccagcacugaacgugacuaugccaaacaaugaaaaauuugacaaauuguacauuugggggguucaccacccggguacagacagugaccaaaucagccuauaugcucaagcaucagggagagucacagucucuaccaaaagaagccaacaaacuguaaucccgaauaucggaucuagacccuggguaaggggugucuccagcaaaauaagcaucuauuggacaauaguaaaaccgggagacauacuuuugauuaacagcacagggaaucuaauugcuccucgggguuacuucaaaauacgaagugggaaaagcucaauaaugaggucagaugcacccauuggcaaaugcaauucugaaugcaucacuccaaauggaagcauucccaaugacaaaccauuucaaaauguaaacaggaucacauaugggcccugucccagauauguuaagcaaaacacucugaaauuggcaacagggaugcggaaugugccagagaaacaaacuagaggcauauucggugcaaucgcgggcuucauagaaaaugguugggagggaaugauggacgguugguacgguuucaggcaucaaaauucugagggcacagggcaagcagcagaucuuaaaagcacucaagcagcaaucaaccaaaucaacgggaaacugaauagguuaauugagaaaacgaacgagaaauuccaucaaauugaaaaagaauucucagaaguagaagggagaauucaggaccucgagaaauauguugaggacacuaaaauagaucucuggucguacaaugcggagcuucuuguugcccuggagaaccaacauacaauugaucuaacugacucagaaaugaacaaacuguuugaaagaacaaagaagcaacugagggaaaaugcugaggauaugggcaaugguuguuucaaaauauaccacaaaugugacaaugccugcauagggucaaucagaaauggaacuuaugaccaugauguauacagagacgaagcauugaacaaccgguuccagaucaaagguguugagcugaagucaggauacaaagauuggauccuauggauuuccuuugccauaucauguuuuuugcuuuguauuguuuugcugggguucaucaugugggccugccaaaaaggcaacauuaggugcaacauuugcauuuga

SEQ ID NO: 33315 - RNA, 1701 nt, Artificial Sequence
  derived and/or modified CDS sequence (wt) from hemagglutinin__InfluenzaA__ABI92588
augaagacuaucauugcuuugagcuacauuuuaugucugguuuucgcucaaaaacuucccggaaaugacaacagcacggcaacgcugugccuggggcaccaugcagugccaaacggaacgcuagugaaaacaaucacgaaugaccaaauugaagugacuaaugcuacugagcugguucagaguuccucaacagguagaauaugcgacaguccucaccaaauccuugauggagaaaacugcacacuaauagaugcucuauugggagacccucauugugauggcuuccaaaauaaggaaugggaccuuuuuguugaacgcagcagagccuacagcaacuguuacccuuaugaugugccggauuaugucucccuuaggucacuaguugccucaucaggcacgcuggaguuuaacaaugaaagcuucaauuggacuggagucgcucagaauggaacaagcucugcuugcaaaagaagaucugauaaaaguuucuuuaguagauugaauugguugcaccaauuaaaauacaaauauccagcacugaacgugacuaugccaaacaaugaaaaauuugacaaauuguacauuugggggguucaccacccggguacagacagugaccaaaucagccuauaugcucaagcaucagggagagucacagucucuaccaaaagaagccaacaaacuguaaucccgaauaucggaucuagacccuggguaaggggugucuccagcagaauaagcaucuauuggacaauaguaaaaccaggagacauacuuuugauuaacagcacagggaaucuaauugcuccucgggguuacuucaaaauacgaagugggaaaagcucaauaaugaggucagaugcacccauuggcaaaugcaauucugaaugcaucacuccaaauggaagcauucccaaugacaaaccauuucaaaauguaaacaggaucacauaugggcccugucccagauauguuaagcaaaacacucugaaauuggcaacagggaugcggaaugugccagagaaacaaacuagaggcauauucggugcaaucgcgggcuucauagaaaaugguugggagggaaugauggacgguugguacgguuucaggcaucaaaauucugagggcacagggcaagcagcagaucuuaaaagcacucaagcagcaaucaaccaaaucaacgggaaacugaauagguuaaucgagaaaacgaacgagaaauuccaucaaauugaaaaagaauucucagaaguagaagggagaauucaggaccucgagaaauauguugaggacacuaaaauagaucucuggucguacaaugcggagcuucuuguugcccuggagaaccaacauacaauugaucuaacugacucagaaaugaacaaacuguuugaaagaacaaagaagcaacugagggaaaaugcugaggauaugggcaaugguuguuucaaaauauaccacaaaugugacaaugccugcauagggucaaucagaaauggaacuuaugaccaugauguauacagagacgaagcauugaacaaccgguuccagaucaaagguguugagcugaagucaggauacaaagauuggauccuauggauuuccuuugccauaucauguuuuuugcuuuguauuguuuugcugggguucaucaugugggccugccaaaaaggcaacauuaggugcaacauuugcauuuga

SEQ ID NO: 33316 - RNA, 1701 nt, Artificial Sequence
  derived and/or modified CDS sequence (wt) from hemagglutinin__InfluenzaA__ABI92599
augaagacuaucauugcuuugagcuacauuuuaugccugguuuucgcucaaaaacuucccggaaaugacaacagcacggcaacgcugugccuggggcaccaugcagugccaaacggaacgcuagugaaaacaaucacgaaugaccaaauugaaguaacuaaugcuacugagcugguucagaguuccucaacagguagaauaugcaacaguccucaccaaauccuugauggagaaaacugcacacuaauagaugcucuauugggagacccucauugugauggcuuccaaaauaaggaaugggaccuuuuuguugaacgcagcaaagccuacagcaacuguuacccuuaugaugugccggauuaugucucccuuaggucacuaguugccucaucaggcacgcuggaguuuaacaaugaaagcuucaauuggacuggagucgcucagaauggaacaagcucugcuugcaaaaggagaucugauaaaaguuucuuuaguagauugaauugguugcaccaauuaaaauacaaauauccagcacugaacgugacuaugccaaacaaugaaaaauuugacaaauuguacauuugggggguccaccacccggguacagacagugaccaaaucagccuauaugcucaagcaucagggagagucacagucucuaccaaaagaagccaacaaacuguaaucccgaauaucggaucuagacccuggguaaggggugucuccagcagaauaagcaucuauuggacaauaguaaaaccgggagacauacuuuugauuaacagcacagggaaucuaauugcuccucgggguuacuucaaaauacgaagugggaaaagcucaauaaugaggucagaugcacccauuggcaaaugcaauucugaaugcaucacuccaaauggaagcauucccaaugacaaaccauuucaaaauguaaacaggaucacauauggggccugucccagauauguuaagcaaaaaacucugaaauuggcaacagggaugcggaaugugccagagaaacaaacuagaggcauauucggugcaaucgcgggcuucauagaaaaugguugggagggaaugauggacgguugguacgguuucaggcaucaaaauucugagggcacagggcaagcagcagaucuuaaaagcacucaagcagcaaucaaccaaaucaacgggaaacugaauagguugauugagaaaacgaacgagaaauuccaucaaauugaaaaagaauucucagaaguagaagggagaauucaggaccucgagaaauaugucgaggacacuaaaauagaucucuggucguacaaugcggagcuucuuguugcccuggagaaccaacauacaauugaucuaacugacucagaaaugaacaaacuguuugaaagaacaaagaagcaacugagggaaaaugcugaggauaugggcaaugguuguuucaaaauauaccacaaaugugacaaugccugcauagggucaaucagaaauggaacuuaugaccaugauguauacagagacgaagcauugaacaaccgguuccagaucaaagguguugagcugaagucaggauacaaagauuggauccuauggauuuccuuugccauaucauguuuuuugcuuuguauuguuuuacugggguucaucaugugggccugccaaaaaggcaacauuaggugcaacauuugcauuuga

SEQ ID NO: 33317 - RNA, 1701 nt, Artificial Sequence
  derived and/or modified CDS sequence (wt) from hemagglutinin__InfluenzaA__ABI92610
augaagacuaucauugcuuugagcuacauuuuaugccugguuuucgcucaaaaacuucccggaaaugacaacagcacggcaacgcugugccuggggcaucaugcggugccaaacggaacgcuagugaaaacaaucacgaaugaccaaauugaaguaacuaaugcuacugagcugguucagaguuccucaacagguagaauaugcgacaguccucaucaaauccuugauggagaaaacugcacacuaauagaugcucuauugggagacccucauugugauggcuuccaaaauaaggaaugggaccuuuuuguugaacgcagcaaagccuacagcaacuguuacccuuaugaugugccggauuaugucucccuuaggucacuaguugccucaucaggcacgcuggaguuuaacaaugaaagcuucaauuggacuggagucgcucagaauggaacaagcucugcuugcaaaaggagaucugauaaaaguuucuuuaguagauugaauugguugcaccaauuaaaauacaaauauccagcacugaacgugacuaugccaaacaaugaaaaauuugacaaauuguacauuugggggguucaccacccggguacagacagugaccaaaucagccuauaugcucaagcaucagggagagucacagucucuaccaaaagaagccaacaaacuguaaucccgaauaucggaucuagacccuggguaaggggugucuccagcagaauaagcaucuauuggacaauaguaaaaccgggagacauacuuuugauuaacagcacagggaaucuaauugcuccacgggguuacuucaaaauacgaagugggaaaagcucaauaaugaggucagaugcacccauuggcaaaugcaauucugaaugcaucacuccaaauggaagcauucccaaugacaaaccauuucaaaauguaaacaggaucacauauggggccugucccagauauguuaagcaaaacacucugaaauuggcaacagggaugcggaaugugccagagaaacaaacuagaggcauauucggugcaaucgcgggcuucauagaaaaugguugggagggaaugauggacgguugguacgguuucaggcaucaaaauucugagggcacagggcaagcagcagaucuuaaaagcacucaagcagcaaucaaccaaauuaacgggaaacugaauagguuaaucgagaaaacgaacgagaaauuccaucaaauugaaaaagaauucucagaaguagaagggagaauucaggaccucgagaaauauguugaggacacuaaaauagaucucuggucguacaaugcggagcuucuuguugcccuggagaaccaacauacaauugaucuaacugacucagaaaugaacaaacuguuugaaagaacaaagaagcaacugagggaaaaugcugaggauaugggcaaugguuguuucaaaauauaccacaaaugugacaaugccugcauagggucaaucagaaauggaacuuaugaccaugauguauacagagacgaagcauugaacaaccgguuccagaucaaagguguugagcugaagucaggauacaaagauuggauccuauggauuuccuuugccauaucauguuuuuugcuuuguauuguuuugcugggguucaucaugugggccugccaaaaaggcaacauuaggugcaacauuugcauuuga

SEQ ID NO: 33318 - RNA, 1701 nt, Artificial Sequence
  derived and/or modified CDS sequence (wt) from hemagglutinin__InfluenzaA__ABI92621
augaagacuaucauugcuuugagcuacauuuuaugucugguuuucgcucaaaaacuucccggaaaugacaacagcauggcaacgcugugccuggggcaccaugcagugccaaacggaacgcuagugaaaacaaucacgaaugaccaaauugaagugacuaaugcuacugagcugguucagaguuccucaacagguagaauaugcaacaguccucaccaaauccuugauggagaaaacugcacacuaauagaugcucuauugggagacccucauugugaaggcuuccaaaauaaggaaugggaccuuuuuguugaacgcagcaaagccuacagcaacuguuacccuuaugaugugccggauuaugucucccuuaggucacuaguugccucaucaggcacgcuggaguuuaacaaugaaagcuucaauuggacuggagucgcucagaauggaacaagcucugcuugcaaaaggagaucugauaaaaguuucuuuaguagauugaauugguugcaccaauuaaaauacaaauauccagcacugaacgugacuaugccaaacaaugaaaaauuugacaaauuguacauuugggggguucaccacccggguacagacagugaccaaaucagccuauaugcucaagcaucagggagagucacagucucuaccaaaagaagccaacaaacuguaaucccgaauaucggaucuagacccuggguaaggggugucuccagcaaaauaagcaucuauuggacaauaguaaaaccgggagacauacuuuugauuaacagcacagggaaucuaauugcuccucgggguuacuucaaaauacgaagugggaaaagcucaauaaugaggucagaugcacccauugacaaaugcaauucugaaugcaucacuccaaauggaagcauucccaaugacaaaccauuucaaaauguaaacaggaucacauaugggcucugucccagauauguuaagcaaaacacucugaaauuggcaacggggaugcggaaugugccagagaaacaaacuagaggcauauucggugcaaucgcgggcuucauagaaaaugguugggagggaaugauggacgguugguacgguuucaggcaucaaaauucugagggcacagggcaagcagcagaucuuaaaagcacucaagcagcaaucaaccaaaucaacgggaaacugaauagguuaaucgaaaaaacgaacgagaaauuccaucaaauugaaaaagaauucucagaaguagaagggagaauucaggaccucgagaaauauguugaggacacuaaaauagaucucuggucguacaaugcggagcuucuuguugcccuggagaaccaacauacaauugaucuaacugacucagaaaugaacaaacuguuugaaagaacaaagaagcaacugagggaaaaugcugaggauaugggcaaugguuguuucaaaauauaccacaaaugugacaaugccugcauagggucaaucagaaauggaacuuaugaccaugauguauacagagacgaagcauugaacaaccgguuccagaucaaagguguugagcugaagucaggauacaaagauuggauccuauggauuuccuuugccauaucauguuuuuugcuuuguauuguuuugcugggguucaucaugugggccugccaaaaaggcaacauuaggugcaacauuugcauuuga

SEQ ID NO: 33319 - RNA, 1701 nt, Artificial Sequence
  derived and/or modified CDS sequence (wt) from hemagglutinin__InfluenzaA__ABI92632
augaagacuaucauugcuuugagcuacauuuuaugccugguuuucgcucaaaaacuucccggaaaugacaacagcacggcaacgcugugucuggggcaucaugcagugccaaacggaacgcuagugaaaacaaucacgaaugaccaaauugaaguaacuaaugcuacugagcugguucagaguuccucaacagguagaauaugcgacaguccucaccaaauccuugauggagaaaacugcacacuaauagaugcucuauugggagacccucauugugauggcuuccaaaauaaggaaugggaccuuuuuguugaacgcagcaaagccuacagcaacuguuacccuuaugaugugccggauuaugucucccuuaggucacuaguugccucaucaggcacgcuggaguuuaacaaugaaagcuucaauuggacuggagucgcucagaauggaacaagcucugcuugcaaaaggagaucugauaaaaguuucuuuaguagauugaauugguugcaccaauuaaaauacaaauauccagcacugaacgugacuaugccaaacaaugaaaaauuugacaaauuguacauuugggggguucaccacccggguacagacagugaccaaaucagccuauaugcucaagcaucagggagagucacagucucuaccaaaagaagccaacaaacuguaaucccgaauaucggaucuagacccuggguaaggggugucuccagcagaauaagcaucuauuggacaauaguaaaaccgggagacauacuuuugauuaacagcacagggaaucuaauugcuccucgggguuacuucaaaauacgaagugggaaaagcucaauaaugaggucagaugcacccauuggcaaaugcaauucugaaugcaucacuccaaauggaagcauucccaaugacaaaccauuucaaaauguaaacaggaucacauauggggccugucccagauauguuaagcaaaacacucugaaauuggcaacagggaugcggaaugugccagagaaacaaacuagaggcauauucggugcaaucgcgggcuucauagaaaaugguugggagggaaugauggacgguugguacgguuucaggcaucaaaauucugagggcacagggcaagcagcagaucuuaaaagcacucaagcagcaaucaaccaaaucaacgggaaacugaauagguuaaucgagaaaacgaacgagaaauuccaucaaauugaaaaagaauucucagaaguagaagggagaauucaggaccucgagaaauauguugaggacacuaaaauagaucucuggucguacaaugcggagcuucuuguugcccuggagaaccaacauacaauugaucuaacugacucagaaaugaacaaacuguuugaaagaacaaagaagcaacugagggaaaaugcugaggauaugggcaaugguuguuucaaaauauaccacaaaugugacaaugccugcauagggucaaucagaaauggaacuuaugaccaugauguauacagagacgaagcauugaacaaccgguuccagaucaaagguguugagcugaagucaggauacaaagauuggguccuauggauuuccuuugccauaucauguuuuuugcuuuguauuguuuugcugggguucaucaugugggccugccaaaaaggcaacauuaggugcaacauuugcauuuga

SEQ ID NO: 33320 - RNA, 1701 nt, Artificial Sequence
  derived and/or modified CDS sequence (wt) from hemagglutinin__InfluenzaA__ABI92643
augaagacuaucauugcuuugagcuacauuuuaugucugguuuucgcucaaaaacuucccggaaaugacaacagcacggcaacgcugugccuugggcaccaugcaguaccaaacggaacgauagugaaaacaaucacgaaugaccaaauugaaguuacuaaugcuacugagcugguacagaguuccucaacagguggaauaugcgacaguccucaucagauccuugauggagaaaacugcacacuaauagaugcucuauugggagacccucagugugauggcuuccaaaauaagaaaugggaccuuuuuguugaacgcagcaaagccuacagcaacuguuacccuuaugaugugccggauuaugccucccuuaggucacuaguugccucauccggcacacuggaguuuaacaaugaaagcuucgauuggacuggagucacucagaauggaacaagcucugcuugcaaaaggagaucuaauaaaaguuucuuuaguagauugaauugguugacccacuuaaaauacaaauacccagcauuaaacgugacuauaccaaacaaugaaaaauuugacaaauuguacauuugggggguucaccacccggguacggacagugaccaaaucagccuauaugcucaagcaucaggaagaaucacagucucuaccaaaagaagccaacaaacuguaaucccgaauaucggaucuagaccaaggguaagggaugucuccagccgaauaagcaucuauuggacaauaguaaaaccgggagacauacuuuugauuaacagcacagggaaucuaauugcuccucgggguuacuucaaaauacgaagugggaaaagcucaauaaugagaucagaugcacccauuggcaaaugcaauucugaaugcaucacuccaaauggaagcauucccaaugacaaaccauuucaaaauguaaacaggaucacauauggggccugucccagauauguuaagcaaaacacucugaaauuggcaacaggaaugcgaaauguaccagagaaacaaacuagaggcauauuuggcgcaaucgcggguuucauagaaaaugguugggagggaaugguggacgguugguacgguuucaggcaucaaaauucugagggcacaggacaagcagcagaucucaaaagcacucaagcagcaaucaaccaaaucaaugggaaacugaauagguuaaucgggaaaacaaacgagaaauuccaucagauugaaaaagaauucucagaaguagaagggagaauucaggaccucgagaaauauguugaggacacuaaaauagaucucuggucauacaacgcggagcuucuuguugcccuggagaaccaacauacaauugaucuaacugacucagaaaugaacaaacuguuugaaagaacaaagaggcaacugagggaaaaugcugaggauaugggcaaugguuguuucaaaauauaccacaaaugugacaaugccugcauagggucaaucagaaauggaacuuaugaccaugauguguacagagaugaagcauuaaacaaccgguuccagaucaaagguguugagcugaagucaggauacaaagauuggauccuauggauuuccuuugccauaucauguuuuuugcuuuguguugcuuuguugggguucaucaugugggccugccaaaaaggcaacauuaggugcaacauuugcauuuga

SEQ ID NO: 33321 - RNA, 1701 nt, Artificial Sequence
  derived and/or modified CDS sequence (wt) from hemagglutinin__InfluenzaA__ABI92665
augaagacuaucauugcuuugagcuacauuuuaugucugguuuucgcucaaaaacuucccggaaaugacaacagcacggcaacgcugugccuugggcaccaugcaguaccaaacggaacgauagugaaaacaaucacgaaugaccaaauugaaguuacuaaugcuacugagcugguacagaguuccucaacagguggaauaugcgacaguccucaucagauccuugauggagaaaacugcacacuaauagaugcucuauugggagacccucagugugauggcuuccaaaauaagaaaugggaccuuuuuguugaacgcagcaaagccuacagcaacuguuacccuuaugaugugccggauuaugccucccuuaggucacuaguugccucauccggcacacuggaguuuaacaaugaaagcuucgauuggacuggagucacucagaauggaacaagcucugcuugcaaaaggggaucuaauaaaaguuucuuuaguagauugaauugguugacccacuuaaaauacaaauacccagcauugaacgugacuaugccaaacaaugaaaaauuugacaaauuguacauuugggggguucaccacccggguacggacagugaccaaaucagccuauaugcucaagcaucaggaagaaucacagucucuaccaaaagaagccaacaaacuguaaucccgaauaucggaucuagaccaaggguaagggaugucuccagccgaauaagcaucuauuggacaauaguaaaaccgggagacauacuuuugauuaacagcacagggaaucuaauugcuccucgggguuacuucaaaauacgaagugggaaaagcucaauaaugagaucagaugcacccauuggcaaaugcaauucugaaugcaucacuccaaauggaagcauucccaaugacaaaccauuucaaaauguaaacaggaucacauauggggccugucccagauauguuaagcaaaacacucugaaauuggcaacaggaaugcgaaauguaccagagaaacaaacuagaggcauauuuggcgcaaucgcggguuucauagaaaaugguugggagggaaugguggacgguugguacgguuucaggcaucaaaauucugagggcacaggacaagcagcagaucucaaaagcacucaagcagcaaucaaccaaaucaaugggaaacugaauagguuaaucgggaaaacaaacgagaaauuccaucagauugaaaaagaauucucagaaguagaagggagaauucaggaccucgagaaauauguugaggacacuaaaauagaucucuggucauacaacgcggagcuucuuguugcccuggagaaccaacauacaauugaucuaacugacucagaaaugaacaaacuguuugaaagaacaaagaggcaacugagggaaaaugcugaggauaugggcaaugguuguuucaaaauauaccacaaaugugacaaugccugcauagggucaaucagaaauggaacuuaugaccaugauguguacagaaaugaagcauuaaacaaccgguuccagaucaaagguguugagcugaagucaggauacaaagauuggauccuauggauuuccuuugccauaucauguuuuuugcuuuguguugcuuuguugggguucaucaugugggccugccaaaaaggcaacauuaggugcaacauuugcauuuga

SEQ ID NO: 33322 - RNA, 1701 nt, Artificial Sequence
  derived and/or modified CDS sequence (wt) from hemagglutinin__InfluenzaA__ABI92676
augaagacuaucauugcuuugagcuacauucuaugucugguuuuugcucaaaaacuucccggaaaugacaacagcacggcaacgcugugccuugggcaccaugcaguaccaaacggaacgauagugaaaacaaucacaaaugaccaaauugaaguuacuaaugcuacugagcugguucagaguuccucaacagguggaauaugcgacaguccucaucagauccuugauggagaaaacugcacacuaauagaugcucuauugggagacccucagugugauggcuuccaaaauaagaaaugggaccuuuuuguugaacgcagcaaagccuacagcaacuguuacccuuaugaugugccggaucaugccucccuuaggucacuaguugccucauccggcacacuggaguuuaacaaugaaagcuucgauuggacuggagucacucagaauggaacaagcucugcuugcaaaaggagaucuaauaaaaguuucuuuaguagauugaauugguugacccacuuaaaauacaaauacccagcauugaacgugacuaugccaaacaaugaaaaauuugacaaauuguacauuugggggguucaccacccggguacggacagugaccaaaucagccuauaugcucaagcaucaggaagaaucacagucucuaccaaaagaagccaacaaacuguaaucccgaauaucggaucuagacccaggguaagggaugucuccagccgaauaagcaucuauuggacaauaguaaaaccgggagacauacuuuugauuaacagcacagggaaucuaauugcuccucgggguuacuucaaaauacgaaaugggaaaagcucaauaaugagaucagaugcacccauuggcaaaugcaauucugaaugcaucacuccaaauggaagcauucccaaugacaaaccauuucaaaauguaaacaggaucacauauggggccugucccagauauguuaagcaaaacacucugaaauuggcaacagggaugcgaaauguaccagagaaacaaacuagaggcauauuuggcgcaaucgcggguuucauagaaaaugguugggagggaaugguggacgguugguacgguuucaggcaucaaaauucugagggcacaggacaagcagcagaucucaaaagcacucaagcagcaaucaaccaaaucaaugggaaacugaauagguuaaucgggaaaacaaacgagaaauuccaucagauugaaaaagaauucucagaaguagaagggagaauucaggaccucgagaaauauguugaggacacuaaaauagaucucuggucauacaacgcggagcuucuuguugcccuggagaaccaacauacaauugaucuaacugacucagaaaugaacaaacuguuugaaagaacaaagaagcaacugagggaaaaugcugaggauaugggcaaugguuguuucaaaauauaccacaaaugugacaaugccugcauagggucaaucagaaauggaacuuaugaccaugauguguacagagaugaagcauuaaacaaccgguuccagaucaaagguguugagcugaagucaggauauaaagauuggauccuauggauuuccuuugccauaucauguuuuuugcuuuguguugcuuugcugggguucaucaugugggccugccaaaaaggcaacauuaggugcaacauuugcauuuga

SEQ ID NO: 33323 - RNA, 1701 nt, Artificial Sequence
  derived and/or modified CDS sequence (wt) from hemagglutinin__InfluenzaA__ABI92687
augaagacuaucauugcuuugagcuacauuuuaugucugguuuucgcucaaaaacuucccggaaaugacaacagcacggcaacgcugugccuugggcaccaugcaguaccaaacggaacgauagugaaaacaaucacgaaugaccaaauugaaguuacuaaugcuacugagcugguacagaguuccucaacagguggaauaugcgacaguccucaucagauccuugauggagaaaacugcacacuaauagaugcucuauugggagacccucagugugauggcuuccaaaauaagaaaugggaccuuuuuguugaacgcagcaaagccuacagcaacuguuacccuuaugaugugccggauuaugccucccuuaggucacuaguugccucauccggcacacuggaguuuaacaaugaaagcuucgauuggacuggagucacucagaauggaacaagcucugcuugcaaaaggggaucuaauaaaaguuucuuuaguagauugaauugguugacccacuuaaaauacaaauacccagcauugaacgugacuaugccaaacaaugaaaaauuugacaaauuguacauuugggggguucaccacccggguacggacagugaccaaaucagccuauaugcucaagcaucaggaagaaucacagucucuaccaaaagaagccaacaaacuguaaucccgaauaucggaucuagaccaaggguaagggaugucuccagccgaauaagcaucuauuggacaauaguaaaaccgggagacauacuuuugauuaacagcacagggaaucuaauugcuccucgggguuacuucaaaauacgaagugggaaaagcucaauaaugagaucagaugcacccauuggcaaaugcaauucugaaugcaucacuccaaauggaagcauucccaaugacaaaccauuucaaaauguaaacaggaucacauauggggccugucccagauauguuaagcaaaacacucugaaauuggcaacaggaaugcgaaauguaccagagaaacaaacuagaggcauauuuggcgcaaucgcggguuucauagaaaaugguugggagggaaugguggacgguugguacgguuucaggcaucaaaauucugagggcacaggacaagcagcagaucucaaaagcacucaagcagcaaucaaccaaaucaaugggaaacugaauagguuaaucgggaaaacaaacgagaaauuccaucagauugaaaaagaauucucagaaguagaagggagaauucaggaccucgagaaauauguugaggacacuaaaauagaucucuggucauacaacgcggagcuucuuguugcccuggagaaccaacauacaauugaucuaacugacucagaaaugaacaaacuguuugaaagaacaaagaggcaacugagggaaaaugcugaggauaugggcaaugguuguuucaaaauauaccacaaaugugacaaugccugcauagggucaaucagaaauggaacuuaugaccaugauguguacagagaugaagcauuaaacaaccgguuccagaucaaagguguugagcugaagucaggauacaaagauuggauccuauggauuuccuuugccauaucauguuuuuugcuuuguguugcuuuguugggguucaucaugugggccugccaaaaaggcaacauuaggugcaacauuugcauuuga

SEQ ID NO: 33324 - RNA, 1701 nt, Artificial Sequence; identical to SEQ ID NO: 33323
  derived and/or modified CDS sequence (wt) from hemagglutinin__InfluenzaA__ABI92698

SEQ ID NO: 33325 - RNA, 1701 nt, Artificial Sequence
  derived and/or modified CDS sequence (wt) from hemagglutinin__InfluenzaA__ABI92709
augaagacuaucauugcuuugagcuacauucuaugucugguuuucgcucaaaaacuucccggaaaugacaacagcacggcaacgcugugccuugggcaccaugcaguaccaaacggaacgauagugaaaacaaucacaaaugaccaaauugaaguuacuaaugcuacugagcugguucagaguuccucaacagguggaauaugcgacaguccucaucagauccuugauggagaaaacugcacacuaauagaugcucuauugggagacccucagugugauggcuuccaaaauaagaaaugggaccuuuuuguugaacgcagcaaagccuacagcaacuguuacccuuaugaugugccggaucaugccucccuuaggucacuaguugccucauccggcacacuggaguuuaacaaugaaagcuucgauuggacuggagucacucagaauggaacaagcucugcuugcaaaaggagaucuaauaaaaguuucuuuaguagauugaauugguugacccacuuaaaauacaaauacccagcauugaacgugacuaugccaaacaaugaaaaauuugacaaauuguacauuugggggguucaccacccggguacggacagugaccaaaucagccuauaugcucaagcaucaggaagaaucacagucucuaccaaaagaagccaacaaacuguaaucccgaauaucggaucucgacccaggguaagggaugucuccagccgaauaagcaucuauuggacaauaguaaaaccgggagacauacuuuugauuaacagcacagggaaucuaauugcuccucgggguuacuucaaaauacgaagugggaaaagcucaauaaugagaucagaugcacccauuggcaaaugcaauucugaaugcaucacuccaaauggaagcauucccaaugacaaaccauuucaaaauguaaacaggaucacauauggggccugucccagauauguuaagcaaaacacucugaaauuggcaacagggaugcgaaauguaccagagaaacaaacuagaggcauauuuggcgcaaucgcggguuucauagaaaaugguugggagggaaugguggacgguugguacgguuucaggcaucaaaauucugagggcacaggacaagcagcagaucucaaaagcacucaagcagcaaucaaccaaaucaaugggaaacugaauagguuaaucgggaaaacaaacgagaaauuccaucagauugaaaaagaauucucagaaguagaagggagaauucaggaccucgagaaauauguugaggacacuaaaauagaucucuggucauacaacgcggagcuucuuguugcccuggagaaccaacauacaauugaucuaacugauucagaaaugaacaaacuguuugaaagaacaaagaagcaacugagggaaaaugcugaggauaugggcaaugguuguuucaaaauauaccacaaaugugacaaugccugcauagggucaaucagaaauggaacuuaugaccaugauguguacagagaugaagcauuaaacaaccgguuccagaucaaagguguugagcugaagucaggauauaaagauuggauccuauggauuuccuuugccauaucauguuuuuugcuuuguguugcuuuguugggguucaucaugugggccugccaaaaaggcaacauuaggugcaacauuugcauuuga

SEQ ID NO: 33326 - RNA, 1701 nt, Artificial Sequence
  derived and/or modified CDS sequence (wt) from hemagglutinin__InfluenzaA__ABI92720
augaagacuaucauugcuuugagcuacauucuaugucugguuuucgcucaaaaacuucccggaaaugacaacagcacggcaacgcugugccuugggcaccaugcaguaccaaacggaacgauagugaaaacaaucacaaaugaccaaauugaaguuacuaaugcuacugagcugguucagaguuccucaacagguggaauaugcgacaguccucaucagauccuugauggagaaaacugcacacuaauagaugcucuauugggagacccucagugugauggcuuccaaaauaagaaaugggaccuuuuuguugaacgcagcaaagccuacagcaacuguuacccuuaugaugugccggaucaugccucccuuaggucacuaguugccucauccggcacacuggaguuuaacaaugaaagcuucgauuggacuggagucacucagaauggaacaagcucugcuugcaaaaggagaucuaauaaaaguuucuuuaguagauugaauugguugacccacuuaaaauacaaauacccagcauugaacgugacuaugccaaacaaugaaaaauuugacaaauuguacauuugggggguucaccacccggguacggaaagugaccaaaucagccuauaugcucaagcaucaggaagaaucacagucucuaccaaaagaagccaacaaacuguaaucccgaauaucggaucuagacccaggguaagggaugucuccagccgaauaagcaucuauuggacaauaguaaaaccgggagacauacuuuugauuaacagcacagggaaucuaauugcuccucgggguuacuucaaaauacgaagugggaaaagcucaauaaugagaucagaugcacccauuggcaaaugcaauucugaaugcaucacuccaaauggaagcauucccaaugacaaaccauuucaaaauguaaacaggaucacauauggggccugucccagauauguuaagcaaaacacucugaaauuggcaacagggaugcgaaauguaccagagaaacaaacuagaggcauauuuggcgcaaucgcggguuucauagaaaaugguugggagggaaugguggacgguugguacgguuucaggcaucaaaauucugagggcacaggacaagcagcagaucucaaaagcacucaagcagcaaucaaccaaaucaaugggaaacugaauagguuaaucgggaaaacaaacgagaaauuccaucagauugaaaaagaauucucagaaguagaagggagaauucaggaccucgagaaauauguugaggacacuaaaauagaucucuggucauacaacgcggagcuucuuguugcccuggagaaccaacauacaauugaucuaacugacucagaaaugaacaaacuguuugaaagaacaaagaagcaacugagggaaaaugcugaggacaugggcaaugguuguuucaaaauauaccacaaaugugacaaugccugcauagggucaaucagaaauggaacuuaugaccaugauguguacagagaugaagcauuaaacaaccgauuccagaucaaagguguugagcugaagucaggauauaaagauuggauccuauggauuuccuuugccauaucauguuuuuugcuuuguguugcuuuguugggguucaucaugugggccugccaaaaaggcaacauuaggugcaacauuugcauuuga

SEQ ID NO: 33327 - RNA, 1701 nt, Artificial Sequence
  derived and/or modified CDS sequence (wt) from hemagglutinin__InfluenzaA__ABI92731
augaagacuaucauugcuuugagcuacauuuuaugucugguuuucgcucaaaaacuucccggaaaugacaacagcacggcaacgcugugccuugggcaccaugcaguaccaaacggaacgauagugaaaacaaucacgaaugaccaaauugaaguuacuaaugcuacugagcugguacagaguuccucaacagguggaauaugcgacaguccucaucagauccuugauggagaaaacugcacacuaauagaugcucuauugggagacccucagugugauggcuuccaaaauaagaaaugggaccuuuuuguugaacgcagcaaagccuacagcaacuguuacccuuaugaugugccggauuaugccucccuuaggucacuaguugccucauccggcacacuggaguuuaacaaugaaagcuucgauuggacuggagucacucagaauggaacaagcucugcuugcaaaaggagaucuaauaaaaguuucuuuaguagauugaauugguugacccacuuaaaauacaaauacccagcauugaacgugacuaugccaaacaaugaaaaauuugacaaauuguacauuugggggguucaccacccggguacggacagugaccaaaucagccuauaugcucaagcaucaggaagaaucacagucucuaccaaaagaagccaacaaacuguaaucccgaauaucggaucuagaccaaggguaagggaugucuccagccgaauaagcaucuauuggacaauaguaaaaccgggagacauacuuuugauuaacagcacagggaaucuaauugcuccucgggguuacuucaaaauacgaagugggaaaagcucaauaaugagaucagaugcacccauuggcaaaugcaauucugaaugcaucacuccaaauggaagcauucccaaugacaaaccauuucaaaauguaaacaggaucacauauggggccugucccagauauguuaagcaaaacacucugaaauuggcaacaggaaugcgaaauguaccagagaaacaaacuagaggcauauuuggcgcaaucgcggguuucauagaaaaugguugggagggaaugguggacgguugguacgguuucaggcaucaaaauucugagggcacaggacaagcagcagaucucaaaagcacucaagcagcaaucaaccaaaucaaugggaaacugaauagguuaaucgggaaaacaaacgagaaauuccaucagauugaaaaagaauucucagaaguagaagggagaauucaggaccucgagaaauauguugaggacacuaaaauagaucucuggucauacaacgcggagcuucuuguugcccuggagaaccaacauacaauugaucuaacugacucagaaaugaacaaacuguuugaaagaacaaagaggcaacugagggaaaaugcugaggauaugggcaaugguuguuucaaaauauaccacaaaugugacaaugccugcauagggucaaucagaaauggaacuuaugaccaugauguguacagagaugaagcauuaaacaaccgguuccagaucaaagguguugagcugaagucaggauacaaagauuggauccuauggauuuccuuugccauaucauguuuuuugcuuuguguugcuuuguugggguucaucaugugggccugccaaaaaggcaacauuaggugcaacauuugcauuuga

SEQ ID NO: 33328 - RNA, 1701 nt, Artificial Sequence
  derived and/or modified CDS sequence (wt) from hemagglutinin__InfluenzaA__ABI92742
augaagacuaucauugcuuugagcuacauucuaugucugguuuuuucucaaaaacuucccggaaaugacaacagcacggcaacgcugugccuugggcaccaugcaguaccaaacggaacgauagugaaaacaaucacaaaugaccaaauugaaguuacuaaugcuacugagcugguucagaguuccucaacagguggaauaugcgacaguccucaucagauccuugauggagaaaacugcacacuaauagaugcucuauugggagacccucagugugauggcuuccaaaauaagaaaugggaccuuuuuguugaacgcagcaaagccuacagcaacuguuacccuuaugaugugccggaucaugccucccuuaggucacuaguugccucauccggcacacuggaguuuaacaaugaaagcuucgauuggacuggagucacucagaauggaacaagcucugcuugcaaaaggagaucuaauaaaaguuucuuuaguagauugaauugguugacccacuuaaaauacaaauacccagcauugaacgugacuaugccaaacaaugaaaaauuugacaaauuguacauuugggggguucaccacccggguacggacagugaccaaaucagccuauaugcucaagcaucaggaagaaucacagucucuaccaaaagaagccaacaaacuguaaucccgaauaucggaucuagacccaggguaagggaugucuccagccgaauaagcaucuauuggacaauaguaaaaccgggagacauacuuuugauuaacagcacagggaaucuaauugcuccucgggguuacuucaaaauacgaagugggaaaagcucaauaaugagaucagaugcacccauuggcaaaugcaauucugaaugcaucacuccaaauggaagcauucccaaugacaaaccauuucaaaauguaaacaggaucacauauggggccugucccagauauguuaagcaaaacacucugaaauuggcaacagggaugcgaaauguaccagagaaacaaacuagaggcauauuuggcgcaaucgcggguuucauagaaaaugguugggagggaaugguggacgguugguacgguuucaggcaucaaaauucugagggcacaggacaagcagcagaucucaaaagcacucaagcagcaaucaaccaaaucaaugggaaacugaauagguuaaucgggaaaacaaacgagaaauuccaucagauugaaaaagaauucucagaaguagaagggagaauucaggaccucgagaaauauguugaggacacuaaaauagaucucuggucauacaacgcggagcuucuuguugcccuggagaaccaacauacaauugaucuaacugacucagaaaugaacaaacuguuugaaagaacaaagaagcaacugagggaaaaugcugaggauaugggcaaugguuguuucaaaauauaccacaaaugugacaaugccugcauagggucaaucagaaauggaacuuaugaccaugauguguacagagaugaagcauuaaacaaccgguuccagaucaaagguguugagcugaagucaggauauaaagauuggauccuauggauuuccuuugccauaucauguuuuuugcuuuguguugcuuuguugggguucaucaugugggccugccaaaaaggcaacauuaggugcaacauuugcauuuga

SEQ ID NO: 33329 - RNA, 1701 nt, Artificial Sequence
  derived and/or modified CDS sequence (wt) from hemagglutinin__InfluenzaA__ABI92753
augaagacuaucauugcuuugagcuacauuuuaugucugguuuucgcucaaaaacuucccggaaaugacaacagcacggcaacgcugugccuugggcaccaugcaguaccaaacggaacgauagugaaaacaaucacgaaugaccaaauugaaguuacuaaugcuacugagcugguacagaguuccucaacagguggaauaugcgacaguccucaucagauccuugauggagaaaacugcacacuaauagaugcucuauugggagacccucagugugauggcuuccaaaauaagaaaugggaccuuuuuguugaacgcagcaaagccuacagcaacuguuacccuuaugaugugccggauuaugccuaccuuaggucacuaguugccucauccggcacacuggaguuuaacaaugaaagcuucgauuggacuggagucacucagaauggaacaagcucugcuugcaaaaggagaucuaauaaaaguuucuuuaguagauugaauugguugacccacuuaaaauacaaauacccagcauugaacgugacuaugccaaacaaugaaaaauuugacaaauuguacauuugggggguucaccacccggguacggacagugaccaaaucagccuauaugcucaagcaucaggaagaaucacagucucuaccaaaagaagccaacaaacuguaaucccgaauaucggaucuagaccaaggguaagggaugucuccagccgaauaagcaucuauuggacaauaguaaaaccgggagacauacuuuugauuaacagcacagggaaucuaauugcuccucgggguuacuucaaaauacgaagugggaaaagcucaauaaugagaucagaugcacccauuggcaaaugcaauucugaaugcaucacuccaaauggaagcauucccaaugacaaaccauuucaaaauguaaacaggaucacauauggggccugucccagauauguuaagcaaaacacucugaaauuggcaacaggaaugcgaaauguaccagagaaacaaacuagaggcauauuuggcgcaaucgcggguuucauagaaaaugguugggagggaaugguggacgguugguacgguuucaggcaucaaaauucugagggcacaggacaagcagcagaucucaaaagcacucaagcagcaaucaaccaaaucaaugggaaacugaauagguuaaucgggaaaacaaacgagaaauuccaucagauugaaaaagaauucucagaaguagaagggagaauucaggaccucgagaaauauguugaggacacuaaaauagaucucuggucauacaacgcggagcuucuuguugcccuggagaaccaacauacaauugaucuaacugacucagaaaugaacaaacuguuugaaagaacaaagaggcaacugagggaaaaugcugaggauaugggcaaugguuguuucaaaauauaccacaaaugugacaaugccugcauagggucaaucagaaauggaacuuaugaccaugauguguacagagaugaagcauuaaacaaccgguuccagaucaaagguguugagcugaagucaggauacaaagauuggauccuauggauuuccuuugccauaucauguuuuuugcuuuguguugcuuuguugggguucaucaugugggccugccaaaaaggcaacauuaggugcaacauuugcauuuga

SEQ ID NO: 33330 - RNA, 1701 nt, Artificial Sequence
  derived and/or modified CDS sequence (wt) from hemagglutinin__InfluenzaA__ABI92764
augaagacuaucauugcuuugagcuacauuuugugucugguuuucgcucaaaaacuucccggaaaugacaacagcacggcaacgcugugccuugggcaccaugcaguaccaaacggaacgauagugaaaacaaucacgaaugaccaaauugaaguuacuaaugcuacugagcugguacagaguuccucaacaggugaaauaugcgacaguccucaucagauccuugauggagaaaacugcacacuaauagaugcucuauugggagacccucagugugauggcuuccaaaauaagaaaugggaccuuuuuguugaacgcagcaaagccuacagcaacuguuacccuuaugaugugccggauuaugccucccuuaggucacuaguugccucauccggcacacuggaguuuaacaaugaaagcuucgauuggacuggagucacucagaauggaacaagcucugcuugcaaaaggggaucuaauaaaaguuucuuuaguagauugaauugguugacccacuuaaaauacaaauacccagcauugaacgugacuaugccaaacaaugaaaaauuugacaaauuguacauuugggggguucaccauccggguacggacagugaccaaaucagccuauaugcucaagcaucaggaagaaucacagucucuaccaaaagaagccaacaaacuguaaucccgaauaucggaucuagaccaaggguaagggaugucuccagccgaauaagcaucuauuggacaauaguaaaaccgggagacauacuuuugauuaacagcacagggaaucuaauugcuccucgggguuacuucaaaauacgaagugggaaaagcucaauaaugagaucagaugcacccauuggcaaaugcaauucugaaugcaucacuccaaauggaagcauucccaaugacaaaccauuucaaaauguaaacaggaucacauauggggccugucccagauauguuaagcaaaacacucugaaauuggcaacaggaaugcgaaauguaccagagaaacaaacuagaggcauauuuggcgcaaucgcggguuucauagaaaaugguugggagggaaugguggacgguugguacgguuucaggcaucaaaauucugagggcacaggacaagcagcagaucucaaaagcacucaagcagcaaucaaccaaaucaaugggaaacugaauagguuaaucgggaaaacaaacgagaaauuccaucagauugaaaaagaauucucagaaguagaagggagaauucaggaccucgagaaauauguugaggacacuaaaauagaucucuggucauacaacgcggagcuucuuguugcccuggagaaccaacauacaauugaucuaacugacucagaaaugaacaaacuguuugaaagaacaaagaggcaacugagggaaaaugcugaggauaugggcaaugguuguuucaaaauauaccacaaaugugacaaugccugcauagggucaaucagaaauggaacuuaugaccaugauguguacagagaugaagcauuaaacaaccgguuccagaucaaagguguugagcugaagucaggauacaaagauuggauccuauggauuuccuuugccauaucauguuuuuugcuuuguguugcuuuguugggguucaucaugugggccugccaaaaaggcaacauuaggugcaacauuugcauuuga

SEQ ID NO: 33331 - RNA, 1701 nt, Artificial Sequence; identical to SEQ ID NO: 33323
  derived and/or modified CDS sequence (wt) from hemagglutinin__InfluenzaA__ABI92775

SEQ ID NO: 33332 - RNA, 1701 nt, Artificial Sequence
  derived and/or modified CDS sequence (wt) from hemagglutinin__InfluenzaA__ABI92786
augaagacuaucauugcuuugagcuacauucuaugucugguuuucgcucaaaaacuucccggaaaugacaacagcacggcaacgcugugccucgggcaccaugcaguaccaaacggaacgauagugaaaacaaucacgaaugaccaaauugaaguuacuaaugcuacugagcugguucagaguuccucaacagguggaauaugcgacaguccucaucagauccuugauggagaaaacugcacacuaauagaugcucuauugggagacccucagugugauggcuuccaaaauaagaaaugggaccuuuuuguugaacgcagcaaagccuacagcaacuguuacccuuaugaugugccggauuaugccucccuuaggucacuaguugccucauccggcacacuggaguuuaacaaugaaagcuucaauuggacuggagucacucaaaauggaacaagcucugcuugcaaaaggagaucuaauaacaguuucuuuaguagauugaauugguugacccauuuaaaauucaaauacccagcauugaacgugacuaugccaaacaaugaaaaauuugacaaauuguacauuugggggguucaccacccggguacggacaaugaccaaaucagccuauaugcucaagcaucaggaagaaucacagucucuaccaaaagaagccaacaaacuguaaucccgaauaucggaucuagacccaggguaagggauauccccagcagaauaagcaucuauuggacaauaguaaaaccgggagacauacuuuugauuaacagcacagggaaucuaauugcuccucgggguuacuucaaaauacgaagugggaaaagcucaauaaugagaucagaugcacccauuggcaaaugcaauucugaaugcaucacuccaaauggaagcauucccaaugacaaaccauuucaaaauguaaacaggaucacauauggggccugucccagauauguuaagcaaaacacucugaaauuggcaacagggaugcgaaauguaccagagaaacaaacuagaggcauauuuggcgcaaucgcggguuucauagaaaaugguugggagggaaugguggaugguugguacgguuucaggcaucaaaauucugagggaauaggacaagcagcagaucucaaaagcacucaagcagcaaucaaccaaaucaaugggaagcugaauagguugaucgggaaaaccaacgagaaauuccaucagauugaaaaagaauucucagaaguagaagggagaauucaggaccucgagaaauauguugaggacacuaaaauagaucucuggucauacaacgcggagcuucuuguugcccuggagaaccaacauacaauugaucuaacugacucagaaaugaacaaacuguuugaaagaacaaagaagcaacugagggaaaaugcugaggauaugggcaaugguuguuucaaaauauaccacaaaugugacaaugccugcauagggucaaucagaaauggaacuuaugaccaugauguauacagagaugaagcauuaaacaaccgguuccagaucaaagguguugagcugaagucaggauacaaagauuggauccuauggauuuccuuugccauaucauguuuuuugcuuuguguugcuuuguugggguucaucaugugggccugccaaaaaggcaacauuaggugcaacauuugcauuuga

SEQ ID NO: 33333 - RNA, 1701 nt, Artificial Sequence
  derived and/or modified CDS sequence (wt) from hemagglutinin__InfluenzaA__ABI92797
augaagacuaucauugcuuugagcuacauucuaugucugguuuucgcucaaaaacuucccggaaaugacaacagcacggcaacgcugugccuugggcaccaugcaguaccaaacggaacgauagugaaaacaaucacgaaugaccaaauugaaguuacuaaugcuacugagcugguucagaguuccucaacagguggaauaugcgacaguccucaucagauccuugauggagaaaacugcacacuaauagaugcucuauugggagacccccagugugauggcuuccaaaauaagaaaugggaccuuuuuguugaacgcagcaaagccuacagcaacuguuacccuuaugaugugccggauuaugccucccuuaggucacuaguugccucauccggcacacuggaguuuaacaaugaaagcuucaauuggacuggagucacucaaaauggaacaagcucugcuugcaaaaggagaucuaauaacaguuucuuuaguagauugaauugguugacccauuuaaaauucaaauacccagcauugaacgugacuaugccaaacaaugaaaaauuugacaaauuguacauuugggggguucaccacccggguacggacaaugaccaaaucagccuauaugcucaagcaucaggaagaaucacagucucuaccaaaagaagccaacaaacuguaaucucgaauaucggaucuagacccaggguaagggauauccccagcagaauaagcaucuauuggacaauaguaaaaccgggagacauacuuuugauuaacagcacagggaaucuaauugcuccucgggguuacuucaaaauacgaagugggaaaagcucaauaaugagaucagaugcacccauuggcaaaugcaauucugaaugcaucacuccaaauggaagcauucccaaugacaaaccauuucaaaauguaaacaggaucacauauggggccugucccagauauguuaagcaaaacacucugaaauuggcaacagggaugcgaaauguaccagagaaacaaacuagaggcauauuuggcgcaaucgcggguuucauagaaaaugguugggagggaaugguggaugguugguacgguuucaggcaucaaaauucugagggaauaggacaagcagcagaucucaaaagcacucaagcagcaaucaaccaaaucaaugggaagcugaauagguugaucgggaaaaccaacgagaaauuccaucagauugaaaaagaauucucagaaguagaagggagaauucaggaccucgagaaauauguugaggacacuaaaauagaucucuggucauacaacgcggagcuucuuguugcccuggagaaccaacauacaauugaucuaacugacucagaaaugaacaaacuguuugaaagaacaaagaagcaacugagggaaaaugcugaggauaugggcaaugguuguuucaaaauauaccacaaaugugacaaugccugcauagggucaaucagaaauggaacuuaugaccaugauguauacagagaugaagcauuaaacaaccgguuccagaucaaagguguugagcugaagucaggauacaaagauuggauccuauggauuuccuuugccauaucauguuuuuugcuuuguguugcuuuguugggguucaucaugugggccugccaaaaaggcaacauuaggugcaacauuugcauuuga

SEQ ID NO: 33334 - RNA, 1701 nt, Artificial Sequence; identical to SEQ ID NO: 33332
  derived and/or modified CDS sequence (wt) from hemagglutinin__InfluenzaA__ABI92808

SEQ ID NO: 33335 - RNA, 1701 nt, Artificial Sequence
  derived and/or modified CDS sequence (wt) from hemagglutinin__InfluenzaA__ABI92819
augaagacuaucauugcuuugagcuacauucuaugucugguuuucgcucaaaaacuucccggaaaugacaacagcacggcaacgcugugccuugggcaccaugcaguaccaaacggaacgauagugaaaacaaucacgaaugaccaaauugaaguuacuaaugcuacugagcugguucagaguuccucaacagguggaauaugcgacaguccucaucagauccuugauggagaaaacugcacacuaauagaugcucuauugggagacccccagugugauggcuuccaaaauaagaaaugggaccuuuuuguugaacgcagcaaagccuacagcaacuguuacccuuaugaugugccggauuaugccucccuuaggucacuaguugccucauccggcacacuggaguuuaacaaugaaagcuucaauuggacuggagucacucaaaauggaacaagcucugcuugcaaaaggagaucuaauaacaguuucuuuaguagauugaauugguugacccauuuaaaauucaaauacccagcauugaacgugacuaugccaaacaaugaaaaauuugacaaauuguacauuugggggguucaccacccggguacggacaaugaccaaaucagccuauaugcucaagcaucaggaagaaucacagucucuaccaaaagaagccaacaaacuguaaucccgaauaucggaucuagacccaggguaagggauauccccagcagaauaagcaucuauuggacaauaguaaaaccgggagacauacuuuugauuaacagcacagggaaucuaauugcuccucgggguuacuucaaaauacgaagugggaaaagcucaauaaugagaucagaugcacccauuggcaaaugcaauucugaaugcaucacuccaaauggaagcauucccaaugacaaaccauuucaaaauguaaacaggaucacauauggggccugucccagauauguuaagcaaaacacucugaaauuggcaacagggaugcgaaauguaccagagaaacaaacuagaggcauauuuggcgcaaucgcggguuucauagaaaaugguugggagggaaugguggaugguugguacgguuucaggcaucaaaauucugagggaauaggacaagcagcagaucucaaaagcacucaagcagcaaucaaccaaaucaaugggaagcugaauagguugaucgggaaaaccaacgagaaauuccaucagauugaaaaagaauucucagaaguagaagggagaauucaggaccucgagaaauauguugaggacacuaaaauagaucucuggucauacaacgcggagcuucuuguugcccuggagaaccaacauacaauugaucuaacugacucagaaaugaacaaacuguuugaaagaacaaagaagcaacugagggaaaaugcugaggauaugggcaaugguuguuucaaaauauaccacaaaugugacaaugccugcauagggucaaucagaaauggaacuuaugaccaugauguauacagagaugaagcauuaaacaaccgguuccagaucaaagguguugagcugaagucaggauacaaagauuggauccuauggauuuccuuugccauaucauguuuuuugcuuuguguugcuuuguugggguucaucaugugggccugccaaaaaggcaacauuaggugcaacauuugcauuuga

SEQ ID NO: 33336 - RNA, 1701 nt, Artificial Sequence; identical to SEQ ID NO: 33332
  derived and/or modified CDS sequence (wt) from hemagglutinin__InfluenzaA__ABI92841

SEQ ID NO: 33337 - RNA, 1701 nt, Artificial Sequence
  derived and/or modified CDS sequence (wt) from hemagglutinin__InfluenzaA__ABI92852
augaagacuaucauugcuuugagcuacauucuaugucugguuuucgcucaaaaacuucccggaaaugacaacagcacggcaacgcugugccuugggcaccaugcaguaccaaacggaacgauagugaaaacaaucacgaaugaccaaauugaaguuacuaaugcuacugagcugguucagaguuccucaacagguggaauaugcgacaguccucaucagauccuugauggagaaaacugcacacuaauagaugcucuauugggagacccucagugugauggcuuccaaaauaagaaaugggaccuuuuuguugaacgcagcaaagccuacagcaacuguuacccuuaugaugugccggauuaugccucccuuaggucacuaguugccucauccggcacacuggaguuuaacaaugaaagcuucaauuggacuggagucacucaaaauggaacaagcucugcuugcaaaaggagaucuaauaacaguuucuuuaguagauugaauugguugacccauuuaaaauucaaauacccagcauugaacgugacuaugccaaacaaugaaaaauuugacaaauuguacauuugggggguucaccacccggguacggacaaugaccaaaucagccuauaugcucaagcaucaggaagaaucacagucucuaccaaaagaagccaacaaacuguaaucccgaauaucggauauagacccaggguaagggauauccccagcagaauaagcaucuauuggacaauaguaaaaccgggagacauacuuuugauuaacagcacagggaaucuaauugcuccucgggguuacuucaaaauacgaagugggaaaagcucaauaaugagaucagaugcacccauuggcaaaugcaauucugaaugcaucacuccaaauggaagcauucccaaugacaaaccauuucaaaauguaaacaggaucacauauggggccugucccagauauguuaagcaaaacacucugaaauuggcaacagggaugcgaaauguaccagagaaacaaacuagaggcauauuuggcgcaaucgcggguuucauagaaaaugguugggagggaaugguggaugguugguacgguuucaggcaucaaaauucugagggaauaggacaagcagcagaucucaaaagcacucaagcagcaaucaaccaaaucaaugggaagcugaauagguugaucgggaaaaccaacgagaaauuccaucagauugaaaaagaauucucagaaguagaagggagaauucaggaccucgagaaauauguugaggacacuaaaauagaucucuggucauacaacgcggagcuucuuguugcccuggagaaccaacauacaauugaucuaacugacucagaaaugaacaaacuguuugaaagaacaaagaagcaacugagggaaaaugcugaggauaugggcaaugguuguuucaaaauauaccacaaaugugacaaugccugcauagggucaaucagaaauggaacuuaugaccaugauguauacagagaugaagcauuaaacaaccgguuccagaucaaagguguugagcugaagucaggauacaaagauuggauccuauggauuuccuuugccauaucauguuuuuugcuuuguguugcuuuguugggguucaucaugugggccugccaaaaaggcaacauuaggugcaacauuugcauuuga

SEQ ID NO: 33338 - RNA, 1701 nt, Artificial Sequence
  derived and/or modified CDS sequence (wt) from hemagglutinin__InfluenzaA__ABI92863
augaagacuaucauugcuuugagcuacauccuaugucugguuuucgcucaaaaacuucccggaaaugacaacagcacggcaacgcugugccuugggcaccaugcaguaccaaacggaacgauagugaaaacaaucacgaaugaccaaauugaaguuacuaaugcuacugagcugguucagaguuccucaacagguggaauaugcgacaguccucaucagauccuugauggagaaaacugcacacuaauagaugcucuauugggagacccucagugugauggcuuccaaaauaaaaaaugggaccuuuuuguugaacgcagcaaagcccacagcaacuguuacccuuaugaugugccggauuaugccucccuuaggucacuaauugccucauccggcacacuggaguuuaacaaugaaagcuucaauuggacuggagucacucagaauggaacaagcucugcuugcaaaaggagaucuaaucaaaguuucuuuaguagauugaauugguugacccauuuaaaauucaaauacccagcauugaacgugacuaugccaaacaaugaaaaauuugacaaauuguacauuugggggguucaccacccggguacggacagugaccaaaucagccuauaugcucaagcaccaggaagaaucacagucucuaccaaaagaagccaacaaacuguaaucccgaauaucggaucuagacccaggguaagggauaucuccagcagaauaagcaucuauuggacaauaguaaaaccgggagacauacuuuugauuaacagcacagggaaucuaauugcuccucgggguuacuucaaaauacgaagugggaaaagcucaauaaugaaaucagaugcacccauuggcagaugcaauucugaaugcaucacuccaaauggaagcauucccaaugacaaaccauuucaaaauguaaacaggaucacauauggggccugucccagauauguuaagcaaaacacucugaaauuggcaacagggaugcgaaauguaccagagaaacaaacuagaggcauauuuggcgcaauugcggguuucauagaaaaugguugggagggaaugguggacgguugguacgguuucaggcaucagaauucugagggcacaggacaagcagcagaucucaaaagcacucaagcagcaaucaaccaaaucaaugggaaacugaauagguuaaucgggaaaacaaacgagaaauuccaucagauugaaaaagaauucucagaaguagaagggagaauucaggaccucgagaaauauguugaggacacuaaaauagaucucuggucauacaacgcggagcuucuuguugcccuggagaaccaacauacaauugaucuaacugacucagaaaugaacaaacuguuugaaagaacaaagaagcaacugagggaaaaugcugaggauaugggcaaugguuguuucaaaauauaccacaaaugugacaaugccugcauagggucaaucagaaauggaacuuaugaccaugauguauacagagaugaagcauuaaacaaccgguuccagaucaaagguguugagcugaagucaggauacaaagauuggauccuauggauuuccuuugccauaucaugucuuuugcuuuguguugcuuuguugggguucaucaugugggccugccaaaaaggcaacauuaggugcaacauuugcauuuga

SEQ ID NO: 33339 - RNA, 1701 nt, Artificial Sequence; identical to SEQ ID NO: 33332
  derived and/or modified CDS sequence (wt) from hemagglutinin__InfluenzaA__ABI92874

SEQ ID NO: 33340 - RNA, 1701 nt, Artificial Sequence; identical to SEQ ID NO: 33332
  derived and/or modified CDS sequence (wt) from hemagglutinin__InfluenzaA__ABI92885

SEQ ID NO: 33341 - RNA, 1701 nt, Artificial Sequence
  derived and/or modified CDS sequence (wt) from hemagglutinin__InfluenzaA__ABI92907
augaagacuaucauugcuuugagcuacauucuaugucugguuuucgcucaaaaacuucccggaaaugacaacagcacggcaacgcugugccuugggcaccaugcaguaccaaacggaacgauagugaaaacaaucacgaaugaccaaauugaaguuacuaaugcuacugagcugguucagaguuccucaacagguggaauaugcgacaguccuuaucagauccuugauggagaaaacugcacacuaauagaugcucuauugggagacccucagugugauggcuuccaaaauaagaaaugggaccuuuuuguugaacgcagcaaagccuacagcaacuguuacccuuaugaugugccggauuaugucucccuuaggucacuaguugccucauccggcacacuggaguuuaacaaugaaagcuucaauuggacuggagucacucaaaauggaacaagcucugcuugcaaaaggagaucuaauaacaguuucuuuaguagauugaauugguugacccauuuaaaauucaaauacccagcauugaacgugacuaugccaaacaaugaaaaauuugacaaauuguacauuugggggguucaccacccggguacggacaaugaccaaaucagccuauaugcucaagcaucaggaagaaucacagucucuaccaaaagaagccaacaaacuguaaucccgaauaucggaucuagacccaggguaagggauauccccagcagaauaagcaucuauuggacaauaguaaaaccgggagacauacuuuugauuaacagcacagggaaucuaauugcuccucgggguuacuucaaaauacgaagugggaaaagcucaauaaugagaucagaugcacccauuggcaaaugcaauucugaaugcaucacuccaaauggaagcauucccaaugacaaaccauuucaaaauguaaacaggaucacauauggggccugucccagauauguuaagcaaaacacucugaaauuggcaacagggaugcgaaauguaccagagaaacaaacuagaggcauauuuggcgcaaucgcggguuucauagaaaaugguugggagggaaugguggaugguugguacgguuucaggcaucaaaauucugagggaauaggacaagcagcagaucucaaaagcacucaagcagcaaucaaccaaaucaaugggaagcugaauagguugaucgggaaaaccaacgagaaauuccaucagauugaaaaagaauucucagaaguagaagggagaauucaggaccucgagaaauauguugaggacacuaaaauagaucucuggucauacaacgcggagcuucuuguugcccuggagaaccaacauacaauugaucuaacugacucagaaaugaacaaacuguuugaaagaacaaagaagcaacugagggaaaaugcugaggauaugggcaaugguuguuucaaaauauaccacaaaugugacaaugccugcauagggucaaucagaaauggaacuuaugaccaugauguauacagagaugaggcauuaaacaaccgguuccagaucaaagguguugagcugaagucaggauacaaagauuggauccuauggauuuccuuugccauaucauguuuuuugcuuuguguugcuuuguugggguucaucaugugggccugccaaaaaggcaacauuaggugcaacauuugcauuuga

SEQ ID NO: 33342 - RNA, 1701 nt, Artificial Sequence; identical to SEQ ID NO: 32330
  derived and/or modified CDS sequence (wt) from hemagglutinin__InfluenzaA__ABI92918

SEQ ID NO: 33343 - RNA, 1701 nt, Artificial Sequence
  derived and/or modified CDS sequence (wt) from hemagglutinin__InfluenzaA__ABI92929
augaagacuaucauugcuuugagcuacauucuaugucugguuuucgcucaaaaacuucccggaaaugacaacagcacggcaacgcugugccuugggcaccaugcaguaccaaacggaacgauagugaaaacaaucacgaaugaccaaauugaaguuacuaaugcuacugagcugguucagaguuccucaacagguggaauaugcgacaguccuuaucagauccuugauggagaaaacugcacacuaauagaugcucuauugggagacccucagugugauggcuuccaaaauaagaaaugggaccuuuuuguugaacgcagcaaagccuacagcaacuguuacccuuaugaugugccggauuaugucucccuuaggucacuaguugccucauccggcacacuggaguuuaacaaugaaagcuucaauuggacuggagucacucaaaauggaacaagcucugcuugcaaaaggagaucuaauaacaguuucuuuaguagauugaauugguugacccauuuaaaauucaaauacccagcauugaacgugacuaugccaaacaaugaaaaauuugacaaauuguacauuugggggguucaccacccggguacggacaaugaccaaaucagccuauaugcucaagcaucaggaagaaucacagucucuaccaaaagaagccaacaaacuguaaucccgaauaucggaucuagacccaggguaagggauauccccagcagaauaagcaucuauuggacaauaguaaaaccgggagacauacuuuugauuaacagcacagggaaucuaauugcuccucgggguuacuucaaaauacgaagugggaaaagcucaauaaugagaucagaugcacccauuggcaaaugcaauucugaaugcaucacuccaaauggaagcauucccaaugacaaaccauuucaaaauguaaacaggaucacauauggggccugucccagauauguuaagcaaaacacucugaaauuggcaacagggaugcgaaauguaccagagaaacaaacuagaggcauauuuggcgcaaucgcggguuucauagaaaaugguugggagggaaugguggaugguugguacgguuucaggcaucaaaauucugagggaauaggacaagcagcagaucucaaaagcacucaagcagcaaucaaccaaaucaaugggaagcugaauagguugaucgggaaaaccaacgagaaauuccaucagauugaaaaagaauucucagaaguagaagggagaauucaggaccucgagaaauauguugaggacacuaaaauagaucucuggucauacaacgcggagcuucuuguugcccuggagaaccaacauacaauugaucuaacugacucagaaaugaacaaacuguuugaaagaacaaagaagcaacugagggaaaaugcugaggauaugggcaaugguuguuucaaaauauaccacaaaugugacaaugccugcauagggucaaucagaaauggaacuuaugaccaugauguauacagagaugaagcauuaaacaaccgguuccagaucaaagguguugagcugaagucaggauacaaagauuggauccuauggauuuccuuugccauaucauguuuuuugcuuuguguugcuuuguugggguucaucaugugggccugccaaaaaggcaacauuaggugcaacauuugcauuuga

SEQ ID NO: 33344 - RNA, 1701 nt, Artificial Sequence
  derived and/or modified CDS sequence (wt) from hemagglutinin__InfluenzaA__ABI92940
augaagacuaucauugcuuuuaacuacauucuaugucugguuuucgcucaaaaacuucccggaaaugacaacagcacggcaacgcugugccuugggcaccaugcaguaccaaacggaacgauagugaaaacaaucacgaaugaccaaauugaaguuacuaaugcuacugagcugguucagaguuccucaacagguggaauaugcgacaguccucaucagauccuugauggagaaaacugcacacuaauagaugcucuauugggagacccucagugugauggcuuccaaaauaagaaaugggaccuuuuuguugaacgcagcaaagccuacagcaacuguuacccuuaugaugugccggauuaugccucccuuaggucacuaguugccucauccggcacacuggaguuuaacaaugaaaucuucaauuggacuggagucacucaaaauggaacaagcucugcuugcaaaaggagaucuaauaacaguuucuuuaguagauugaauugguugacccacuuaaaauucaaauacccagcauugaacgugacuaugccaaacaaugaaaaauuugacaaauuguacauuugggggguucaccacccggguacggacaaugaccaaaucagccuauaugcucaagcaucaggaagaaucacagucucuaccaaaagaagccaacaaacuguaaucccgaauaucggaucuagacccaggguaagggauauccccagcagaauaagcaucuauuggacaauaguaaaaccgggagacauacuuuugauuaacagcacagggaaucuaauugcuccucgggguuacuucaaaauacgaagugggaaaagcucaauaaugagaucagaugcacccauuggcaaaugcaauucugaaugcaucacuccaaauggaagcauucccaaugacaaaccauuucaaaauguaaacaggaucacauauggggccugucccagauauguuaagcaaaacacucugaaauuggcaacagggaugcgaaauguaccagagaaacaaacuagaggcauauuuggcgcaaucgcggguuucauagaaaaugguugggagggaaugguggaugguugguacgguuucaggcaccaaaauucugagggaacaggacaagcagcagaucucaaaagcacucaagcagcaaucaaccaaaucaaugggaagcugaauagguugaucgggaaaaccaacgagaaauuccaucagauugaaaaagaauucucagaaguagaagggagaauucaggaccucgagaaauauguugaggacacuaaaauagaucucuggucauacaacgcggagcuucuuguugcccuggagaaccaacauacaauugaucuaacugacucagaaaugaacaaacuguuugaaagaacaaagaagcaacugagggaaaaugcugaggauaugggcaaugguuguuucaaaauauaccacaaaugugacaaugccugcauagggucaaucagaaauggaacuuaugaccaugauguauacagggaugaagcauuaaacaaccgguuccagaucaaagguguugagcugaagucaggauacaaagauuggauccuauggauuuccuuugccauaucauguuuuuugcuuuguguugcuuuguugggguucaucaugugggccugccaaaaaggcaacauuaggugcaacauuugcauuuga

SEQ ID NO: 33345 - RNA, 1701 nt, Artificial Sequence
  derived and/or modified CDS sequence (wt) from hemagglutinin__InfluenzaA__ABI92951
augaagacuaucauugcuuugagcuacauucuaugucugguuuucgcucaaaaacuucccggaaaugacaacagcacggcaacgcugugccuugggcaccaugcaguaccaaacggaacgauagugaaaacaaucacgaaugaccaaauugaaguuacuaaugcuacugagcugguucagaguuccucaacagguggaauaugcgacaguccucaucagauccuugauggagaaaacugcacacuaauagaugcucuauugggagacccucagugugauggcuuccaaaauaagaaaugggaccuuuuuguugaacgcagcaaagccuacagcaacuguuacccuuaugaugugccggauuaugccucccuuaggucacuaauugccucauccggcacacuggaguuuaacaaugaaagcuucaauuggacuggagucacucaaaauggaacaagcucugcuugcaaaaggagaucuaauagcaguuucuuuaguagauugaauugguugacccacuuaaaauucaaauacccagcauugaacgugacuaugccaaacaaugaagaauuugacaaauuguacauuugggggguucaccacccggguacauacaaugaccaaaucagccuauaugcucaagcaucaggaagaaucacagucucuaccaaaagaagccaacaaacuguaaucccgaauaucgggucuagacccaggguaagggauauccccagcagaauaagcaucuauuggacaauaguaaaaccgggagacauacuuuugauuaacagcacagggaaucuaauugcuccucgggguuacuucaaaauacgaagugggaaaagcucaauaaugagaucagaugcacccauuggcaaaugcaauucugaaugcaucacuccaaauggaagcauucccaaugacaaaccauuucaaaauguaaacaggaucacauauggggccugucccagauauguuaagcaaaacacucugaaauuggcaacagggaugcgaaauguaccagagaaacaaacuagaggcauauuuggcgcaaucgcggguuucauagaaaaugguugggagggaaugguggaugguugguacgguuucaggcaucaaaauucugagggaauaggacaagcagcagaucucaaaagcacucaagcagcaaucgaccaaaucaaugggaagcugaauagguugaucgggaaaaccaacgagaaauuccaucagauugaaaaagaguucucagaaguagaagggagaauucaggaccucgagaaauauguugaggacacuaaaauagaucucuggucauacaacgcggagcuucuuguugcccuggagaaccaacauacaauugaucuaacugacucagaaaugaacaaacuguuugaaagaacaaagaagcaacugagggaaaaugcugaggauaugggcaaugguuguuucaaaauauaccacaaaugugacaauuccugcauagggucaaucagaaauggaacuuaugaccaugauguauacagagaugaagcauuaaacaaccgguuccagaucaaagguguugagcugaagucaggauacaaagauuggauccuauggauuuccuuugccauaucauguuuuuugcuuuguguugcuuuguugggguucaucaugugggccugccaaaaaggcaacauuaggugcaacauuugcauuuga

SEQ ID NO: 33346 - RNA, 1701 nt, Artificial Sequence
  derived and/or modified CDS sequence (wt) from hemagglutinin__InfluenzaA__ABI92962
augaagacuaucauugcuuugagcuacauucuaugucugguuuucgcucaaaaacuucccggaaaugacaacagcacggcaacgcugugccuugggcaccaugcaguaccaaacggaacgauagugaaaacaaucacgaaugaccaaauugaaguuacuaaugcuacugagcugguucagaguuccucaacagguggaauaugcgacaguccucaucagauccuugauggagaaaacugcacacuaauagaugcucuauugggagacccucagugugauggcuuccaaaauaagaaaugggaccuuuuuguugaacgcaacaaagccuacagcaacuguuacccuuaugaugugccggauuaugccucccuuaggucacuaauugccucauccggcacacuggaguuuaacaaugaaagcuucaauuggacuggagucacucaaaauggaacaagcucugcuugcaaaaggagaucuaauagcaguuucuuuaguagauugaauugguugacccacuuaaaauucaaauacccagcauugaacgugacuaugccaaacaaugaagaauuugacaaauuguacauuugggggguucaccacccggguacauacaaugaccaaaucagccuauaugcucaagcaucaggaagaaucacagucucuaccaaaagaagccaacaaacuguaaucccgaauaucgggucuagacccaggguaagggauauccccagcagaauaagcaucuauuggacaauaguaaaaccgggagacauacuuuugauuaacagcacagggaaucuaauugcuccucgggguuacuucaaaauacgaagugggaaaagcucaauaaugagaucagaugcacccauuggcaaaugcaauucugaaugcaucacuccaaauggaagcauucccaaugacaaaccauuucaaaauguaaacaggaucacauauggggccugucccagauauguuaagcaaaacacucugaaauuggcaacagggaugcgaaauguaccagaaaaacaaacuagaggcauauuuggcgcaaucgcggguuucauagaaaaugguugggagggaaugguggaugguugguacgguuucaggcaucaaaauucugagggaauaggacaagcagcagaucucaaaagcacucaagcagcaaucgaccaaaucaaugggaagcugaauagguugaucgggaaaaccaacgagaaauuccaucagauugaaaaagaauucucagaaguagaagggagaauucaggaccucgagaaauauguugaggacacuaaaauagaucucuggucauacaacgcggagcuucuuguugcccuggagaaccaacauacaauugaucuaacugacucagaaaugaacaaacuguuugaaagaacaaagaagcaacugagggaaaaugcugaggauaugggcaaugguuguuucaaaauauaccacaaaugugacaaugccugcauagggucaaucagaaauggaacuuaugaccaugauguauacagagaugaagcauuaaacaaccgguuccagaucaaagguguugagcugaagucaggauacaaagauuggauccuauggauuuccuuugccauaucauguuuuuugcuuuguguugcuuuguugggguucaucaugugggccugccaaaaaggcaacauuaggugcaacauuugcauuuga

SEQ ID NO: 33347 - RNA, 1701 nt, Artificial Sequence
  derived and/or modified CDS sequence (wt) from hemagglutinin__InfluenzaA__ABI92973
augaagacuaucauugcuuugagcuacauucuaugucugguuuucgcucaaaaacuucccggaaaugacaacagcacggcaacgcugugccuugggcaccaugcaguaccaaacggaacgauagugaaaacaaucacgaaugaccaaauugaaguuacuaaugcuacugagcugguucagaguuccucaacagguggaauaugcgacaguccucaucagauccuugauggggaaaacugcacacuaauagaugcucuauugggagacccucagugugauggcuuccaaaauaagaaaugggaccuuuuuguugaacgcagcaaagccuacagcaacuguuacccuuaugaugugccggauuaugccucccuuaggucacuaauugccucauccggcacacuggaguuuaacaaugaaagcuucaauuggacuggagucacucaaaauggaacaagcucugcuugcaaaaggagaucuaauagcaguuucuuuaguagauugaauugguugacccacuuaaaauucaaauacccagcauugaacgugacuaugccaaacaaugaagaauuugacaaauuguacauuugggggguucaccacccggguacauacaaugaccaaaucagccuauaugcucaagcaucaggaagaaucacagucucuaccaaaagaagccaacaaacuguaaucccgaauaucgggucuagacccaggguaagggauauccccagcagaauaagcaucuauuggacaauaguaaaaccgggagacauacuuuugauuaacagcacagggaaucuaauugcuccucgggguuacuucaaaauacgaagugggaaaagcucaauaaugagaucagaugcacccauuggcaaaugcaauucugaaugcaucacuccaaauggaagcauucccaaugacaaaccauuucaaaauguaaacaggaucacauauggggccugucccagauauguuaagcaaaacacucugaaauuggcaacagggaugcgaaauguaccagagaaacaaacuagaggcauauuuggcgcaaucgcggguuucauagaaaaugguugggagggaaugguggaugguugguacgguuucaggcaucaaaauucugagggaauaggacaagcagcagaucucaaaagcacucaagcagcaaucgaccaaaucaaugggaagcugaauagguugaucgggaaaaccaacgagaaauuccaucagauugaaaaagaguucucagaaguagaagggagaauucaggaccucgagaaauauguugaggacacuaaaauagaucucuggucauacaacgcggagcuucuuguugcccuggagaaccaacauacaauugaucuaacugacucagaaaugaacaaacuguuugaaagaacaaagaagcaacugagggaaaaugcugaggauaugggcaaugguuguuucaaaauauaccacaaaugugacaaugccugcauagggucaaucagaaauggaacuuaugaccaugauguauacagagaugaagcauuaaacaaccgguuccagaucaaagguguugagcugaagucaggauacaaagauuggauccuauggauuuccuuugccauaucauguuuuuugcuuuguguugcuuuguugggguucaucaugugggccugccaaaaaggcaacauuaggugcaacauuugcauuuga

SEQ ID NO: 33348 - RNA, 1701 nt, Artificial Sequence
  derived and/or modified CDS sequence (wt) from hemagglutinin__InfluenzaA__ABI92984
augaagacuaucauugcuuugagcuacauucuaugucugguuuucgcucaaaaacuucccggaaaugacaacagcacggcaacgcugugccuugggcaccaugcaguaccaaacggaacgauagugaaaacaaucacgaaugaccaaauugaaguuacuaaugcuacugagcugguucagaguuccucaacagguggaauaugcgacaguccucaucagauccuugauggagaaaacugcacacuaauagaugcucuauugggagacccucagugugauggcuuccaaaacaagaaaugggaccuuuuuguugaacgcagcaaagccuacagcaacuguuacccuuaugaugugccggauuaugccucccuuaggucacuaauugccucauccggcacacuggaguuuaacaaugaaagcuucaauuggacuggagucacucaaaauggaacaagcucugcuugcaaaaggagaucuaauagcaguuucuuuaguagauugaauugguugacccacuuaaaauucaaauacccagcauugaacgugacuaugccaaacaaugaagaauuugacaaauuguacauuugggggguucaccacccggguacauacaaugaccaaaucagccuauaugcucaagcaucaggaagaaucacagucucuaccaaaagaagccaacaaacuguaaucccgaauaucgggucuagacccaggguaagggauauccccagcagaauaagcaucuauuggacaauaguaaaaccgggagacauacuuuugauuaacagcacagggaaucuaauugcuccucgggguuacuucaaaauacgaagugggaaaagcucaauaaugagaucagaugcacccauuggcaaaugcaauucugaaugcaucacuccaaauggaagcauucccaaugacaaaccauuucaaaauguaaacaggaucacauauggggccugucccagauauguuaagcaaaacacucugaaauuggcaacagggaugcgaaauguaccagagaaacaaacuagaggcauauuuggcgcaaucgcggguuucauagaaaaugguugggagggaaugguggaugguugguacgguuucaggcaucaaaauucugagggaauaggacaagcagcagaucucaaaagcacucaagcagcaaucgaccaaaucaaugggaagcugaauagguugaucgggaaaaccaacgagaaauuccaucagauugaaaaagaguucucagaaguagaagggagaauucaggaccucgagaaauauguugaggacacuaaaauagaucucuggucauacaacgcggagcuucuuguugcccuggagaaccaacauacaauugaucuaacugacucagaaaugaacaaacuguuugaaagaacaaagaagcaacugagggaaaaugcugaggauaugggcaaugguuguuucaaaauauaccacaaaugugacaaugccugcauagggucaaucagaaauggaacuuaugaccaugauguauacagagaugaagcauuaaacaaccgguuccagaucaaagguguugagcugaagucaggauacaaagauuggauccuauggauuuccuuugccauaucauguuuuuugcuuuguguugcuuuguugggguucaucaugugggccugccaaaaaggcaacauuaggugcaacauuugcauuuga

SEQ ID NO: 33349 - RNA, 1701 nt, Artificial Sequence
  derived and/or modified CDS sequence (wt) from hemagglutinin__InfluenzaA__ABI92995
augaagacuaucauugcuuugagcuacauucuaugucugguuuucgcucaaaaacuucccggaaaugacaacagcacggcaacgcugugccuugggcaccaugcaguaccaaacggaacgauagugaaaacaaucacgaaugaccaaauugaaguuacuaaugcuacugagcugguucagaguuccucaacagguggaauaugcgacaguccucaucagauccuugauggagaaaacugcacacuaauagaugcucuauugggagacccucagugugauggcuuccaaaauaagaaaugggaccuuuuuguugaacgcagcaaagccuacagcaacuguuacccuuaugaugugccggauuaugccucccuuaggucacuaauugccucauccggcacacuggaguuuaacaaugaaagcuucaauuggacuggagucacucaaaauggaacaagcucugcuugcaaaaggagaucuaauagcaguuucuuuaguagauugaauugguugacccacuuaaaauucaaauacccagcauugaacgugacuaugccaaacaaugaagaauuugacaaauuguacauuugggggguucaccacccggguacauacaaugaccaaaucagccuauaugcucaagcaucaggaagaaucacagucucuaccaaaagaagccaacaaacuguaaucccgaauaucgggucuagacccaggauaagggauauccccagcagaauaagcaucuauuggacaauaguaaaaccgggagacauacuuuugauuaacagcacagggaaucuaauugcuccucgggguuacuucaaaauacgaagugggaaaagcucaauaaugagaucagaugcacccauuggcaaaugcaauucugaaugcaucacuccaaauggaagcauucccaaugacaaaccauuucaaaauguaaacaggaucacauauggggccugucccaaauauguuaagcaaaacacucugaaauuggcaacagggaugcgaaauguaccagagaaacaaacuagaggcauauuuggcgcaaucgcggguuucauagaaaaugguugggagggaaugguggaugguugguacgguuucaggcaucaaaauucugagggaauaggacaagcagcagaucucaaaagcacucaagcagcaaucgaccaaaucaaugggaagcugaauagguugaucgggaaaaccaacgagaaauuccaucagauugaaaaagaguucucagaaguagaagggagaauucaggaccucgagaaauauguugaggacacuaaaauagaucucuggucauacaacgcggagcuucuuguugcccuggagaaccaacauacaauugaucuaacugacucagaaaugaacaaacuguuugaaagaacaaagaagcaacugagggaaaaugcugaggauaugggcaaugguuguuucaaaauauaccacaaaugugacaaugccugcauagggucaaucagaaauggaacuuaugaccaugauguauacagagaugaagcauuaaacaaccgguuccagaucaaagguguugagcugaagucaggauacaaagauuggauccuauggauuuccuuugccauaucauguuuuuugcuuuguguugcuuuguugggguucaucaugugggccugccaaaaaggcaacauuaggugcaacauuugcauuuga

SEQ ID NO: 33350 - RNA, 1701 nt, Artificial Sequence
  derived and/or modified CDS sequence (wt) from hemagglutinin__InfluenzaA__ABI93006
augaagacuaucauugcuuugagcuacauucuaugucugguuuucgcucaaaaacuucccggaaaugacaacagcacggcaacgcugugccuugggcaccaugcaguaccaaacggaacgauagugaaaacaaucacgaaugaccaaauugaaguuacuaaugcuacugagcugguucagaguuccucaacagguggaauaugcgacaguccucaucagauccuugauggagaaaacugcacacuaauagaugcucuauugggagacccucagugugauggcuuccaaaauaagaaaugggaccuuuuuguugaacgcagcaaagccuacagcaacuguuacccuuaugaugugccggauuaugccucccuuaggucacuaauugccucauccggcacacuggaguuuaacaaugaaagcuucaauuggacuggagucacucaaaauggaacaagcucugcuugcaaaaggagaucuaauagcaguuucuuuaguagauugaauugguugacccacuuaaaauucaaauacccagcauugaacgugacuaugccaaacaaugaagaauuugacaaauuguacauuugggggguucaccacccggguacauacaaugaccaaaucagccuauaugcucaagcaucaggaagaaucacagucucuaccaaaagaagccaacaaacuguaaucccgaauaucggaucuagacccaggguaagggauauccccagcagaauaagcaucuauuggacaauaguaaaaccgggagacauacuuuugauuaacagcacagggaaucuaauugcuccucgggguuacuucaaaauacgaagugggaaaagcucaauaaugagaucagaugcacccauuggcaaaugcaauucugaaugcaucacuccaaauggaagcauucccaaugacaaaccauuucaaaauguaaacaggaucacauauggggccugucccagauauguuaagcaaaacacucugaaauuggcaacagggaugcgaaauguaccagagaaacaaacuagaggcauauuuggcgcaaucgcggguuucauagaaaaugguugggagggaaugguggaugguugguacgguuucaggcaucaaaauucugagggaauaggacaagcagcagaucucaaaagcacucaagcagcaaucgaccaaaucaaugggaagcugaauagguugaucgggaaaaccaacgagaaauuccaucagauugaaaaagaauucucagaaguagaagggagaauucaggaccucgagaaauauguugaggacacuaaaauagaucucuggucauacaacgcggagcuucuuguugcccuggagaaccaacauacaauugaucuaacugacucagaaaugaacaaacuguuugaaagaacaaagaagcaacugagggaaaaugcugaggauaugggcaaugguuguuucaaaauauaccacaaaugugacaaugccugcauagggucaaucagaaauggaacuuaugaccaugauguauacagagaugaagcauuaaacaaccgguuccagaucaaagguguugagcugaagucaggauacaaagauuggauccuauggauuuccuuugccauaucauguuuuuugcuuuguguugcuuuguugggguucaucaugugggccugccaaaaaggcaacauuaggugcaacauuugcauuuga

SEQ ID NO: 33351 - RNA, 1701 nt, Artificial Sequence
  derived and/or modified CDS sequence (wt) from hemagglutinin__InfluenzaA__ABI93017
augaagacuaucauugcuuugagcuacauucuaugucugguuuucgcucaaaaacuucccggaaaugacaacagcacggcaacgcugugccuugggcaccaugcaguaccaaacggaacgauagugaaaacaaucacgaaugaccaaauugaaguuacuaaugcuacugagcugguucagaguuccucaacagguggaauaugcgacaguccucaucagauccuugauggagaaaacugcacacuaauagaugcucuauugggagacccucagugugauggcuuccaaaauaagaaaugggaccuuuuuguugaacgcagcaaagccuacagcaacuguuacccuuaugaugugccggauuaugccucccuuaggucacuaauugccucauccggcacacuggaguuuaacaaugaaagcuucaauuggacuggagucacucaaaauggaacaagcucugcuugcaaaaggagaucuaauagcaguuucuuuaguagauugaauugguugacccacuuaaaauucaaauacccagcauugaacgugacuaugccaaacaaugaagaauuugacaaauuguacauuugggggguucaccacccggguacauacaaugaccaaaucagccuauaugcucaagcaucaggaagaaucacagucucuaccaaaagaagccaacaaacuguaaucccgaauaucgggucuagacccaggguaagggauauccccagcagaauaagcaucuauuggacaauaguaaaaccgggagacauacuuuugauuaacagcacagggaaucuaauugcuccucgggguuacuucaaaauacgaagugggaaaagcucaauaaugagaucagaugcacccauuggcaaaugcaauucugaaugcaucacuccaaauggaagcauucccaaugacaaaccauuucaaaauguaaacaggaucacauauggggccugucccagauauguuaagcaaaacacucugaaauuggcaacagggaugcgaaauguaccagagaaacaaacuagaggcauauuuggcgcaaucgcggguuucauagaaaaugguugggagggaaugguggaugguugguacgguuucaggcaucaaaauucugagggaauaggacaagcagcagaucucaaaagcacucaagcagcaaucgaccaaaucaaugggaagcugaauagguugaucgggaaaaccaacgagaaauuccaucagauugaaaaagaguucucagaaguagaagggagaauucaggaccucgagaaauauguugaggacacuaaaauagaucucuggucauacaacgcggagcuucuuguugcccuggagaaccaacauacaauugaucuaacugacucagaaaugaacaaacuguuugaaagaacaaagaagcaacugagggaaaaugcugaggauaugggcaaugguuguuucaaaauauaccacaaaugugacaaugccugcauagggucaaucagaaauggaacuuaugaccaugauguauacagagaugaagcauuaaacaaccgguuccagaucaaagguguugagcugaagucaggauacaaagauuggauccuauggauuuccuuugccauaucauguuuuuugcuuuguguugcuuuguugggguucaucaugugggccugccaaaaaggcaacauuaggugcaacauuugcauuuga

SEQ ID NO: 33352 - RNA, 1698 nt, Artificial Sequence; identical to SEQ ID NO: 33244
  derived and/or modified CDS sequence (wt) from hemagglutinin__InfluenzaA__ABI93028

SEQ ID NO: 33353 - RNA, 1701 nt, Artificial Sequence; identical to SEQ ID NO: 32978
  derived and/or modified CDS sequence (wt) from hemagglutinin__InfluenzaA__ABI93039

SEQ ID NO: 33354 - RNA, 1701 nt, Artificial Sequence
  derived and/or modified CDS sequence (wt) from hemagglutinin__InfluenzaA__ABI93061
augaagacuaucauugcuuugagcuacauuuuaugucugguuuucgcucaaaaacuucccggaaaugacaacagcacggcaacgcugugccuggggcaccaugcagugccaaacggaacgcuagugaaaacaaucacgaaugaccaaauugaagugacuaaugcuacugagcugguucagaguuccucaacagguagaauaugcgacaguccucaccaaauccuugauggagaaaacugcacacuaauagaugcucuauugggagacccucauugugauggcuuccaaaauaaggaaugggaccuuuuuguugaacgcagcaaagccuacagcaacuguuacccuuaugaugugccggauuaugccucccuuaggucacuaguugccucauccggcacacuggaguuuaacaaugaaagcuucaauuggacuggagucgcucagaauggaacaagcucugcuugcaaaaggagaucuaauaaaaguuucuuuaguagauugaauugguugcaccaauuaaaauacaaauacccagcacugaacgugacuaugccaaacaaugaaaaauuugacaaauuguacauuugggggguucaccacccgaguacagacagugaccaaaucagccuauaugcucaagcaucagggagagucacagucucuaccaaaagaagccaacaaacuguaaucccgaauaucggaucuagacccuggguaaggggugucuccagcagaauaagcaucuauuggacaauaguaaaaccgggagacauacuuuugauuaacagcacagggaaucuaauugcuccucgggguuacuucaaaauacgaagugggaaaagcucaauaaugaggucagaugcauccauuggcaaaugcaauucugaaugcaucacuccaaauggaagcauucccaaugacaaaccauuucaaaauguaaacaggaucacauauggggccugucccagauauguuaagcaaaacacucugaaauuggcaacagggaugcggaauguaccagagaaacaaacuagaggcauauucggcgcaaucgcggguuucauagaaaaugguugggagggaaugguggacgguugguacgguuucaggcaucaaaauucugagggcacaggacaagcagcagaucuuaaaagcacucaagcagcaaucaaccaaaucaacgggaaacugaauagguuaaucgagaaaacgaacgagaaauuccaucaaauugaaaaagaauucucagaaguagaagggagaauucaggaccucgagaaauauguugaggacacuaaaauagaucucuggucguacaacgcggagcuucuuguugcccuggagaaccaacauacaauugaucuaacugacucagaaaugaacaaacuguuugaaagaacaaagaagcaacugagggaaaaugcugaggauaugggcaaugguuguuucaaaauauaccacaaaugugacaaugccugcauagggucaaucagaaauggaacuuaugaccaugauguauacagagacgaagcauuaaacaaccgguuccagaucaaagguguugagcugaagucaggauacaaagauuggauccuauggauuuccuuugccauaucauguuuuuugcuuuguguuguuuugcugggguucaucaugugggccugccaaaaaggcaacauuaggugcaacauuugcauuuga

SEQ ID NO: 33355 - RNA, 1701 nt, Artificial Sequence; identical to SEQ ID NO: 32662
  derived and/or modified CDS sequence (wt) from hemagglutinin__InfluenzaA__ABI93072

SEQ ID NO: 33356 - RNA, 1701 nt, Artificial Sequence; identical to SEQ ID NO: 32662
  derived and/or modified CDS sequence (wt) from hemagglutinin__InfluenzaA__ABI93083

SEQ ID NO: 33357 - RNA, 1701 nt, Artificial Sequence; identical to SEQ ID NO: 32662
  derived and/or modified CDS sequence (wt) from hemagglutinin__InfluenzaA__ABI93094

SEQ ID NO: 33358 - RNA, 1701 nt, Artificial Sequence
  derived and/or modified CDS sequence (wt) from hemagglutinin__InfluenzaA__ABI93105
augaagacuaucauugcuuugagcuacauuuuaugucugguuuucgcucaaaaacuucccggaaaugacaacagcacggcaacgcugugccuggggcaccaugcagugccaaacggaacgcuagugaaaacaaucacgaaugaccaaauugaagugacuaaugcuacugagcugguucagaguuccucaacagguggaauaugcgacaguccucaccaaauccuugauggagaaaacugcacacuaauagaugcucuauugggagacccucauugugauggcuuccaaaauaaggaaugggaccuuuuuguugaacgcagcaaagccuacagcaacuguuacccuuaugaugugccggauuaugccucccuuaggucacuaguugccucauccggcacacuggaguuuaacaaugaaagcuucaauuggacuggagucgcucagaauggaacaagcucugcuugcaaaaggagaucuaauaaaaguuucuuuaguagauugaauugguugcaccaauuaaaauacaaauacccagcacugaacgugacuaugccaaacaaugaaaaauuugacaaauuguacauuugggggguucaccacccgaguacggacagcgaccaaaucagccuauaugcucaagcaccagggagagucacagucucuaccaaaagaagccaacaaacuguaaucccgaauaucggaucuagacccuggguaaggggugucuccagcagaauaagcaucuauuggacaauaguaaaaccaggagacauacuuuugauuaacugcacagggaaucuaauugcuccucgggguuacuucaaaauacgaagugggaaaagcucaauaaugaggucagaugcauccauuggcaaaugcaauucugaaugcaucacuccaaauggaagcauucccaaugacaaaccauuucaaaauguaaacaggaucacauauggggccugucccagauauguuaagcaaaacacucugaaauuggcaacagggaugcggaauguaccagagaaacaaacuagaggcauauucggcgcaaucgcggguuucauagaaaaugguugggagggaaugguggacgguugguacgguuucaggcaucaaaauucugagggcacaggacaagcagcagaucucaaaagcacucaagcagcaaucaaccaaaucaacgggaaacugaauagguuaaucgagaaaacgaacgagaaauuccaucaaauugaaaaagaauucucagaaguggaagggagaauucaggaccucgagaaauauguugaggacacuaaaauagaucucuggucguacaacgcggagcuucuuguugcccuggagaaccagcauacaauugaucuaacugacucagaaaugaacaaacuguuugaaagaacaaagaagcaacugagggaaaaugcugaggauaugggcaaugguuguuucaaaauauaccacaaaugugacaaugccugcauagggucaaucagaaaugggacuuaugaccaugauguauacagagacgaagcauuaaacaaccgguuccagaucaaagguguugagcugaagucaggauacaaagauuggauccuauggauuuccuuugccauaucauguuuuuugcuuuguguugucuugcugggguucaucaugugggccugccaaaaaggcaacauuaggugcaacauuugcauuuga

SEQ ID NO: 33359 - RNA, 1701 nt, Artificial Sequence
  derived and/or modified CDS sequence (wt) from hemagglutinin__InfluenzaA__ABI93116
augaagacuaucauugcuuugagcuacauuuuaugucugguuuucgcucaaaaacuucccggaaaugacaacagcacggcaacgcugugccuggggcaccaugcagugccaaacggaacgcuagugaaaacaaucacgaaugaccaaauugaagugacuaaugcuacugagcugguucagaguuccucaacagguggaauaugcgacaguccucaccaaauccuugauggagaaaacugcacacuaauagaugcucuauugggagacccucauugugauggcuuccaaaauaaggaaugggaccuuuuuguugaacgcagcaaagccuacagcaacuguuacccuuaugaugugccggauuaugccucccuuaggucacuaguugccucauccggcacacuggaguuuaacaaugaaagcuucaauuggacuggagucgcucagaauggaacaagcucugcuugcaaaaggagaucuaauaaaaguuucuuuaguagauugaauugguugcaccaauuaaaauacaaauacccagcacugaacgugacuaugccaaacaaugaaaaauuugacaaauuguacauuugggggguucaccacccgaguacggacagugaccaaaucagccuauaugcucaagcaccagggagagucacagucucuaccaaaagaagccaacaaacuguaaucccgaauaucggaucuagacccuggguaaggggugucuccagcagaauaagcaucuauuggacaauaguaaaaccgggagacauacuuuugauuaacugcacagggaaucuaauugcuccucgggguuacuucaaaaugcgaagugggaaaagcucaauaaugaggucagaugcauccauuggcaaaugcaauucugaaugcaucacuccaaauggaagcauucccaaugacaaaccauuucaaaauguaaacaggaucacauauggggccugucccagauauguuaagcaaaacacucugaaauuggcaacagggaugcggaauguaccagagaaacaaacuagaggcauauucggcgcaaucgcggguuucauagaaaaugguugggagggaaugguggacgguugguacgguuucaggcaucaaaauucugagggcacaggacaagcagcagaucucaaaagcacucaagcagcaaucaaccaaaucaacgggaaacugaauagguuaaucgagaaaacgaacgagaaauuccaucaaauugaaaaagaauucucagaaguggaagggagaauucaggaccucgagaaauauguugaggacacuaaaauagaucucuggucguacaacgcggagcuucuuguugcccuggagaaccagcauacaauugaucuaacugacucagaaaugaacaaacuguuugaaagaacaaagaagcaacugagggaaaaugcugaggauaugggcaaugguuguuucaaaauauaccacaaaugugacaaugccugcauagggucaaucagaaaugggacuuaugaccaugguguauacagagacgaagcauuaaacaaccgguuccagaucaaagguguugagcugaagucaggauacaaagauuggauccuauggauuuccuuugccauaucauguuuuuugcuuuguguugucuugcugggguucaucaugugggccugccaaaaaggcaacauuaggugcaacauuugcauuuga

SEQ ID NO: 33360 - RNA, 1689 nt, Artificial Sequence
  derived and/or modified CDS sequence (wt) from hemagglutinin__InfluenzaA__ABI94581
augaacacucaaauccugguauucgcucugguggcgagcauuccgacaaaugcagacaagaucugccuugggcaucaugccgugucaaacgggacuaaaguaaacacauuaacugagagaggaguggaagucguuaaugcaacugaaacgguggaacgaacaaacguucccaggaucugcucaaaagggaaaaggacaguugaccucggucaauguggacuucugggaacaaucacugggccaccccaaugugaccaauuccuagaauuuucggccgacuuaauuauugagaggcgagaaggaagugaugucuguuauccugggaaauucgugaaugaagaagcucugaggcaaauucucagagagucaggcggaauugacaaggagacaaugggauucaccuacagcggaauaagaacuaauggaacaaccagugcauguaggagaucaggaucuucauucuaugcagagaugaaauggcuccugucaaacacagacaaugcugcuuucccgcaaaugacuaagucauacaagaacacaaggaaagacccagcucugauaauaugggggauccaccauuccggaucaacuacagaacagaccaagcuauaugggaguggaaacaaacugauaacaguugggaguucuaauuaccaacaguccuuuguaccgaguccaggagcgagaccacaagugaauggccaaucuggaagaauugacuuucauuggcugauacuaaacccuaaugacacggucacuuucaguuucaauggggccuucauagcuccagaccgugcaagcuuucugagagggaaguccaugggaauucagagugaaguacagguugaugccaauugugaaggagauugcuaucauaguggagggacaauaauaaguaauuugcccuuucagaacauaaauagcagggcaguaggaaaauguccgagauauguuaagcaagagagucugcuguuggcaacaggaaugaagaauguucccgaaaucccaaagaggaggaggagaggccuauuuggugcuauagcggguuucauugaaaauggaugggaagguuugauugaugggugguauggcuucaggcaucaaaaugcacaaggggagggaacugcugcagauuacaaaagcacccaaucagcaauugaucaaauaacagggaaauuaaaucggcuuauagaaaaaacuaaccaacaguuugaguuaauagacaacgaauucacugagguugaaaagcaaauuggcaaugugauaaacuggaccagagauuccaugacagaagugugguccuauaacgcugaacucuuaguagcaauggagaaucagcacacaauugaucuggccgacucagaaaugaacaaacuguacgaacgagugaagagacaacugagagagaaugccgaagaagauggcacugguugcuucgaaauauuucacaagugugaugacgacugcauggccaguauuagaaacaacaccuaugaucacagcaaguacagggaagaagcaauacaaaauagaauacagauugacccagucaaacuaagcagcggcuacaaagaugugauacuuugguuuagcuucggggcaucauguuucauacuucuggccauugcaaugggccuugucuucauaugugugaagaauggaaacaugcggugcacuauuuguauauaa

SEQ ID NO: 33361 - RNA, 1701 nt, Artificial Sequence
  derived and/or modified CDS sequence (wt) from hemagglutinin__InfluenzaA__ABI95228
augaagacuaucauugcuuugagcuacauuuuaugucugguuuucgcucaaaaacuucccguaaaugacaacagcacggcaacgcugugccugggacaccaugcagugccaaacggaacgcuagugaaaacaaucacgaaugaccacauugaagugacuaaugcuacugagcugguucagaguuccccaacagguagaauaugcgacaguccucaccaaauccuugauggagaaaacugcacacuaauagaugcucuauugggagacccucauugugauggcuuccaaaauaaggaaugggaccuuuuuguugaacgcagcacagccuacagcaacuguuacccuuaugaugugccggauuaugccucccuuaggucacuaguugccucauccggcacacuggaguuuaacaaugaaagcuucaauuggacuggagucgcucagaauggaacaagcucugcuugcaaaaggagaucuauuaaaaguuucuuuaguagauugaauugguugcaccaauuaaaauacaaauauccagcacugaacgugacuaugccaaacaaugaaaaauuugacaaauuguacauuugggggguucaccacccgaguacggacagugaccaaaucagccuauaugcucaagcaucagggagagucacagucucuaccaaaagaagccaacaaacuguaaucccgaauaucggaucuagacccuggguaaggggugucuccagcagaauaagcaucuauuggacaauaguaaaaccgggagacauacuuuugauuaacagcacagggaaucuaauugcuccucgggguuacuucaaaauacgaagugggaaaagcucaauaaugaggucaaaugcacccauuggcaaaugcaauucugaaugcaucacuccaaauggaagcauucccaaugacaaaccauuucaaaauguaaacaggaucacauauggggccugucccagauauguuaagcaaaacacucugaaauuggcaacagggaugcggaauguaccagagaaacaaacuagaggcauauucggcgcaauugcggguuucauagaaaaugguugggaaggaaugguggacgguugguacgguuucaggcaucaaaauucugagggcacaggacaagcagcagaucuuaaaagcacucaagcugcaaucaaccaaaucaacgggaaacugaauagguuaaucgagaaaacaaacgagaaauuccaucaaauugaaaaagaauucucagaaguagaagggagaauucaggaccucgagaaauauguugaggacacuaaaauagaucucuggucguacaacgcggagcuucuuguugcccuggagaaccaacauacaauugaucuaacugacucagaaaugaacaaacuguuugaaagaacaaggaagcaacugagggaaaaugcugaggauaugggcaaugguuguuucaaaauauaccacaaaugugacaaugccugcauagggucaaucagaaauggaacuuaugaccaugauguauacagagacgaagcauuaaacaaccgguuccagaucaaagguguugagcugaagucaggauacaaagauuggauccuauggauuuccuuugccauaucauguuuuuugcuuuguguuguuuugcugggguucaucaugugggccugccaaaaaggcaacauuaggugcaacauuugcauuuga

SEQ ID NO: 33362 - RNA, 1701 nt, Artificial Sequence
  derived and/or modified CDS sequence (wt) from hemagglutinin__InfluenzaA__ABI95239
augaagacuaucauugcuuugagcuacauucuaugucugguuuucgcucaaaaacuucccggaaaugacaacagcacggcaacgcugugccuugggcaccaugcaguaccaaacggaacgauagugaaaacaaucacgaaugaccaaauugaaguuacuaaugcuacugagcugguucagaguuccucaacagguggaauaugcgacaguccucaucagauccuugauggagaaaacugcacacuaauagaugcucuauugggagacccucagugugauggcuuccaaaauaagaaaugggaccuuuuuguugaacgcagcaaagccuacagcaacuguuacccuuaugaugugccggauuaugccucccuuaggucacuaguugccucauccggcacacuggaguuuaacaaugaaagcuucaauuggacuggagucacucaaaauggaacaagcucugcuugcaaaaggagaucuaauaacaguuucuuuaguagauugaauugguugacccacuuaaaauucaaauacccagcauugaacgugacuaugccaaacaaugaaaaauuugacaaauuguacauuugggggguucaccacccggguacggacaaugaccaaaucagccuauaugcucaagcaucaggaagaaucacagucucuaccaaaagaagccaacaaacuguaaucccgaauaucggaucuagacccaggguaagggauauccccagcagaauaagcaucuauuggacaauaguaaaaccgggagacauacuuuugauuaacagcacagggaaucuaauugcuccucgggguuacuucaaaauacgaagugggaaaagcucaauaaugagaucagaugcacccauuggcaaaugcaauucugaaugcaucacuccaaauggaagcauucccaaugacaaaccauuucaaaauguaaacaggaucacauauggggccugucccagauauguuaagcaaaacacucugaaauuggcaacagggaugcgaaauguaccagagaaacaaacuagaggcauauuuggcgcaaucgcggguuucauagaaaaugguugggagggaauggugaaugguugguacgguuucaggcaucaaaauucugagggaauaggacaagcagcagaucucaaaagcacucaagcagcaaucaaccaaaucaaugggaagcugaauagguugaucggaaaaaccaacgagaaauuccaucagauugaaaaagaauucucagaaguagaagggagaauucaggaccucgagaaauauguugaggacacuaaaauagaucucuggucauacaacgcggagcuucuuguugcccuggagaaccaacauacaauugaucuaacugacucagaaaugaacaaacuguuugaaagaacaaagaagcaacugagggaaaaugcugaggauaugggcaaugguuguuucaaaauauaccacaaaugugacaaugccugcauagggucaaucagaaauggaacuuaugaccaugauguauacagagaugaagcauuaaacaaccgguuccagaucaaagguguugagcugaagucaggauacaaagauuggauccuauggauuuccuuugccauaucauguuuuuugcuuuguguugcuuuguugggguucaucaugugggccugccaaaaaggcaacauuaggugcaacauuugcauuuga

SEQ ID NO: 33363 - RNA, 1698 nt, Artificial Sequence
  derived and/or modified CDS sequence (wt) from hemagglutinin__InfluenzaA__ABI95250
augaaagcaaaacuacuaguccuguuauguacauuuacagcuacauaugcagacacaauauguguaggcuaccaugccaacaacucaaccgacacuguugacacaguacuugagaagaaugugacagugacacacucugucaaccuacuugaggacagucacaauggaaaacuaugucuacuaaaaggaauagccccacuacaauuggguaauugcagcguugccggauggaucuuaggaaacccagaaugcgaaucacugauuucuaaggaaucaugguccuacauuguagagacaccaaacccugagaauggaacauguuacccaggguauuucgccgacuaugaggaacugagggagcaauugaguucaguaucuucauuugagagauucgaaauauuccccaaagaaagcucauggcccaaccacaccguaaccggaguaucggcaucaugcucccauaaugggaaaagcaguuuuuacagaaauuugcuauggcugacggagaagaauggcuuguacccaaaucugagcaaguccuauguaaacaacaaagagaaagaaguccuuguacuaugggguguucaucacccgucuaacauaggggaccaaagggccaucuaucauacagaaaaugcuuaugucucuguagugucuucacauuauagcagaagauucaccccagaaauagcaaaaagacccaaaguaagaggucaggaaggaagaaucaacuacuacuggacucugcuggaacccggggacacaauaauauuugaggcaaauggaaaucuaauagcgccaugguaugcuuucgcacugaguagaggcuuugggucaggaaucaucaccucaaaugcgccaaugaaugaaugugaugcaaagugucaaacaccucagggagcuauaaacaguagucuuccuuuccagaauguacacccagucacaauaggagaguguccaaaguaugucaggagugcaaaauuaaggaugguuacaggacuaaggaacaucccauccauucaauccagagguuuguuuggagccauugccgguuucauugaagggggguggacuggaaugauagaugggugguaugguuaucaucaucagaaugagcaaggaucuggcuaugcugcagaucaaaaaagcacacaaaaugccauuaacgggauuacaaacaaggugaauucuguaauugagaaaaugaacacucaauucacagcugugggcaaagaauucaacaaauuagaaagaaggauggaaaacuuaaauaaaaaaguugaugauggauuucuagacauuuggacauauaaugcagaauuguugguucuacuggaaaaugaaaggacuuuggauuuccaugacucaaaugugaagaaucuguaugagaaaguaaaaagccaauuaaagaauaaugccaaagaaauaggaaacggguguuuugaauucuaucacaaguguaacaaugaaugcauggaaagugugaaaaauggaacuuaugacuauccaaaauauuccgaagaaucaaaguuaaacagggagaaaauugauggagugaaauuggaaucaaugggagucuaucagauucuggcgaucuacucaacugucgccaguucacugguucuuuuggucucccugggggcaaucagcuucuggauguguuccaaugggucuuugcaguguagaauaugcaucuga

SEQ ID NO: 33364 - RNA, 1698 nt, Artificial Sequence
  derived and/or modified CDS sequence (wt) from hemagglutinin__InfluenzaA__ABI95261
augaaagcaaaacuacuaguccuguuauguacauuuacagcuacauaugcagacacaauauguauaggcuaccaugccaacaacucaaccgacacuguugacacaguacuugagaagaaugugacagugacacacucugucaaccuacuugaggacagucacaauggaaaacuaugucuacuaaaaggaauagccccacuacaauuggguaauugcagcguugccggauggaucuuaggaaacccagaaugcgaaucacugauuucuaaggaaucaugguccuacauuguagagacaccaaacccugagaauggaacauguuacccaggguauuucgccgacuaugaggaacugagggagcaauugaguucaguaucuucauuugagagguucgaaauauuccccaaagaaagcucauggcccaaccacaccguaaccggaguaucggcaucaugcucccauaaugggaaaagcaguuuuuacagaaauuugcuauggcugacggagaagaauggcuuguacccaaaucugagcaaguccuauguaaacaacaaggagaaagaaguccuuguacuaugggguguucaucacccgucuaacauagggguccaaagggccaucuaucauacagaaaaugcuuaugucucuguagugucuucacauuauagcagaagauucaccccagaaauagcaaaaagacccaaaguaagagaucaggaaggaagaaucaacuacuacuggacucugcuggaacccggggacacaauaauauuugaggcaaauggaaaucuaauagcgccaugguaugcuuucgcacugaguagaggcuuugagucaggaaucaucaccucaaaugcaccaaugaaugaaugugaugcaaagugucaaacaccucagggagcuauaaacaguagucuuccuuuccagaauguacacccagucacaauaggagaguguccaaaguaugucaggagugcaaaauuaaggaugguuacaggacuaaggaacaucccauccauucaauccagagguuuguuuggagccauugccgguuucauugaagggggguggacuggaaugauagaugggugguaugguuaucaucaucagaaugagcaaggaucuggcuaugcugcagaucaaaaaagcacacaaaaugccauuaacgggauuacaaacaaggugaauucuguaauugagaaaaugaacacucaauucacagcugugggcaaagaauucaacaaauuagaaagaaggauggaaaacuuaaauaaaaaaguugaugauggauuucuagacauuuggacauauaaugcagaauuguugguucuacuggaaaaugaaaggacuuuggauuuccaugacucaaaugugaagaaucuguaugagaaaguaaaaagccaauuaaagaauaaugccaaagaaauaggaaacggguguuuugaauucuaucacaaguguaacaaugaaugcauggaaagugugaaaaauggaacuuaugacuauccaaaauauuccgaagaaucaaaguuaaacagggagaaaauugauggagugaaauuggaaucaaugggagucuaucagauucuggcgaucuacucaacugucgccaguucacugguucuuuuagucucccugggggcaaucagcuucuggauguguuccaaugggucuuugcaguguagaauaugcaucuga

SEQ ID NO: 33365 - RNA, 1698 nt, Artificial Sequence; identical to SEQ ID NO: 33244
  derived and/or modified CDS sequence (wt) from hemagglutinin__InfluenzaA__ABI95272

SEQ ID NO: 33366 - RNA, 1698 nt, Artificial Sequence; identical to SEQ ID NO: 33244
  derived and/or modified CDS sequence (wt) from hemagglutinin__InfluenzaA__ABI95283

SEQ ID NO: 33367 - RNA, 1698 nt, Artificial Sequence
  derived and/or modified CDS sequence (wt) from hemagglutinin__InfluenzaA__ABI95294
augaaagcaaaacuacugguccuguuauguacauuuacagcuacauacgcagacacaauauguauaggcuaccaugccaacaacucaaccgacacuguugacacaguacuugagaagaaugugacagugacacacucugucaaccuacuugaggacagucacaauggaaaacuaugucuacuaaaaggaauagccccacuacaauuggguaauugcagcguugccggauggaucuuaggaaacccagaaugcgaauuacugauuuccaaggaaucaugguccuacauuguagaaacaccaaaucccgagaauggaacauguuacccaggguauuucgccgacuaugaggaacugagggagcaauugaguucaguaucuucauuugagagauucgaaauauuccccaaaggaagcucauggcccaaccacaccguaaccggaguaucagcaucaugcucccauaaugggaaaagcaguuuuuacagaaauuugcuauggcugacggggaagaaugguuuguacccaaaccugagcauguccuauguaaacaacaaagagaaagaaguccuugugcuaugggguguucaucacccaccuaacauaggggaccaaagggcccucuaccauacagaaaaugcuuaugucucuguagugucuucacauuauagcagaagauucaccccagaaauagccaaaagacccaaaguaagagaucaggaaggaagaaucaacuacuacuggacucugcuggaacccggggacacaauaauauuugaggcaaauggaaaucuaauagcgccaugguaugcuuucgcacugaguagaggcuuuggaucaggaaucaucaccucaaaugcaccaauggaugaaugugaugcaaagugucaaacaccucagggagcuauaaacaguagucuuccuuuccagaauguacacccaguuacaauaggagaguguccaaaguaugucaggagugcaaaauuaaggaugguuacaggacuaaggaacaucccauccauucaauccagagguuuguuuggagccauugccgguuucauugaagggggguggacuggaaugguagaugggugguaugguuaucaucaccagaaugagcaaggaucuggcuaugcugcagaucaaaaaagcacacaaaaugccauuaacgggauuacaaacaaggugaauucuguaauugagaaaaugaacacucaauucacagcugugggcaaagaauucaacaaauuagaaagaaggauggaaaacuuaaauaaaaaaguugaugauggguuucuagacauuuggacauauaaugcagaauuguugguucuacuggaaaaugaaaggacuuuggauuuccaugacuccaaugugaagaaucuguaugagaaaguaaaaagccaauuaaagaauaaugccaaagaaauaggaaacggguguuuugaauucuaucacaaguguaacaaugaaugcauggaaagugugaaaaauggaacuuaugacuauccaaaauauuccgaagaaucaaaguuaaacagggagaaaauugauggaguaaaauuggaaucaaugggagucuaucagauucuggcgaucuacucaacugucgccaguucccugguucuuuuggucucccugggggcaaucagcuucuggauguguuccaaugggucuuugcaguguagaauaugcaucuga

SEQ ID NO: 33368 - RNA, 1698 nt, Artificial Sequence
  derived and/or modified CDS sequence (wt) from hemagglutinin__InfluenzaA__ABI96104
augaaaguaaaacuacugauccuguuauguacauuuacagcuacauaugcagacacaauauguauaggcuaccaugccaacaacucaaccgacacuguugacacaguacuugagaagaaugugacagugacacacucugucaaccuacuugaggacagucacaauggaaaacugugccuacuaaaaggaauagccccccuacaauuggguaauugcagcguugccggauggaucuuaggaaacccagaaugcgaauuacugauuuccaaggaaucaugguccuacauuguagaaacaccaaauccugagaauggagcauguuacccaggguauuucgccgacuaugaggagcuaagggagcaauugaguucaguaucuucauuugagagauucgaaauauuccccaaagaaagcucauggcccaaccacaccguaaccggaguaucagcaucaugcucccauaaugggaaaagcaguuuuuacagaaauuugcuauggcugacggggaagaaugguuuguacccaaaccugaucaaguccuaugcaaacaacaaagagaaagaaguccuuauacuaugggguguucaucacccgccuaacauaggggaccaaaggacccucuaucacacagaaaaugcuuaugucucuguagugucuucacauuauagcagaagauucaccccagaaauaaccaaaaggcccaaaguaagagaucaggaaggaagaaucaacuacuacuggacucugcuggaacccggggauacaauaauauuugaggcaaauggaaaucuaauagcgccaugguaugcuuucgcacugaguagaggcuuuggaucaggaaucaucaccucaaaugcaccaauggaugaaugugaugcgaagugucaaacaccucagggagcuauaaacagcagucuuccuuuccagaauguacacccagucacaauaggagaguguccaaaguaugucaggagugcaaaauuaaggaugguuacaggacuaaggaacaucccauccauucaauccagagguuuguuuggagccauugccgguuucauugaagggggguggacuggaaugguagaugggugguaugguuaucaucaucagaaugagcaaggaucuggcuaugcugcagaucaaaaaagcacacaaaaugccauuaacgggauuacaaacaaggugaauucuguaauugagaaaaugaacacucaauucacagcugugggcaaagaauucaacaaauuggaaagaaggauggaaaacuuaaauaaaaagguugaugauggguuucuagacauuuggacauauaaugcagaauuguugguucuacuggaaaaugaaaggacuuuggauuuccacgacuccaaugugaagaaucuguacgagaaaguaaaaagccaauuaaagaauaaugccaaagaaauaggaaauggguguuuugaauucuaucacaaguguaacaaugaaugcauggagagugugaaaaauggaacuuaugacuauccaaaauauuccgaagaaucaaaguuaaacagggaaaaaauugauggagugaaauuggacucaaugggggucuaucagauucuggcgaucuacucaacugucgcuaguucccugguucuuuuggucucccugggggcaaucagcuucuggauguguuccaaugggucuuugcaguguagaauaugcaucuga

SEQ ID NO: 33369 - RNA, 1701 nt, Artificial Sequence
  derived and/or modified CDS sequence (wt) from hemagglutinin__InfluenzaA__ABJ09107
augaagacuaucauugcuuugagcuacauuuuaugucugguuuucgcucaaaaacuucccggaaaugacaacagcacggcaacgcugugccuggggcaccaugcagugccaaacggaacgcuagugaaaacaaucacgaaugaccaaauugaagugacuaaugcuacugagcugguucagaguuccucaacagguggaauaugcgacaguccucaccaaauccuugauggagaaaacugcacacuaauagaugcucuauugggagacccucauugugauggcuuccaaaauaaggaaugggaccuuuuuguugaacgcagcaaagccuacagcaacuguuacccuuaugaugugccggauuaugccucccuuaggucacuaguugccucauccggcacacuggaguuuaacaaugaaagcuucaauuggacuggagucgcucagaauggaacaagcucugcuugcaaaaggagaucuaauaaaaguuucuuuaguagauugaauugguugcaccaauuaaaauacaaauacccagcacugaacgugacuaugccaaacaaugaaaaauuugacaaauuguacauuugggggguucaccacccgaguacggacagugaccaaaucagccuauaugcucaagcaccagggagagucacagucucuaccaaaagaagccaacaaacuguaaucccgaauaucggaucuagacccuggguaaggggugucuccagcagaauaagcaucuauuggacaauaguaaaaccgggagacauacuuuugauuaacugcacagggaaucuaauugcuccucgggguuacuucaaaauacgaagugggaaaagcucaauaaugaggucagaugcauccauuggcaaaugcaauucugaaugcaucacuccaaauggaagcauucccaaugacaaaccauuucaaaauguaaacaggaucacauauggggccugucccagauauguuaagcaaaacacucugaaauuggcaacagggaugcggaauguaccagagaaacaaacuagaggcauauucggcgcaaucgcggguuucauagaaaaugguugggagggaaugguggacgguugguacgguuucaggcaucaaaauucugagggcacaggacaagcagcagaucucaaaagcacucaagcagcaaucaaccaaaucaacgggaaacugaauagguuaaucgagaaaacgaacgagaaauuccaucaaauugaaaaagaauucucagaaguggaagggagaauucaggaccucgagaaauauguugaggacacuaaaauagaucucuggucauacaacgcggagcuucuuguugcccuggagaaccagcauacaauugaucuaacugacucagaaaugaacaaacuguuugaaagaacaaagaagcaacugagggaaaaugcugaggauaugggcaaugguuguuucaaaauauaccacaaaugugacaaugccugcauagggucaaucagaaaugggacuuaugaccaugauguauacagagacgaagcauuaaacaaccgguuccagaucaaagguguugagcugaagucaggauacaaagauuggauccuauggauuuccuuugccauaucauguuuuuugcuuuguguugucuugcugggguucaucaugugggccugccaaaaaggcaacauuaggugcaacauuugcauuuga

SEQ ID NO: 33370 - RNA, 1701 nt, Artificial Sequence
  derived and/or modified CDS sequence (wt) from hemagglutinin__InfluenzaA__ABJ09140
augaagacuaucauugcuuugagcuacauuuuaugucugguuuucgcucaaaaacuucccggaaaugacaacagcacagcaacgcugugccugggacaccaugcggugccaaacggaacgcuagugaaaacaaucacgaaugaucaaauugaagugacuaaugcuacugagcugguucagaguuccucaacagguagaauaugcgacaguccucaccgaauccuugauggaaaaaacugcacacugauagaugcucuauugggagacccucauugugauggcuuccaaaauaaggaaugggaccuuuuuguugaacgcagcaaagcuuacagcaacuguuacccuuaugaugugccggauuaugccucccuuaggucacuaguugccucaucaggcacccuggaguuuaucaaugaagacuucaauuggacuggagucgcucaggaugggaaaagcuauucuugcaaaaggggaucuguuaacaguuucuuuaguagauugaauugguugcacaaauuagaauacaaauauccagcgcugaacgugacuaugccaaacaauggcaaauuugacaaauuguacauuugggggguucaccacccgagcacggacagugaccaaaccagccuauauguucgagcaucagggagagucacagucucuaccaaaagaagccaacaaacuguaaucccgaauaucggguuuagacccuggguaaggggucuguccaguagaauaagcaucuauuggacaauaguaaaaccgggagacauacuuuugauuaauagcacagggaaucuaauugcuccucgggguuacuucaaaauacggaaugggaaaagcucaauaaugaggucagaugcacccauuggcaacugcaguucugaaugcaucacuccaaauggaagcauucccaaugacaaaccuuuucaaaauguaaacaggaucacauauggggccugccccagauauguuaagcaaaacacucugaaguuggcaacagggaugcggaauguaccagagaaacaaacuagaggcauauucggcgcaaucgcagguuucauagaaaaugguugggagggaaugguagacgguugguacgguuucaggcaucaaaauucugagggcacaggacaagcagcagaucuuaaaagcacucaagcagcaaucgaccaaaucaacgggaaacugaauagguuaaucgagaaaacgaacgagaaauuccaucaaaucgaaaaagaauucucagaaguagaagggagaauucaggaccucgagaaauauguugaagacacuaaaauagaucucuggucuuacaacgcggggcuucuuguugcccuggagaaccaacauacaauugaucuaacugacucagaaaugaacaaacuguuugaaagaacaaggaagcaacugagggaaaaugcugaggacaugggcaaugguugcuucaaaauauaccacaaaugugacaaugccugcauagggucaaucagaaauggaacuuaugaccaugauguauacagagacgaagcauuaaacaaccgguuccagaucaaagguguugagcugaagucaggauacaaagauuggauccuauggauuuccuuugccauaucaugcuuuuugcuuuguguuguuuugcugggguucaucaugugggccugccaaaaaggcaacauuaggugcaacauuugcauuuga

SEQ ID NO: 33371 - RNA, 1698 nt, Artificial Sequence
  derived and/or modified CDS sequence (wt) from hemagglutinin__InfluenzaA__ABJ09151
augaaagcaaaacuacugguccuguuauguacauuuacagcuacauacgcagacacaauauguauaggcuaccaugccaacaacucaaccgacacuguugacacaguacuugagaagaaugugacagugacacacucugucaaccuacuugaggacagucacaauggaaaacuaugucuacuaaaaggaauagccccacuacaauuggguaauugcagcguugccggauggaucuuaggaaacccagaaugcgaauuacugauuuccaaggaaucaugguccuacauuguagaaacaccaaaucccgagaauggaacauguuacccaggguauuucgccgacuaugaggaacugagggagcaauugaguucaguaucuucauuugagagauucgaaauauuccccaaaggaagcucauggcccaaccacaccgugaccggaguaucagcaucaugcucccauaaugggaaaagcaguuuuuacagaaauuugcuauggcugacggggaagaaugguuuguacccaaaccugagcauguccuauguaaacaacaaagggaaagaaguccuugugcuaugggguguucaucacccaccuaacauaggggaccaaagggcccucuaccauacagaaaaugcuuaugucucuguagugucuucacauuauagcagaagauucaccccagaaauagccaaaagacccaaaguaagagaucaggaaggaagaaucaacuacuacuggacucugcuggaacccggggacacaauaauauuugaggcaaauggaaaucuaauagcgccaugguaugcuuucgcacugaguagaggcuuuggaucaggaaucaucaccucaaaugcaccaaugggugaaugugaugcgaagugucaaacaccucagggagcuauaaacaguagucuuccuuuccagaauguacacccaguuacaauaggagaguguccaaaguaugucaggagugcaaaauuaaggaugguuacaggacuaaggaacaucccauccauucaauccagagguuuguuuggagccauugccgguuucauugaagggggguggacuggaaugguagaugggugguaugguuaucaucaucagaaugagcaaggaucuggcuaugcugcagaucaaaaaagcacacaaaaugccauuaacgggauuacaaacaaggugaauucuguaauugagaaaaugaacacucaauucacagcugugggcaaagaauucaacaaauuagaaagaaggauggaaaacuuaaauaaaaaaguugaugauggguuucuagacauuuggacauauaaugcagaauuguugguucuacuggaaaaugaaaggacuuuggauuuccaugacuccaaugugaagaaucuguaugagaaaguaaaaagccaauuaaagaauaaugccaaagaaauaggaaacggguguuuugaauucuaucacaaguguaacaaugaaugcauggaaagugugaaaaauggaacuuaugacuauccaaaauauuccaaagaaucaaaguuaaacagggagaaaauugauggaguaaaauuggaaucaaugggagucuaucagauucuggcgaucuacucaacugucgccaguucccugguucuuuuggucucccugggggcaaucagcuucuggauguguuccaaugggucuuugcaguguagaauaugcaucuga

SEQ ID NO: 33372 - RNA, 1701 nt, Artificial Sequence
  derived and/or modified CDS sequence (wt) from hemagglutinin__InfluenzaA__ABJ09162
augaagacuaucauugcuuugagcuacauucuaugucugguuuucgcucaaaaacuucccggaaaugacaacagcacggcaacgcugugccuugggcaccaugcaguaccaaacggaacgauagugaaaacaaucacgaaugaccaaauugaaguuacuaaugcuacugagcugguucagaguuccucaacagguggaauaugcgacaguccucaucagauccuugauggagaaaacugcacacuaauagaugcucuauugggagacccucagugugauggcuuccaaaauaagaaaugggaccuuuuuguugaacgcagcaaagccuacagcaacuguuacccuuaugaugugccggauuaugccucccuuaggucacuaguugccucauccggcacacuggaguuuaacaaugaaagcuucaauuggacuggagucacucaaaauggaacaagcucugcuugcaaaaggagaucuaauaacaguuucuuuaguagauugaauugguugacccauuuaaaauucaaauacccagcauugaacgugacuaugccaaacaaugaaaaauuugacaaauuguacauuugggggguucaccacccggguacgaacaaugaccaaaucagccuauaugcucaagcaucaggaagaaucacagucucuaccaaaagaagccaacaaacuguaaucccgaauaucggaucuagacccaggguaagggauauccccagcagaauaagcaucuauuggacaauaguaaaaccgggagacauacuuuugauuaacagcacagggaaucuaauugcuccucgggguuacuucaaaauacgaagugggaaaagcucaauaaugagaucagaugcacccauuggcaaaugcaauucugaaugcaucacuccaaauggaagcauucccaaugacaaaccauuucaaaauguaaacaggaucacauauggggccugucccagauauguuaagcaaaacacucugaaauuggcaacagggaugcgaaauguaccagagaaacaaacuagaggcauauuuggcgcaaucgcggguuucauagaaaaugguugggagggaaugguggaugguugguacgguuucagacaucaaaauucugagggaauaggacaagcagcagaucucaaaagcacucaagcagcaaucaaccaaaucaaugggaagcugaauagguugaucgggaaaaccaacgagaaauuccaucagauugaaaaagaauucucagaaguagaagggagaauucaggaccucgagaaauauguugaggacacuaaaauagaucucuggucauacaacgcggagauucuuguugcccuggagaaccaacauacaauugaucuaacugacucagaaaugaacaaacuguuugaaagaacaaagaagcaacugagggaaaaugcugaggauaugggcaaugguuguuucaaaauauaccacaaaugugacaaugccugcauagggucaaucagaaauggaacuuaugaccaugauguauacagagaugaagcauuaaacaaccgguuccagaucaaagguguugagcugaagucaggauacaaagauuggauccuauggauuuccuuugccauaucauguuuuuugcuuuguguugcuuuguugggguucaucaugugggccugccaaaaaggcaacauuaggugcaacauuugcauuuga

SEQ ID NO: 33373 - RNA, 1701 nt, Artificial Sequence
  derived and/or modified CDS sequence (wt) from hemagglutinin__InfluenzaA__ABJ09173
augaagacuaucauugcuuugagcuacauucuaugucugguuuucgcucaaaaacuucccggaaaugacaacagcacggcaacgcuaugccuugggcaccaugcaguaccaaacggaacgauagugaaaacaaucacgaaugaccaaauugaaguuacuaaugcuacugagcugguucagaguuccucaacagguggaauaugcgacaguccucaucagauccuugauggagaaaacugcacacuaauagaugcucuauugggagacccucagugugauggcuuccaaaauaagaaaugggaccuuuuuguugaacgcagcaaagccuacagcaacuguuacccuuaugaugugccggauuaugccucccuuaggucacuaguugccucauccggcacacuggaguuuaacaaugaaagcuucaauuggacuggagucacucaaaauggaacaagcucugcuugcaaaaggagaucuaauaacaguuucuuuaguagauugaauugguugacccauuuaaaauucaaauacccagcauugaacgugacuaugccaaacaaugaaaaauuugacaaauuguacauuugggggguucaccacccggguacggacaaugaccaaaucagccuauaugcucaagcaucaggaagaaucacagucucuaccaaaagaagccaacaaacuguaaucccgaauaucggaucuagacccaggguaagggauauccccagcagaauaagcaucuauuggacaauagugaaaccgggagacauacuuuugauuaacagcacagggaaucuaauugcuccucgggguuacuucaaaauacgaagugggaaaagcucaauaaugagaucagaugcacccauuggcaaaugcaauucugaaugcaucacuccaaauggaagcauucccaaugacaaaccauuucaaaauguaaacaggaucacauauggggccugucccagauauguuaagcaaaacacucugaaauuggcaacagggaugcgaaauguaccagagaaacaaacuagaggcauauuuggcgcaaucgcggguuucauagaaaaugguugggagggaaugguggaugguugguacgguuucaggcaucaaaauucugagggaauaggacaagcagcagaucucaaaagcacucaagcagcaaucaaccaaaucaaugggaagcugaauagguugaucgggaaaaccaacgagaaauuccaucagauugaaaaagaauucucagaaguagaagggagaauucaggaccucgagaaauauguugaggacacuaaaauagaucucuggucauacaacgcggagcuucuuguugcccuggagaaccaacauacaauugaucuaacugacucagaaaugaacaaacuguuugaaagaacaaagaagcaacugagggaaaaugcugaggauaugggcaaugguuguuucaaaauauaccacaaaugugacaaugccugcauagggucaaucagaaauggaacuuaugaccaugauguauacagagaugaagcauuaaacaaccgguuccagaucaaagguguugagcugaagucaggauacaaagauuggauccuauggauuuccuuugccauaucauguuuuuugcuuuguguugcuuuguugggguucaucaugugggccugccaaaaaggcaacauuaggugcaacauuugcauuuga

SEQ ID NO: 33374 - RNA, 1698 nt, Artificial Sequence
  derived and/or modified CDS sequence (wt) from hemagglutinin__InfluenzaA__ABJ09184
augaaaguaaaacuacugguucuguuauguacauuuacagcuacauaugcagacacaauauguauaggcuaccaugccaacaacucaaccgacacuguugacacaguacuugagaagaaugugacagugacacacucugucaaccuacuugaggacagucacaauggaaaacuaugucuacuaaaaggaauagccccauuacaauuggguaauugcagcguugccggauggaucuuaggaaacccagaaugcgaauuacugauuuccaaggaaucaugguccuacauuguagaaacaccaaauccugagaauggaacauguuacccaggguauuucgccgacuaugaggaacugagggagcaauugaguucaguaucuucauuugagagguucgaaauauuccccaaagagagcucauggcccaaccacaccguaaccggaguaucagcaucaugcucccauaacgggaaaagcaguuuuuacagaaauuugcuauggcugacggggaagaaugguuuguacccaaaccugagcaagucuuaugcaaacaacaaagaaaaagaaguccuuguacuaugggguguucaucacccgccuaacauaggggaccaaagggcucucuaucauacagaaaaugcuuaugucucuguagugucuucacauuauagcagaagauucaccccagaaauagccaaaagacccaaggugagagaucaggaaggaagaaucaacuacuacuggacacugcuggaagccggggauacaauaauauuugaggcaaauggaaaucuaauagcgccaagguuugcuuucgcacugaguagaggcuuuggaucaggaaucaucaccucaaaugcaccaauggaugaaugugaugcaaagugucaaacaccucaaggagcuauaaacagcagucuuccuuuccagaauguacacccagucacaauaggggaguguccaaaguaugucaggagugcaaaauuaaggauggcuacaggacuaaggaacaucccauccauucaauccagagguuuguuuggagccauugccgguuucauugaagggggguggacuggaaugguagaugguugguaugguuaucaucaucagaaugagcaaggaucuggguaugcugcagaucaaaaaagcacacaaaaugccauuaacgggauuacaaacaaggugaauucuguaauugaaaaaaugaacacucaauucacagcugugggcaaagaauucagcaaauuggagagaaggauggaaaacuuaaauaaaaaaguugaugauggguuucuagacauuuggacauauaaugcagaauuguugguucuacuggaaaaugaaaggacuuuggauuuccacgacuccaacgugaagaaucuguaugagaaagugaaaagccaauuaaagaauaaugccaaagaaauaggaaacggguguuuugaauucuaucacaaauguaacgaugaaugcauggagagugugaaaaauggaacuuaugacuauccaaaauauuccgaagaaucaaaguuaaacagggagaaaauugauggagugaaauuggaaucaaugggagucuaucagauucuggcgaucuacucaacagucgccaguucccugguucuuuuggucucccugggggcaaucagcuucuggauguguuccaaugggucuuugcaguguagaauaugcaucuaa

SEQ ID NO: 33375 - RNA, 1701 nt, Artificial Sequence; identical to SEQ ID NO: 32669
  derived and/or modified CDS sequence (wt) from hemagglutinin__InfluenzaA__ABJ09195

SEQ ID NO: 33376 - RNA, 1701 nt, Artificial Sequence; identical to SEQ ID NO: 32645
  derived and/or modified CDS sequence (wt) from hemagglutinin__InfluenzaA__ABJ09206

SEQ ID NO: 33377 - RNA, 1701 nt, Artificial Sequence
  derived and/or modified CDS sequence (wt) from hemagglutinin__InfluenzaA__ABJ09217
augaagacuaucauugcuuugagcuacauuuuaugucugguuuucgcucaaaaacuucccggaaaugacaacagcacagcaacgcugugccugggacaccaugcagugccaaacggaacgcuagugaaaacaaucacgaaugaucaaauugaagugacuaaugcuaccgagcugguucagaguuccucaacagguagaauaugcgacaguccucaccgaauccuugauggaaaaaacugcacacugauagaugcucuauugggagacccucauugugauggcuuccaaaauaaggaaugggaccuuuuuguugaacgcagcaaagcuuacagcaacuguuacccuuaugaugugccggauuaugccucccuuaggucacuaguugccucaucaggcacccuagaguuuaucaaugaagacuucaauuggacuggaguagcucaggaugggaaaagcuaugcuugcaaaaggggaucuguuaacaguuucuuuaguagauugaauugguugcacaaauuagaauacaaauauccagcgcugaacgugacuaugccaaacaauggcaaauuugacaaauuguacauuugggggguucaccacccgagcacggacagugaccaaaccagccuauauguucgagcaucagggagagucacagucucuaccaaaagaagccaacaaacuguaaucccgaauaucgggucuagacccuggguaaggggucuguccaguagaauaagcaucuauuggacaauaguaaaaccgggagacauacuuuugauuaauagcacagggaaucuaauugcuccucgggguuacuucaaaauacgaaaugggaaaagcucaauaaugaggucagaugcacccauuggcaacugcaguucugaaugcaucacuccaaauggaagcauucccaaugacaaaccuuuucaaaauguaaacaggaucacauauggggccugccccagauauguuaagcaaaacacucugaaauuggcaacagggaugcggaauguaccagagaaacaaacuagaggcauauucggcgcaaucgcagguuucauagaaaaugguugggagggaaugguagacgguugguacgguuucaggcaucaaaauucugagggcacaggacaagcagcagaucuuaaaagcacucaagcagcaaucgaccaaaucaacgggaaacugaauagguuaaucgagaaaacgaacgagaaauuccaucaaaucgaaaaagaauucucagaaguagaagggagaauucaggaccucgagaaauauguugaagacacuaaaauagaucucuggucuuacaacgcggagcuucuuguugcccuggagaaccaacauacaauugaucuaacugacucagaaaugaacaaacuguuugaaaaaacaaggaagcaacugagggaaaaugcugaggacaugggcaaugguugcuucaaaauauaccacaaaugugacaaugccugcauagggucaaucagaaauggaacuuaugaccaugauguauacagagacgaagcauuaaacaaccgguuccagaucaaagguguugagcugaagucaggauacaaagauuggauccuauggauuuccuuugccauaucaugcuuuuugcuuuguguuguuuugcugggguucaucaugugggccugccaaaaaggcaacauuaggugcaacauuugcauuuga

SEQ ID NO: 33378 - RNA, 1701 nt, Artificial Sequence
  derived and/or modified CDS sequence (wt) from hemagglutinin__InfluenzaA__ABJ09228
augaagacuaucauugcuuugagcuacauuuuaugucugguuuucgcucaaaaacuucccggaaaugacaacagcacggcaacgcugugccuggggcaccaugcagugccaaacggaacgcuagugaaaacaaucacgaaugaccaaauugaagugaccaaugcuacugagcugguucagaguuccucaacagguggaauaugcgacaguccucaccaaauccuugauggagaaaacugcacacuaauagaugcucuauugggagacccucauugugauggcuuccaaaauaaggaaugggaccuuuuuguugaacgcagcaaagccuacagcaacuguuacccuuaugaugugccggauuaugccucccuuaggucacuaguugccucauccggcacacuggaguuuaacaaugaaagcuucaauuggacuggagucgcucagaauggaacaagcucugcuugcaaaaggagaucuaauaaaaguuucuuuaguagauugaauugguugcaccaauuaaaauacaaauacccagcacugaacgugacuaugccaaacaaugaaaaauuugacaaauuguacauuugggggguucaccacccgaguacggacagugaccaaaucagccuauaugcucaagcaccagggagagucacagucucuaccaaaagaagccaacaaacuguaaucccgaauaucggaucuagacccuggguaaggggugucuccagcagaauaagcaucuauuggacaauaguaaaaccgggagacauacuuuugauuaacugcacagggaaucuaauugcuccucgggguuacuucaaaauacgaagugggaaaagcucaauaaugaggucagaugcauccauuggcaaaugcaauucugaaugcaucacuccaaauggaagcauucccaaugacaaaccauuucaaaauguaaacaggaucacauauggggccugucccagauauguuaagcaaaacacucugaaauuggcaacagggaugcggaauguaccagagaaacaaacuagaggcauauucggagcaaucgcggguuucauagaaaaugguugggagggaaugguggacgguugguacgguuucaggcaucaaaauucugagggcacaggacaagcagcagaucucaaaagcacucaagcagcaaucaaccaaaucaacgggaaacugaauagguuaaucgagaaaacgaacgagaaauuccaucaaauugaaaaagaauucucagaaguggaagggagaauucaggaccucgagaaauauguugaggacacuaaaauagaucucuggucauacaacgcggagcuucuuguugcucuggagaaccagcauacaauugaucuaacugacucagaaaugaacaaacuauuugaaagaacaaagaagcaacugagggaaaaugcugaggauaugggcaaugguuguuucaaaauauaccacaaaugugacaaugccugcauagggucaaucagaaaugggacuuaugaccaugauguauacagagacgaagcauuaaacaaccgguuccagaucaaagguguugagcugaagucaggauacaaagauuggauccuauggauuuccuuugccauaucauguuuuuugcuuuguguugucuugcugggguucaucaugugggccugccaaaaaggcaacauuaggugcaacauuugcauuuga

SEQ ID NO: 33379 - RNA, 1701 nt, Artificial Sequence
  derived and/or modified CDS sequence (wt) from hemagglutinin__InfluenzaA__ABJ09239
augaagacuaucauugcuuugagcuacauuuuaugucugguuuucgcucaaaaacuucccggaaaugacaacagcacggcaacgcugugccuggggcaccaugcagugccaaacggaacgcuagugaaaacaaucacgaaugaccaaauugaagugacuaaugcuacugagcugguucagaguuccucaacagguggaauaugcgacaguccucaccaaauccuagauggagaaaacugcacacuaauagaugcucuauugggagacccucauugugauggcuuccaaaauaaggaaugggaccuuuuuguugaacgcagcaaagccuacagcaacuguuacccuuaugaugugccggauuaugccucccuuaggucacuaguugccucauccggcacaauggaguuuaacaaugaaagcuucaauuggacuggagucgcucagaauggaacaagcucugcuugcaaaaggagaucuaauaaaaguuucuuuaguagauugaauugguugcaccaauuaaaauacaaauacccagcacugaacgugacuaugccaaacaaugaaaaauuugacaaauuguacauuugggggguucaccacccgaguacggacagugaccaaaucagccuauaugcucaagcaccagggagagucacagucucuaccaaaagaagccaacaaacuguaaucccgaauaucggaucuagacccuggguaaggggugucuccagcagaauaagcaucuauuggacaauaguaaaaccgggagacauacuuuugauuaacugcacagggaaucuaauugcuccucgggguuacuucaaaauacgaagugggaaaagcucaauaaugaggucagaugcauccauuggcaaaugcaauucugaaugcaucacuccgaauggaagcauucccaaugacaaaccauuucaaaauguaaacaggaucacauauggggccugucccagauauguuaagcaaaacacucugaaauuggcaacagggaugcggaauguaccagagaaacaaacuagaggcauauucggcgcaaucgcggguuucauagaaaaugguugggagggaaugguggacgguugguacgguuucaggcaucaaaauucugagggcacaggacaagcagcagaucucaaaagcacucaagcagcaaucaaccaaaucaacgggaaacugaauagguuaaucgagaaaacgaacgagaaauuccaucaaauugaaaaagaauucucagaaguggaagggagaauucaggaccucgagaaauauguugaggacacuaaaauagaucucuggucguacaacgcggagcuucuuguugcccuggagaaccagcauacaauugaucuaacugacucagaaaugaacaaacuguuugaaagaacaaaaaagcaacugagggaaaaugcugaggauaugggcaaugguuguuucaaaauauaccacaaaugugacaaugccugcauagggucaaucagaaaugggacuuaugaccaugauguauacagagacgaagcauuaaacaaccgguuccagaucaaagguguugagcugaagucaggauacaaagauuggauccuauggauuuccuuugccauaucauguuuuuugcuuuguguugucuugcugggguucaucaugugggccugccaaaaaggcaacauuaggugcaacauuugcauuuga

SEQ ID NO: 33380 - RNA, 1701 nt, Artificial Sequence
  derived and/or modified CDS sequence (wt) from hemagglutinin__InfluenzaA__ABJ09250
augaagacuaucauugcuuugagcuacauuuuaugucugguuuucgcucaaaaacuucccggaaaugacaacagcacggcaacgcugugccuggggcaccaugcagugccaaacggaacgcuagugaaaacaaucacgaaugaccaaauugaagugacuaaugcuacugagcugguucagaguuccucaacagguagaauaugcgacaguccucaccaaauccuugauggagaaaacugcacacuaauagaugcucuauugggagacccucauugugauggcuuccaaaauaaggaaugggaccuuuuuguugaacgcagcaaagccuacagcaacuguuacccuuaugaugugccggauuaugccucccuuaggucacuaguugccucauccggcacacuggaguuuaacaaugaaagcuucaauuggacuggagucgcucagaauggaacaagcucugcuugcaaaaggagaucuaauaaaaguuucuuuaguagauugaauugguugcaccaauuaaaauacaaauauccagcacugaacgugacuaugccaaacaaugaaaaauuugacaaauuguacauuugggggauucaccacccgaguacggacagugaccaaaucagccuauaugcucaagcaucagggagagucacagucucuaccaaaagaagccaacaaacuguaaucccgaauaucggaucuagacccuggguaaggggugucuccagcagaauaagcaucuauuggacaauaguaaaaccgggagacauacuuuugauuaacagcacagggaaucuaauugcuccucgggguuacuucaaaauacgaagugggaaaagcucaauaaugaggucagaugcacccauuggcaaaugcaauucugaaugcaucacuccaaauggaagcauucccaaugacaaaccauuucaaaauguaaacaggaucacauauggggccugucccagauauguuaagcaaaacacucugaaauuggcaacagggaugcggaauguaccagagaaacaaacuagaggcauauucggcgcaaucgcggguuucauagaaaaugguugggagggaaugguggacgguugguacgguuucaggcaucaaaauucugagggcacaggacaagcagcagaucuuaaaagcacucaagcagcaaucaaccaaaucaacgggaaacugaauagguuaaucgagaaaacgaacgagaaauuccaucaaauugaaaaagaauucucagaaguagaagggagaauucaggaccucgagaaauauguugaggacacuaaaauagaucucuggucguacaacgcggagcuucuuguugcccuggagaaccaacauacaauugaucuaacugacucagaaaugaacaaacuguuugaaagaacaaagaagcaacugagggaaaaugcugaggauaugggcaaugguuguuucaaaauauaccacaaaugugacaaugccugcauagggucaaucagaaaugaaacuuaugaccaugauguauacagagacgaagcauuaaacaaccgguuccagaucaaagguguugagcugaagucaggauacaaagauuggauccuauggauuuccuuugccauaucauguuuuuugcuuuguguuguuuugcugggguucaucaugugggccugccaaaaaggcaacauuaggugcaacauuugcauuuga

SEQ ID NO: 33381 - RNA, 1701 nt, Artificial Sequence
  derived and/or modified CDS sequence (wt) from hemagglutinin__InfluenzaA__ABJ09261
augaagacuaucauugcuuugagcuacauuuuaugucugguuuucgcucaaaaacuucccggaaaugacaacagcacggcaacacugugccugggacaccaugcagugccaaacggaacgcuagugaaaacaaucacgaaugaccaaauugaagugacuaaugcuacugagcugguucagaguuccucaacagguaaaauaugcgacaguccucaccaaauccuugauggagaaaacugcacacuaauagaugcucuauugggagacccucauugugauggcuuccaaaauaaggaaugggaccuuuuuguugaacgcagcaaagccuacagcaacuguuacccuuaugaugugccggauuaugccucccuuaggucacuaguugccucauccggcacacuggaguuuaacaaugaaagcuucaauuggacuggagucgcucagaauggaacaagcucugcuugcaaaaggagaucuauuaaaaguuucuuuaguagauugaauugguugcaccaauuaaaauacaaauauccagcacugaacgugacuaugccaaacaaugaaaaauuugacaaauuguacauuugggggguucaucacccgaguacggacagugaccaaaccagccuauaugcucaagcaucagggagagucacagucucuaccaaaagaagccaacaaacuguaaucccgaauaucggaucuagacccuggguaaggggugucucaagcagaauaagcaucuauuggacaauaguaaaaccgggagacauacuuuugauuaacagcacagggaaucuaauugcuccucgggguuacuucaaaauacgaagugggaaaagcucaauaaugaggucagaugcacccauuggcaaaugcaauucugaaugcaucacuccaaauggaagcauucccaaugacaaaccauuucaaaauguaaacaggaucacauauggggccugucccagauauguuaagcaaaacacucugaaauuggcaacagggaugcggaauguaccagagaaacaaacuagaggaauauucggcgcaaucgcggguuucauagaaaaugguugggagggaaugguggacgguugguacgguuucaggcaucaaaauucugagggcacaggacaagcagcagaucucaaaagcacucaagcagcaaucaaccaaaucaacggaaaacugaauagguuaaucgagaaaacaaacgagaaauaccaucaaauugaaaaagaauucucagaaguagaagggagaauucaggaccucgagaaauauguugaggacacuaaaauagaucucuggucguacaacgcggagcuucuuguugcccuggagaaccaacauacaauugaucuaacugacucagaaaugaacaaacuguuugaaagaacaaggaagcaacugagggaaaaugcugaggauaugggcaaugguuguuucaaaauauaccacaaaugugacaaugccugcauagggucaaucagaaauggaacuuaugaccaugauguauacagagacgaagcauuaaacaaccgguuccagaucaaagguguugagcugaagucaggauacaaagauuggauccuauggauuuccuuugccauaucauguuuuuugcuuuguguuguuuugcugggguucaucaugugggccugccaaaaaggcaacauuaggugcaacauuugcauuuga

SEQ ID NO: 33382 - RNA, 1701 nt, Artificial Sequence
  derived and/or modified CDS sequence (wt) from hemagglutinin__InfluenzaA__ABJ09272
augaagacuaucauugcuuugagcuacauuuuaugucugguuuucgcucaaaaacuucccggaaaugacaacagcacggcaacgcugugccugggacaccaugcagugccaaacggaacgcuagugaaaacaaucacgaaugaccaaauugaagugacuaaugcuacugagcugguucagaguuccucaacagguagaauaugcaacaguccucaccaaauccuugauggagaaaacugcacacuaauagaugcucuauugggagacccucauugugauggcuuccaaaauaaggaaugggaccuuuuuguugaacgcagaaaagccuacagcaacuguuacccuuaugaugugccggauuaugccucccuuaggucacuaguugccucaucuggcacacuggaguuuaacaaugaaagcuucaacuggacuggagucgcucagaauggaacaagcucugcuugcaaaaggagaucuauuaaaaguuucuuuaguagauugaauugguugcaccaauuaaaauacaaauauccagcacugaacgugacuaugccaaacaaugaaaaauuugacaaauuguacauuugggggguucaccacccgaguacggacagugaccaaaucagccuguaugcucaagcaucagggagagucacagucucuaccaaaagaagccaacaaacuguaaucccgaauaucggaucuagacccuggguaaggggugucuccagcagaauaagcaucuauuggacaauaguaaaaccgggagacauacuuuugauuaacagcacagggaaucuaauugcuccucgggguuacuucaaaauacgaagugggaaaagcucaauaaugaggucagaugcacccauuggcaaaugcaauucugaaugcaucacuccaaauggaagcauucccaaugacaaaccauuucaaaauguaaacaggaucacauauggggccugucccagauauguuaagcaaaacacucugaaauuggcaacagggaugcggaauguaccagagaaacaaacuagaggcauauucggcgcaaucgcggguuucauagaaaaugguugggagggaaugguggacgguugguacgguuucaggcaucaaaauucugagggcacaggacaagcagcagaucuuaaaagcacucaagcagcaaucaaccaaaucaacgggaaacugaauagguuaaucgagaaaacgaacgagaaauuccaucaaauugaaaaagaauucucagaaguagaagggagaauucaggaccucgagaaagauguugaggacacuaaaauagaucucuggucguacaacgcggagcuucuuguugcccuggagaaccaacauacaauugaucuaacugacucagaaaugaacaaacuguuugaaagaacaaagaagcaacugagggaaaaugcugaggauaugggcaaugguuguuucaaaauauaccacaaaugugacaaugccugcauagggucaaucagaaauggaacuuaugaccaugauguauacagagacgaagcauuaaacaaccgguuccagaucaaagguguugagcugaagucaggauacaaagauuggauccuauggauuuccuuugccauaucauguuuuuugcuuuguguuguuuugcugggguucaucaugugggccugccaaaaaggcaacauuaggugcaacauuugcauuuga

SEQ ID NO: 33383 - RNA, 1701 nt, Artificial Sequence
  derived and/or modified CDS sequence (wt) from hemagglutinin__InfluenzaA__ABJ09294
augaagacuaucauugcuuugagcuacauuuuaugucugguuuucgcucaaaaacuucccguaaaugacaacagcacggcaacgcugugccugggacaccaugcagugccaaacggaacgcuagugaaaacaaucacgaaugaccacauugaagugacuaaugcuacugagcugguucagaguuccucaacagguagaauaugcgacaguccucaccaaauccuugauggagaaaacugcacacuaauagaugcucuauugggagacccucauugugauggcuuccaaaauaaggaaugggaccuuuuuguugaacgcagcacagccuacagcaacuguuacccuuaugaugugccggauuaugccucccuuaggucacuaguugccucauccggcacacuggaguuuaacaaugaaagcuucaauuggacuggagucgcucagaauggaacaagcucugcuugcaaaaggagaucuauuaaaaguuucuuuaguagauugaauugguugcaccaauuaaaauacaaauauccagcacugaacgugacuaugccaaacaaugaaaaauuugacaaauuguacauuugggggguucaccacccgaguacggacagugaccaaaucagccuauaugcucaagcaucagggagagucacagucucuaccaaaagaagccaacaaacuguaaucccgaauaucggaucuagacccuggguaaggggugucuccagcagaauaagcaucuauuggacaauaguaaaaccgggagacauacuuuugauuaacagcacagggaaucuaauugcuccucgggguuacuucaaaauacgaagugggaaaagcucaauaaugaggucaaaugcacccauuggcaaaugcaauucugaaugcaucacuccaaauggaagcauucccaaugacaaaccauuucaaaauguaaacaggaucacauauggggccugucccagauauguuaagcaaaacacucugaaauuggcaacagggaugcggaauguaccagagaaacaaacuagaggcauauucggcgcaaucgcggguuucauagaaaaugguugggagggaaugguggacgguugguacgguuucaggcaucaaaauucugagggcacaggacaagcagcagaucuuaaaagcacucaagcagcaaucaaccaaaucaacgggaaacugaauagguuaaucgagaaaacaaacgagaaauuccaucaaauugaaaaagaauucucagaaguagaagggagaauucaggaccucgagaaauauguugaggacacuaaaauagaucucuggucguacaacgcggagcuucuuguugcccuggagaaccaacauacaauugaucuaacugacucagaaaugaacaaacuguuugaaagaacaaggaagcaacugagggaaaaugcugaggauaugggcaaugguuguuucaaaauauaccacaaaugugacaaugccugcauagggucaaucagaaauggaacuuaugaccaugauguauacagagacgaagcauuaaacaaccgguuccagaucaaagguguugagcugaagucaggauacaaagauuggauccuauggauuuccuuugccauaucauguuuuuugcuuuguguuguuuugcuuggguucaucaugugggccugccaaaaaggcaacauuaggugcaacauuugcauuuga

SEQ ID NO: 33384 - RNA, 1701 nt, Artificial Sequence
  derived and/or modified CDS sequence (wt) from hemagglutinin__InfluenzaA__ABJ09305
augaagacuaucauugcuuugagcuacauuuuaugucugguuuucgcucaaaaacuucccggaaaugacaacagcacggcaacgcugugccuggggcaccaugcagugccaaacggaacgcuagugaaaacaauaacgaaugaccaaauugaagugacuaaugcuacugagcugguucagaguuccucaacagguagaauaugcgacaguccucaccaaauccuugauggagaaaacugcacacuaauagaugcucuauugggagacccucauugugauggcuuccaaaauaaggaaugggaccuuuuuguugaacgcagcaaagccuacagcaacuguuacccuuaugaugugccggauuaugccucccuuaggucacuaguugccucauccggcacacuggaguuuaacaaugaaagcuucaauuggacuggagucgcucagaauggaacaagcucugcuugcaaaaggagaucuaauaaaaguuucuuuaguagauugaauugguugcaccaauuaaaauacaaauauccagcacugaacgugacuaugccaaacaaugaaaaauuugacaaauuguacauuugggggguucaccacccgaguacggacagugaccaaaucagccuauaugcucaagcaucagggagagucacagucucuaccaaaagaagccaacaaacuguaaucccgaauaucggaucuagacccuggguaaggggugucuccagcagaauaagcaucuauuggacaauaguaaaaccgggagacauacuuuugauuaacagcacagggaaucuaauugcuccucgggguuacuucaaaauacgaagugggaaaagcucaauaaugaggucagaugcacccauuggcaaaugcaauucugaaugcaucacuccaaauggaagcauucccaaugacaaaccauuucaaaauguaaacaggaucacauauggggccugucccagauauguuaagcaaaacacucugaaauuggcaacagggaugcggaauguaccagagaaacaaacuagaggcauauucggcgcaaucgcggguuucauagaaaaugguugggagggaaugguggacgguugguacgguuucaggcaucaaaauucugagggcacaggacaagcagcagaucuuaaaagcacucaagcagcaaucaaccaaaucaacgggaaacugaauagguuaaucgagaaaacgaacgagaaauuccaucaaauugaaaaagaauucucagaaguagaagggagaauucaggaccucgagaaauauguugaggacacuaaaauagaucucuggucguacaacgcggagcuucuuguugcccuggagaaccaacauacaauugaucuaacugacucagaaaugaacaaacuguuugaaagaacaaagaagcaacugagggaaaaugcugaggauaugggcaaugguuguuucaaaauauaccacaaaugugacaaugccugcauagggucaaucagaaaugaaacuuaugaccaugauguauacagagacgaagcauuaaacaaccgguuccagaucaaagguguugagcugaagucaggauacaaagauuggauccuauggauuuccuuugccauaucauguuuuuugcuuuguguuguuuugcugggguucaucaugugggccugccaaaaaggcaacauuaggugcaacauuugcauuuga

SEQ ID NO: 33385 - RNA, 1701 nt, Artificial Sequence
  derived and/or modified CDS sequence (wt) from hemagglutinin__InfluenzaA__ABJ09316
augaagacuaucauugcuuugagcuacauuuuaugucugguuuucgcucaaaaacuucccggaaaugacaacagcacggcaacgcugugccuggggcaccaugcagugccaaacggaacgcuagugaaaacaaucacgaaugaccaaauugaagugacuaaugcuacugagcugguucagaguuccucaacagguagaauaugcgacaguccucaccaaauccuugauggagaaaacugcacacuaauagaugcucuauugggagacccucauugugauggcuuccaaaauaaggaaugggaccuuuuuguugaacgcagcaaagccuacagcaacuguuacccuuaugaugugccggauuaugccucccuuaggucacuaguugccucauccggcacacuggaguuuaacaaugaaagcuucaauuggacuggagucgcucagaauggaacaagcucugcuugcaaaaggagaucuaauaaaaguuucuuuaguagauugaauugguugcaccaauuaaaauacaaauacccagcacugaacgugacuaugccaaacaaugaaaaauuugacaaauuguacauuugggggguucaccacccgaguacagacagugaccaaaucagccuauaugcucaagcaucagggagagucacagucucuaccaaaagaagccaacaaacuguaaucccgaauaucggaucuagacacuggguaaggggugucuccagcagaauaagcaucuauuggacaauaguaaaaccgggagacauacuuuugauuaacagcacagggaaucuaauugcuccucgggguuacuucaaaauacgaagugggaaaagcucaauaaugaggucagaugcauccauuggcaaaugcaauucugaaugcaucacuccaaauggaagcauucccaaugacaaaccauuucaaaauguaaacaggaucacauauggggccugucccagauauguuaagcaaaacacucugaaauuggcaacagggaugcggaauguaccagagaaacaaacuagaggcauauucggcgcaaucgcggguuucauagaaaaugguugggagggaaugguggacgguugguacgguuucaggcaucaaaauucugagggcacaggacaagcagcagaucuuaaaagcacucaagcagcaaucaaccaaaucaacgggaaacugaauagguuaaucgagaaaacgaacgagaaauuccaucaaauugaaaaagaauucucagaaguagaagggagaauucaggaccucgagaaauauguugaggacacuaaaauagaucucuggucguacaacgcggagcuucuuguugcccuggagaaccaacauacaauugaucuaacugacucagaaaugaacaaacuguuugaaagaacaaagaagcaacugagggaaaaugcugaggauaugggcaaugguuguuucaaaauauaccacaaaugugacaaugccugcauagggucaaucagaaauggaacuuaugaccaugauguauacagagacgaagcauuaaacaaccgguuccagaucaaagguguugagcugaagucaggauacaaagauuggauccuauggauuuccuuugccauaucauguuuuuugcuuuguguuguuuugcugggguucaucaugugggccugccaaaaaggcaacauuaggugcaacauuugcauuuga

SEQ ID NO: 33386 - RNA, 1701 nt, Artificial Sequence
  derived and/or modified CDS sequence (wt) from hemagglutinin__InfluenzaA__ABJ09338
augaagacuaucauugcuuugagcuacauuuuaugucugguuuucgcucaaaaacuucccggaaaugacaacagcacggcaacgcugugccuggggcaccaugcagugccaaacggaacgcuagugaaaacaaucacgaaugaccaaauugaagugacuaaugcuacugagcugguucagaguuccucaacagguggaauaugcgacaguccucaccaaauccuugauggagaaaacugcacacuaauagaugcucuauugggagacccucauugugauggcuuccaaaauaaggaaugggaccuuuuuguugaacgcagcaaagccuacagcaacuguuacccuuaugaugugccggauuaugccucccuuaggucacuaguugccucauccggcacacuggaguuuaacaaugaaagcuucaauuggacuggagucgcucagaauggaacaagcucugcuugcaaaaggagaucuaauaaaaguuucuuuaguagauugaauugguugcaccaauuaaaauacaaauacccagcacugaacgugacuaugccaaacaaugaaaaauuugacaaauuguacauuugggggguucaccacccgaguacggacagugaccaaaucagccuauaugcucaagcaccagggagagucacagucucuaccaaaagaagccaacaaacuguaaucccgaauaucggaucuagacccuggguaaggggugucuccagcagaauaagcaucuauuggacaauaguaaaaccgggagacauacuuuugauuaacugcacagggaaucuaauugcuccucgggguuacuucaaaauacgaagugggaaaagcucaauaaugaggucagaugcauccauuggcaaaugcaauucugaaugcaucacuccaaauggaagcauucccaaugacaaaccauuucaaaauguaaacaggaucacauauggggccugucccagauauguuaagcaaaacacucugaaauuggcaacagggaugcggaauguaccagagaaacaaacuagaggcauauucggcgcaaucgcggguuucauagaaaaugguugggagggaaugguggacgguugguacgguuucaggcaucaaaauucugagggcacaggacaagcagcagaucucaaaagcacucaagcagcaaucaaccaaaucaacgggaaacugaauagguuaaucgagaaaacgaacgagaaauuccaucaaauugaaaaagaauucucagaaguggaagggagaauucaggaccucgagaaauauguugaggacacuaaaauagaucucuggucguacaacgcggagcuucuuguugcccuggagaaccagcauacaauugaucuaacugacuccgaaaugaacaaacuguuugaaagaacaaagaagcaacugagggaaaaugcugaggauaugggcaaugguuguuucaaaauauaccacaaaugugacaaugccugcauagggucaaucagaaaugggacuuaugaccaugauguauacagagacgaagcauuaaacaaccgguuccagaucaaagguguugagcugaagucaggauacaaagauuggauccuauggauuuccuuugccauaucauguuuuuugcuuuguguugucuugcugggguucaucaugugggccugccaaaaaggcaacauuaggugcaacauuugcauuuga

SEQ ID NO: 33387 - RNA, 1701 nt, Artificial Sequence
  derived and/or modified CDS sequence (wt) from hemagglutinin__InfluenzaA__ABJ09349
augaagacuaucauugcuuugagcuacauuuuaugucugguuuucgcucaaaaacuucccggaaaugacaacagcacggcaacgcugugccuggggcaccaugcagugccaaacggaacgcuagugaaaacaaucacgaaugaccaaauugaagugacuaaugcuacugagcugauucagaguuccucaacagguggaauaugcgacaguccucaccaaauccuugauggagaaaacugcacacuaauagaugcucuauugggagacccucauugugauggcuuccaaaauaaggaaugggaccuuuuuguugaacgcagcaaagccuacagcaacuguuacccuuaugaugugccggauuaugccucccuuaggucacuaguugccucauccggcacacuggaguuuaacaaugaaagcuucaauuggacuggagucgcucagaauggaacaagcucugcuugcaaaaggagaucuaauaaaaguuucuuuaguagauugaauugguugcaccaauuaaaauacaaauacccagcacugaacgugacuaugccaaacaaugaaaaauuugacaaauuguacauuuggggaguucaccacccgaguacggacagugaccaaaucagccuauaugcucaagcaccagggagagucacagucucuaccaaaagaagccaacaaacuguaaucccgaauaucggaucuagacccuggguaaggggugucuccagcagaauaagcaucuauuggacaauaguaaaaccgggagacauacuuuugauuaacugcacagggaaucuaauugcuccucgggguuacuucaaaauacgaagugggaaaagcucaauaaugaggucagaugcauccauuggcaaaugcaauucugaaugcaucacuccaaauggaagcauucccaaugacaaaccauuucaaaauguaaacaggaucacauauggggccugucccagauauguuaagcaaaacacucugaaauuggcaacagggaugcggaauguaccagagaaacaaacuagaggcauauucggcgcaaucgcggguuucauagaaaaugguugggagggaaugguggacgguugguacgguuucaggcaucaaaauucugagggcacaggacaagcagcagaucucaaaagcacucaagcagcaaucaaccaaaucaacgggaaacugaauagguuaaucgagaaaacgaacgagaaauuccaucaaauugaaaaagaauucucagaaguggaagggagaauucaggaccucgagaaauauguugaggacacuaaaauagaucucuggucguacaacgcggagcuucuuguugcccuggagaaccagcauacaauugaucuaacugacucagaaaugaacaaacuguuugaaagaacaaagaagcaacugagggaaaaugcugaggauaugggcaaugguuguuucaaaauauaccacaaaugugacaaugccugcauagggucaaucagaaaugggacuuaugaccaugauguauacagagacgaagcauuaaacaaccgguuccagaucaaagguguugagcugaagucaggauacaaagauuggauccuauggauuuccuuugccauaucauguuuuuugcuuuguguugucuugcugggguucaucaugugggccugccaaaaaggcaacauuaggugcaacauuugcauuuga

SEQ ID NO: 33388 - RNA, 1701 nt, Artificial Sequence
  derived and/or modified CDS sequence (wt) from hemagglutinin__InfluenzaA__ABJ09360
augaagacuaucauugcuuugagcuacauuuuaugucugguuuucgcucaaaaacuucccggaaaugacaacagcacggcaacgcugugccuggggcaccaugcagugccaaacggaacgcuagugaaaacaaucacgaaugaucaaauugaagugacuaaugcuacugagcugguucagaguuccucaacagguggaauaugcgacaguccucaccaaauccuugauggagaaaacugcacacuaauagaugcucuauugggagacccucauugugauggcuuccaaaauaaggaaugggaccuuuuuguugaacgcagcaaagccuacagcaacuguuacccuuaugaugugccggauuaugccucccuuaggucacuaguugccucauccggcacacuggaguuuaacaaugaaagcuucaauuggacuggagucgcucagaauggaacaagcucugcuugcaaaaggagaucuaauaaaaguuucuuuaguagauugaauugguugcaccaauuaaaauacaaauacccagcacugaacgugacuaugccaaacaaugaaaaauuugacaaauuguacauuugggggguucaccacccgaguacggacagugaccaaaucagccuauaugcucaagcaccagggagagucacagucucuaccaaaagaagccaacaaacuguaaucccgaauaucggaucuagacccuggguaaggggugucuccagcagaauaagcaucuauuggacaauaguaaaaccgggagacauacuuuugauuaacugcacagggaaucuaauugcuccucgggguuacuucaaaauacgaagugggaaaagcucaauaaugaggucagaugcauccauuggcaaaugcaauucugaaugcaucacuccaaauggaagcauucccaaugacaaaccauuucaaaauguaaacaggaucacauauggggccugucccagauauguuaagcaaaacacucugaaauuggcaacagggaugcggaauguaccagagaaacaaacuagaggcauauucggcgcaaucgcggguuucauagaaaaugguugggagggaaugguggacgguugguacgguuucaggcaucaaaauucugagggcacaggacaagcagcagaucucaaaagcacucaagcagcaaucaaccaaaucaacgggaaacugaauagguuaaucgagaaaacgaacgagaaauuccaucaaauugaaaaagaauucucagaaguggaagggagaauucaggaccucgagaaauauguugaggacacuaaaauagaucucuggucguacaacgcggagcuucuuguugcccuggagaaccagcauacaauugaucuaacugacucagaaaugaacaaacuguuugaaagaacaaagaagcaacugagggaaaaugcugaggauaugggcaaugguuguuucaaaauauaccacaaaugugacaaugccugcauagggucaaucagaaaugggacuuaugaccaugauguauacagagacgaagcauuaaacaaccgguuccagaucaaagguguugagcugaagucaggauacaaagauuggauccuauggauuuccuuugccauaucauguuuuuugcuuuguguugucuugcugggguucaucaugugggccugccaaaaaggcaacauuaggugcaacauuugcauuuga

SEQ ID NO: 33389 - RNA, 1701 nt, Artificial Sequence
  derived and/or modified CDS sequence (wt) from hemagglutinin__InfluenzaA__ABJ09371
augaagacuaucauugcuuugagcuacauucuaugucugguuuucgcucaaaaacuucccggaaaugacaacagcacggcaacgcugugccuugggcaccaugcaguaccaaacggaacgauagugaaaacaaucacgaaugaccaaauugaaguuacuaaugcuacugagcugguucagaguuccucaacagguggaauaugcgacaguccucaucagauccuugauggagaaaacugcacacuaauagaugcucuauugggagacccucagugugauggcuuccaaaauaagaaaugggaccuuuuuguugaacgcagcaaagccuacagcaacuguuacccuuaugaugugccggauuaugccucccuuaggucacuaauugccucauccggcacacuggaguuuaacaaugaaagcuucaauuggacuggagucacucaaaauggaacaagcucugcuugcaaaaggagaucuaauagcaguuucuuuaguagauugaauugguugacccacuuaaaauucaaauacccagcauugaacgugacuaugccaaacaaugaagaauuugacaaauuguacauuugggggguucaccacccggguacauacaaugaccaaaucagccuauaugcucaagcaucaggaagaaucacagucucuaccaaaagaagccaacaaacuguaaucccgaauaucgggucuagacucaggguaagggauauccccagcagaauaagcaucuauuggacaauaguaaaaccgggagacauacuuuugauuaacagcacagggaaucuaauugcuccucgggguuacuucaaaauacgaagugggaaaagcucaauaaugagaucagaugcacccauuggcaaaugcaauucugaaugcaucacuccaaauggaagcauucccaaugacaaaccauuucaaaauguaaacaggaucacauauggggccugucccagauauguuaagcaaaacacucugaaauuggcaacagggaugcgaaauguaccagagaaacaaacuagaggcauauuuggcgcaaucgcggguuucauagaaaaugguugggagggaaugguggaugguugguacgguuucaggcaucaaaauucugagggaauaggacaagcagcagaucucaaaagcacucaagcagcaaucgaccaaaucaaugggaagcugaauagguugaucgggaaaaccaacgagaaauuccaucagauugaaaaagaauucucagaaguagaagggagaauucaggaccucgagaaauauguugaggacacuaaaauagaucucuggucauacaacgcggagcuucuuguugcccuagagaaccaacauacaauugaucuaacugacucagaaaugaacaaacuguuugaaagaacaaagaagcaacugagggaaaaugcugaggauaugggcaaugguuguuucaaaauauaccacaaaugugacaaugccugcauagggucaaucagaaauggaacuuaugaccaugauguauacagagaugaagcauuaaacaaccgguuccagaucaaagguguugagcugaagucaggauacaaagauuggauccuauggauuuccuuugccauaucauguuuuuugcuuuguguugcuuuguugggguucaucaugugggccugccaaaaaggcaacauuaggugcaacauuugcauuuga

SEQ ID NO: 33390 - RNA, 1701 nt, Artificial Sequence; identical to SEQ ID NO: 32645
  derived and/or modified CDS sequence (wt) from hemagglutinin__InfluenzaA__ABJ09382

SEQ ID NO: 33391 - RNA, 1701 nt, Artificial Sequence
  derived and/or modified CDS sequence (wt) from hemagglutinin__InfluenzaA__ABJ16587
augaagacuaucauugcuuugagcuacauuucaugucugguuuucgcucaaaaacuucccggaaaugacaacagcacggcaacgcugugccugggacaccaugcagugccaaacggaacgcuagugaaaacaaucacgaaugaccaaauugaagugacuaaugcuacugagcugguucagaguuccucaacagguagaauaugcgacaguccucaccaaauccuugauggagaaaacugcacacugauagaugcucuauugggagacccacauugugauggcuuccaaaauaaggaaugggaccuuuuuguugaacgcagcaaagccuacagcaacuguuacccuuaugaugugccggauuaugccucccuuaggucacuaguugccucauccggcacccuggaguuuaacaaugaaagcuucaauuggacuggagucgcucagaauggaacaagcucugcuugcaaaaggagaucuauuaaaaguuucuuuaguagauugaauugguugcaccaauuaaaauacagauauccagcacugaacgugacuaugccaaacaaugacaaauuugacaaauuguacauuugggggguucaccacccgaguacggacagugaccaaaccagccuauaugcccaagcaucagggagagucacagucucuaccaaaagaagccaacaaacuguaaucccaaauaucggauccagacccuggguaaggggugucuccagcagaauaagcaucuauuggacaauaguaaaaccgggagacauacuuuugauuaacagcacagggaaucuaauugcuccucgggguuacuucaaaauacgaagugggaaaagcucaauaaugaggucagaugcacccauuggcaaaugcaauucugaaugcaucacuccaaauggaagcauucccaaugacaaaccauuucaaaauguaaacaggaucacauauggggccugucccagauauguuaagcaaaacacucugaaauuggcaacagggaugcggaauguaccagagaaacaaacuagaggcauauucggcgcaaucgcggguuucauagaaaaugguugggagggaaugauggacgguugguacgguuucaggcaucaaaauucugagggcacaggacaagcagcagaucuuaaaagcacucaagcagcaaucaaccaaaucaacgggaaacugaauagguuaaucgagaaaacgaacgagaaauuccaucaaauugaaaaagaauucucagaaguagaagggagaauucaggaccucgagaaauauguugaggacacuaaaauagaucucuggucguacaacgcggagcuucuuguugcccuggagaaccaacauacaauugaucuaacugacucagaaaugaacaaacuguuugaaagaacaaggaagcaacugagagaaaaugcugaggauaugggcaaugguuguuucaaaauauaccacaaaugugacaaugccugcauagggucaaucagaaauggaacuuaugaccaugauguauacagagacgaagcauuaaacaaccgguuccagaucaaagguguugagcugaagucaggauacaaagauuggauccuauggauuuccuuugccauaucauguuuuuugcuuuguguuguuuugcugggguucauuaugugggccugccaaaaaggcaacauuaggugcaacauuugcauuuga

SEQ ID NO: 33392 - RNA, 1701 nt, Artificial Sequence
  derived and/or modified CDS sequence (wt) from hemagglutinin__InfluenzaA__ABJ16598
augaagacuaucauugcuuugagcuacauuuuaugucugguuuucgcucaaaaacuucccggaaaugacaacagcacggcaacgcugugccugggacaccaugcagugccaaacggaacgcuagugaaaacaaucacgaaugaccaaauugaagugacuaaugcuacugagcugguucagaguuccucaacagguagaauaugcaacaguccucaccaaauccuugauggagaaaacugcacacuaauagaugcucuauugggagacccucauugugauggcuuccaaaauaaggaaugggaccuuuuuguugaacgcagcaaagccuacagcaacuguuacccuuaugaugugccggauuaugccucccuuaggucacuaguugccucaucuggcacacuggaguuuaacaaugaaagcuucaacuggacuggagucgcucagaauggaacaagcucugcuugcaaaaggagaucuauuaaaaguuucuuuaguagauugaauugguugcaccaauuaaaauacaaauauccagcacugaacgugacuaugccaaacaaugaaaaauuugacaaauuguacauuugggggguucaccacccgaguacggacagugaccaaaucagccuguaugcucaagcaucagggagagucacagucucuaccaaaagaagccaacaaacuguaaucccaaauaucggaucuagacccuggguaaggggugucuccagcagaauaagcaucuauuggacaauaguaaaaccgggagacauacuuuugauuaacagcacagggaaucuaauugcuccucgggguuacuucaaaauacgaagugggaaaagcucaauaaugaggucagaugcacccauuggcaaaugcaauucugaaugcaucacuccaaauggaagcauucccaaugacaaaccauuucaaaauguaaacaggaucacauauggggccugucccagauauguuaagcaaaacacucugaaauuggcaacagggaugcggaauguaccagagaaacaaacuagaggcauauucggcgcaaucgcggguuucauagaaaaugguugggagggaaugguggacgguugguacgguuucaggcaucaaaauucugagggcacaggacaagcagcagaucuuaaaagcacucaagcagcaaucaaccaaaucaacgggaaacugaauagguuaaucgagaaaacgaacgagaaauuccaucaaauugaaaaagaauucucagaaguagaagggagaauucaggaccucgagaaauauguugaggacacuaaaauagaucucuggucguacaacgcggagcuucuuguugcccuggagaaccaacauacaauugaucuaacugacucagaaaugaacaaacuguuugaaagaacaaagaagcaacugagggaaaaugcugaggauaugggcaaugguuguuucaaaauauaccacaaaugugacaaugccugcauagggucaaucagaaauggaacuuaugaccaugauguauacagagacgaagcauuaaacaaccgguuccagaucaaagguguugagcugaagucaggauacaaagauuggauccuauggauuuccuuugccauaucauguuuuuugcuuuguguuguuuugcugggguucaucaugugggccugccaaaaaggcaacauuaggugcaacauuugcauuuga

SEQ ID NO: 33393 - RNA, 1701 nt, Artificial Sequence
  derived and/or modified CDS sequence (wt) from hemagglutinin__InfluenzaA__ABJ16620
augaagacuaucauugcuuugagcuacauuuuaugucugguuuucgcucaaaaacuucccggaaaugacaacagcacggcaacgcugugccugggacaccaugcagugccaaacggaacgcuagugaaaacaaucacgaaugaccaaauugaagugacuaaugcuacugagcugguucagaguuccucaacagguagaauaugcaacaguccucaccaaauccuugauggagaaaacugcacacuaauagaugcucuauugggagacccucauugugauggcuuccaaaauaaggaaugggaccuuuuuguugaacgcaacaaagccuacagcaacuguuacccuuaugaugugccggauuaugccucccuuaggucacuaguugccucaucuggcacacuggaguuuaacaaugaaagcuucaacuggacuggagucgcucagaauggaacaagcucugcuugcaaaaggagaucuauuaaaaguuucuuuaguagauugaauugguugcaccaauuaaaauacaaauauccagcacugaacgugacuaugccaaacaaugaaaaauuugacaaauuguacauuugggggguucaccacccgaguacggacagugaccaaaucagccuguaugcucaagcaucagggagagucacagucucuaccaaaagaagccaacaaacuguaaucccgaauaucggaucuagacccuggguaaggggugucuccagcagaauaagcaucuauuggacaauaguaaaaccgggagacauacuuuugauuaacagcacagggaaucuaauugcuccucgggguuacuucaaaauacgaagugggaaaagcucaauaaugaggucagaugcacccauuggcaaaugcaauucugaaugcaucacuccaaauggaagcauucccaaugacaaaccauuucaaaauguaaacaggaucacauauggggccugucccagauauguuaagcaaaacacucugaaauuggcaacagggaugcggaauguaccagagaaacaaacuagaggcauauucggcgcaaucgcggguuucauagaaaaugguugggagggaaugguggacgguugguacgguuucaggcaucaaaauucugagggcacaggacaagcagcagaucuuaaaagcacucaagcagcaaucaaccaaaucaacgggaaacugaauagguuaaucgagaaaacgaacaagaaauuccaucaaauugaaaaagaauucucagaaguagaagggagaauucaggaccucgagaaauauguugaggacacuaaaauagaucucuggucguacaacgcggagcuucuuguugcccuggagaaccaacauacaauugaucuaacugacucagaaaugaacaaacuguuugaaagaacaaagaagcaacugagggaaaaugcugaggauaugggcaaugguuguuucaaaauauaccacaaaugugacaaugccugcauagggucaaucagaaauggaacuuaugaccaugauguauacagagacgaagcauuaaacaaccgguuccagaucaaagguguugagcugaagucaggauacaaagauuggauccuauggauuuccuuugccauaucauguuuuuugcuuugugucguuuugcugggguucaucaugugggccugccaaaaaggcaacauuaggugcaacauuugcauuuga

SEQ ID NO: 33394 - RNA, 1701 nt, Artificial Sequence
  derived and/or modified CDS sequence (wt) from hemagglutinin__InfluenzaA__ABJ16631
augaagacuaucauugcuuugagcuacauccuaugucugguuuucgcucaaaaacuucccggaaaugacaacagcacggcaacgcugugccuugggcaccaugcaguaccaaacggaacgauagugaaaacaaucacgaaugaccaaauugaaguuacuaaugcuacugagcugguucagaguuccucaacagguggaauaugcgacaguccucaucagauccuugauggagaaaacugcacacuaauagaugcucuauugggagacccucagugugauggcuuccaaaauaagaaaugggaccuuuuuguugaacgcagcaaagccuacagcaacuguuacccuuaugaugugccggauuaugccucccuuaggucacuaauugccucauccggcacacuggaguuuaacaaugaaagcuucaauuggacuggagucacucaaaauggaacaagcucugcuugcaaaaggagaucuaauagcaguuucuuuaguagauugaauugguugacccacuuaaaauucaaauacccagcauugaacgugacuaugccaaacaaugaagaauuugacaaauuguacauuugggggguucaccacccggguacauacaaugaccaaaucagccuauaugcucaagcaucaggaagaaucacagucucuaccaaaagaagccaacaaacuguaaucccgaauaucgggucuagacccaggguaagggauauccccagcagaauaagcaucuauuggacaauaguaaaaccgggagacauacuuuugauuaacagcacagggaaucuaauugcuccucgggguuacuucaaaauacgaagugggaaaagcucaauaaugagaucagaugcacccauuggcaaaugcaauucugaaugcaucacuccaaauggaagcauucccaaugacaaaccauuucaaaauguaaacaggaucacauauggggccugucccagauauguuaagcaaaacacucugaaauuggcaacagggaugcgaaauguaccagagaaacaaacuagaggcauauuuggcgcaaucgcggguuucauagaaaaugguugggagggaaugguggaugguugguacgguuucaggcaucaaaauucugagggaauaggacaagcagcagaucucaaaagcacucaagcagcaaucgaccaaaucaaugggaagcugaauagguugaucgggaaaaccaacgagaaauuccaucagauugaaaaagaauucucagaaguagaagggagaauucaggaccucgagaaauauguugaggacacuaaaauagaucucuggucauacaacgcggagcuucuuguugcccuggagaaccaacauacaauugaucuaacugacucagaaaugaacaaacuguuugaaaaaacaaagaagcaacugagggaaaaugcugaggauaugggcaaugguuguuucaaaauauaccacaaaugugacaaugcuugcauagggucaaucagaaauggaacuuaugaccaugauguauacagagaugaagcauuaaacaaccgguuccagaucaaagguguugagcugaagucaggauacaaagauuggauccuauggauuuccuuugccauaucauguuuuuugcuuuguguugcuuuguugggguucaucaugugggccugccaaaaaggcaacauuaggugcaacauuugcauuuga

SEQ ID NO: 33395 - RNA, 1698 nt, Artificial Sequence
  derived and/or modified CDS sequence (wt) from hemagglutinin__InfluenzaA__ABJ16664
augaaaguaaaacuacugguucuguuauguacauuuacagcuacauaugcagacacaauauguauaggcuaccaugccaacaacucgaccgacacuguugacacaguacuugagaagaaugugacagugacacacucugucaaccuacuugaggacagucacaauggaaaacuaugucugcuaaaaggaauagccccacuacaauuggguaacugcagcguugccggauggaucuuaggaaacccagaaugcgaauuacugauuuccaaggaaucaugguccuacauuguagaaacaccaaauccugagaauggaacauguuacccagggcauuucgccgacuaugaggagcugagggagcaauugaguucaguaucuucauuugagagguucgaaauauuccccaaagagagcucauggcccaaccacaccguaaccggaguaucagcaucaugcucccauaacgggaaaagcaguuuuuacagaaauuugcuauggcugacggggaagaaugguuuguauccaaaccugagcaaguccuaugcaaacaacaaagagaaagaaguccuuguacugugggguguucaucacccgccuaacauaggggaccaaagggcccucuaucauacagaaaaugcuuaugucucuguagugucuucacauuauagcagaagauucaccccagaaauagccaaaagacccaaggugagagaucaggaaggaagaaucaacuacuacuggacucugcuggaacccggggauacaauaauauuugaggcaaauggaaaucuaauagcgccaagguuugcuuucgcacugaguagaggcuuuggaucaggaaucaucaccucaaaugcaccaauggaugaaugugaugcgaagugucaaacaccucagggagcuauaaacagcagucuuccuuuccagaauguacacccagucacaauaggagaguguccaaaguaugucaggagugcaaaauuaagaaugguuacaggacuaaggaacaucccauccauucaauccagagguuuguuuggagccauugccgguuucauugaagggggguggacuggaaugguagaugguugguaugguuaucaccaucagaaugagcaaggaucuggguaugcugcagaucaaaaaagcacacaaaaugccauuaacgggauuacaaacaaggugaauucuguaauugagaaaaugaacacucaauucacagcugugggcaaagaauucaacaaauuggaaagaaggauggaaaacuuaaauaaaaaaguugaugauggguuucuagacauuuggacauauaacgcagaauuguugguucuacuggaaaaugaaaggacuuuggacuuccaugacuccaacgugaagaaucuguaugagaaaguaaaaagccaauuaaagaauaaugccaaagaaauaggaaacggguguuuugaauucuaucacaaguguaacgaugaaugcauggagagugugaaaaauggaacuuaugacuauccaaaauauuccgaagaaucaaaguuaaacagggagagaauugauggagugaaauuggaaucaaugggagucuaucagauucuggcgaucuacucaacagucgccaguucccugguucuuuuggucucccugggggcaaucagcuucuggauguguuccaaugggucuuugcaguguagaauaugcaucuaa

SEQ ID NO: 33396 - RNA, 1698 nt, Artificial Sequence
  derived and/or modified CDS sequence (wt) from hemagglutinin__InfluenzaA__ABJ16675
augaaaguaaaacuacugguucuguuauguacauuuacagcuacauaugcagacacaauauguauaggcuaccaugccaacaacucgaccgacacuguugacacaguacuugagaagaaugugacagugacacacucugucaaccuacuugaggacagucacaauggaaaacuaugucuacuaaaaggaauagccccacuacaauuggguaauugcagcguugccggauggaucuuaggaaacccagaaugcgaauuacugauuuccaaggaaucaugguccuacauuguagaaacaccaaauccugagaauggaacauguuacccaggguauuucgccgacuaugaggagcugagggagcaauugaguucaguaucuucauuugagagguucgaaauauuccccaaagagagcucauggcccaaccacaccguaaccggaguaucagcaucaugcucccauaacgggaaaagcaguuuuuacagaaauuugcuauggcugacggggaagaaugguuuguauccaaaccugagcaaguccuaugcaaacaacaaagagaaagaaguccuuguacugugggguguucaucacccgccuaacauaggggaccaaagggcccucuaucauacagaaaaugcuuaugucucuguagugucuucacauuauagcagaagauucaccccagaaauagccaaaagacccaaggugagagaucaggaaggaagaaucaacuacuacuggacucugcuggaacccggggauacaauaauauuugaggcaaauggaaaucuaauagcgccaagguuugcuuucgcacugaguagaggcuuuggaucaggaaucaucaccucaaaugcaccaauggaugaaugugaugcgaagugucaaacaccucagggagcuauaaacagcagucuuccuuuccagaauguacacccagucacaauaggagaguguccaaaguaugucaggagugcaaaauuaagaaugguuacaggacuaaggaacaucccauccauucaauccagagguuuguuuggagccauugccgguuucauugaagggggguggacuggaaugguagaugguugguaugguuaucaccaucagaaugagcaaggaucuggguaugcugcagaucaaaaaagcacacaaaaugccauuaacgggauuacaaacaaggugaauucuguaauugagaaaaugaacacucaauucacagcugugggcaaagaauucaacaaauuggaaagaaggauggaaaacuuaaauaaaaaaguugaugauggguuucuagacauuuggacauauaacgcagaauuguugguucuacuggaaaaugaaaggacuuuggacuuccaugacuccaacgugaagaaucuguaugagaaaguaaaaagccaauuaaagaauaaugccaaagaaauaggaaacggguguuuugaauucuaucacaaguguaacgaugaaugcauggagagugugaaaaauggaacuuaugacuauccaaaauauuccgaagaaucaaaguugaacagggagagaauugauggagugaaauuggaaucaaugggagucuaucagauucuggcgaucuacucaacagucgccaguucccugguucuuuuggucucccugggggcaaucagcuucuggauguguuccaaugggucuuugcaguguagaauaugcaucuaa

SEQ ID NO: 33397 - RNA, 1698 nt, Artificial Sequence
  derived and/or modified CDS sequence (wt) from hemagglutinin__InfluenzaA__ABJ16686
augaaaguaaaacuacugguucuguuauguacauuuacagcuacauaugcagacacaauauguauaggcuaccaugccaacaacucaaccgacacuguugacacaguacuugagaagaaugugacagugacacacucugucaaccuacuugaggacagucacaauggaaaacuaugucuacuaaaaggaauagccccauuacaauuggguaauugcagcguugccggauggaucuuaggaaacccagaaugcgaauuacugauuuccaaggaaucaugguccuacauuguagaaacaccaaauccugagaauggaacauguuacccaggguauuucgccgacuaugaggaacugagggagcaauugaguucaguaucuucauuugagagguucgaaauauuccccaaagagagcucauggcccaaccacaccguaaccggaguaucagcaucaugcucccauaacgggaaaagcaguuuuuacagaaauuugcuauggcugacggggaagaaugguuuguacccaaaccugagcaaguccuaugcaaacaacaaagagaaagaaguccuuguacuaugggguguucaucacccgccuaacauaggggaccaaagggcccucuaucauacagaaaaugcuuaugucucuguagugucuucacauuauagcagaagauucaccccagaaauagccaaaagacccaaggugagagaucaggaaggaagaaucaacuacuacuggacucugcuggaacccggggauacaauaauauuugaggcaaauggaaaucuaauagcgccaagguuugcuuucgcacugaguagaggcuuuggaucaggaaucaucaccucaaaugcaccaauggaugaaugugaugcgaagugucaaacaccucaaggagcuauaaacagcagucuuccuuuccagaauguacacccagucacaauaggggaguguccaaaguaugucaggagugcaaaauuaaggauggcuacaggacuaaggaacaucccauccauucaauccagagguuuguuuggagccauugccgguuucauugaagggggguggacuggaaugguagaugguugguaugguuaucaucaucagaaugagcaaggaucuggguaugcugcagaucaaaaaagcacacaaaaugccauuaacgggauuacaaacaaggugaauucuguaauugagaaaaugaacacucaauucacagcugugggcaaagaauucagcaaauuggagagaaggauggaaaacuuaaauaaaaaaguugaugauggguuucuagacauuuggacauauaaugcagaauuguugguucuacuggaaaaugaaagaacuuuggauuuccaugacuccaacgugaagaaucuguaugagaaagugaaaagccaauuaaagaauaaugccaaagaaauaggaaacggguguuuugaauucuaucacaaauguaacgaugaaugcauggagagugugaaaaauggaacuuaugacuauccaaaauauuccgaagaaucaaaguuaaacagggagaaaauugauggagugaaauuggaaucaaugggagucuaucagauucuggcgaucuacucaacagucgccaguucccugguucuuuuggucucccugggggcaaucagcuucuggauguguuccaaugggucuuugcaguguagaauaugcaucuaa

SEQ ID NO: 33398 - RNA, 1701 nt, Artificial Sequence
  derived and/or modified CDS sequence (wt) from hemagglutinin__InfluenzaA__ABJ16697
augaagacuaucauugcuuugagcuacauuuuaugucugguuuucgcucaaaaacuucccggaaaugacaacagcacggcaacgcugugccuggggcaccaugcagugccaaacggaacgcuagugaaaacaaucacgaaugaccaaauugaagugacuaaugcuacugagcugguucagaguuccucaacagguggaauaugcgacaguccucaccaaauccuugauggagaaaacugcacacuaauagaugcucuauugggagacccucauugugauggcuuccaaaauaaggaaugggaccuuuuuguugaacgcagcaaagccuacagcaacuguuacccuuaugaugugccggauuaugccucccuuaggucacuaguugccucauccggcacacuggaguuuaacaaugaaagcuucaauuggacuggagucgcucagaauggaacaagcucugcuugcaaaaggagaucuaauaaaaguuucuuuaguagauugaauugguugcaccaauuaaaauacaaauacccagcacugaacgugacuaugccaaacaaugaaaaauuugacaaauuguacauuugggggguucaccacccgaguacggacagugaccaaaucagccuauaugcucaagcaccagggagagucacagucucuaccaaaagaagccaacaaacuguaaucccgaauaucggaucuagacccuggguaaggggugucuccagcagaauaagcaucuauuggacaauaguaaaaccgggagacauacuuuugauuaacugcacagggaaucuaauugcuccucgggguuacuucaaaauacgaagugggaaaagcucaauaaugaggucagaugcauccauuggcaaaugcaauucugaaugcaucacuccaaauggaagcauucccaaugacaaaccauuucaaaauguaaacaggaucacauauggggccugucccagauauguuaagcaaaacacucugaaauuggcaacagggaugcggaauguaccagagaaacaaacuagaggcauauucggcgcaaucgcggguuucauagaaaaugguugggagggaaugguggacgguugguacgguuucaggcaucaaaauucugagggcacaggacaagcagcagaucucaaaagcacucaagcagcaaucaaccaaaucaacgggaaacugaauagguuaaucgagaaaacgaacgagaaauuccaucaaauugaaaaagaauucucagaaguggaagggagaauucaggaccucgagaaauauguugaggacacuaaaauagaucucuggucguacaacgcggagcuucuuguugcccuggagaaccagcauacaauugaucuaacugacucagaaaugaacaaacuguuugaaagaacaaagaagcaacugagggaaaaugcugaggauaugggcaaugguuguuucaaaauauaccacaaaugugacaaugccugcauagggucaaucagaaaugggacuuaugaccaugauguauacagagacgaagcauuaaacaaccgguuccagaucaaagguguugagcugaagucaggauacaaagauuggauccuauggauuuccuuugccauaucauguuuuuugcuuugugcugucuugcugggguucaucaugugggccugccaaaaaggcaacauuagaugcaacauuugcauuuga

SEQ ID NO: 33399 - RNA, 1701 nt, Artificial Sequence
  derived and/or modified CDS sequence (wt) from hemagglutinin__InfluenzaA__ABJ16730
augaaagcaaaacuacuaguucuguugugugcauuuacagcuacauaugcagacacaauauguauaggcuaccaugcgaacaacucaacugacacuguugacacaguacuugagaagaacgugacagugacacacucugucaaccuacuugaggacagucacaacggaaaacuaugccgacuaaaaggaacagccccacuacaauuggguaauugcagcauugccggauggaucuuaggaaauccagaaugcgaaucacuguuuucuaaggaaucauggucuuacauugcagaaacaccaaacccuaaaaauggaacauguuacccaggguauuucgccgacuaugaggaacugagggagcaauugagcucaguaucaucauucgagagauuugaaauauuccccaaggauagcucauggcccaaccacacuguaaccaaaggagugacggcaucaugcucccauaaugggaaaagcagcuuuuacaaaaauuugcuauggcugacggagaagaauggcuuguacccaaaucugagcaaguccuauguaaacaaaaagggaaaagaaguccuugugcuaugggguguucaucacccgucuaacaugggggaccaacgggccaucuaucauaaagaaaaugcuuauguuucuguguugucuucacauuauagcagaagauucaccccagaaauagcaagaagaccaaaaguaagagaucaagaagggagaauuaacuacuacuggacucugcuggaacccggggacacaauaauauuugaggcaaauggaaaucuaauagcgccgugguacgcuuucgcacugaguagaggcuuugggucaggaaucaucaucucaaacgcaucaaugggugaaugugacgcuaagugucaaacaccccaaggagcuauaaacaguagucuccccuuccagaauguacacccagucacaauaggagaguguccaaaguaugucaggaguacaaaauuaaggaugguuacaggacuaaggaacgucccauccauucaauccagagguuuguuuggagccauugccgguuucauugaaggaggguggacuggaaugauagauggaugguaugguuaucaucaucaaaaugaacaaggaucuggcuaugcugcggaccaaaaaagcacacaaaaugccauuaaugggauuacaaacaaggugaauucuauaaucgagaaaaugaacacucaauucacagcuguaggcaaagaauucaacaaauuagaaagaaggauggaaaacuuaaauaagaaaguugaugauggauuucuggacauuuggacauauaaugcagaauuguuaguucuccuggaaaaugaaaggacuuuggauuuucaugacucaaaugugaagaaccuguaugagaaagugaaaaaccaauugaagaauaaugccaaagaaauagggaacggguguuuugaauucuaucacaaguguaacaaugaaugcauggaaagugugaaaaauggaacuuaugacuauccaaaauauuccaaagaaucaaaguuaaacagggaaaaaauugauggagugaaauuggaaucaaugggagucuaucagauucuggcgaucuacucaacugucgccaguucgcuggugcuuuuggucucccugggggcaaucagcuucuggauguguucuaaugggucuuugcaguguagaauaugcaucuga

SEQ ID NO: 33400 - RNA, 1701 nt, Artificial Sequence
  derived and/or modified CDS sequence (wt) from hemagglutinin__InfluenzaA__ABJ16741
augaagacuaucauugcuuugagcuacauuuuaugucugguuuucgcucaaaaacuucccggaaaugacaacagcacggcaacgcugugccuggggcaccaugcagugccaaacggaacgcuagugaaaacaaucacaaaugaccaaauugaagugacuaaugcuacugagcugguucagaguuccucaacagguggaauaugcgacaguccucaccaaauccuugauggagaaaacugcacacuaauagaugcucuauugggagacccucauugugauggcuuccaaaauaaggaaugggaccuuuuuguugaacgcagcaaagccuacagcaacuguuacccuuaugaugugccggauuaugccucccuuaggucacuaguugccucauccggcacacuggaguuuaacaaugaaagcuucaauuggacuggagucgcucagaauggaacaagcucugcuugcaaaaggagaucuaauaaagguuucuuuaguagauugaauugguugcaccaauuaaaauacaaauacccagcacugaacgugacuaugccaaacaaugaaaaauuugacaaauuguacauuugggggguucaccacccgaguacggacagugaccaaaucagccuauaugcucaagcaccagggagagucacagucucuaccaaaagaagccaacaaacuguaaucccgaauaucggaucuagacccuggguaaggggugucuccagcauaauaagcaucuauuggacaauaguaaaaccgggagacauacuuuugauuaacugcacagggaaucuaauugcuccucgggguuacuucaaaauacgaagugggaaaagcucaauaaugaggucagaugcauccauuggcaaaugcaauucugaaugcaucacuccaaauggaagcauucccaaugacaaaccauuucaaaauguaaacaggaucacauauggggccugucccagauauguuaagcaaaacacucugaaauuggcaacagggaugcggaauguaccagagaaacaaacuagaggcauauucggcgcaaucgcggguuucauagaaaaugguugggagggaaugguggacgguugguacgguuucaggcaucaaaauucugagggcacaggacaagcagcagaucucaaaagcacucaagcagcaaucaaccaaaucaacgggaaacugaauagguuaaucgggaaaacgaacgagaaauuccaucaaauugaaaaagaauucucagaaguggaagggagaauucaggaccucgagaaauauguugaggacacuaaaauagaucucuggucguacaacgcggagcuucuuguugcccuggagaaccagcauacaauugaucuaacugacucagaaaugaacaaacuguuugaaagaacaaagaagcaacugagggaaaaugcugaggauaugggcaaugguuguuucaaaauauaccacaaaugugacaaugccugcauagggucaaucagaaaugggacuuaugaccaugauguauacagagacgaagcauuaaacaaccgguuccagaucaaagguguugagcugaagucaggauacaaagauuggauccuauggauuuccuuugccauaucauguuuuuugcuuuguguugucuugcugggguucaucaugugggccugccaaaaaggcaacauuaggugcaacauuugcauuuga

SEQ ID NO: 33401 - RNA, 1701 nt, Artificial Sequence
  derived and/or modified CDS sequence (wt) from hemagglutinin__InfluenzaA__ABJ16752
augaagacuaucauugcuuugagcuacauuuuaugucugguuuucgcucaaaaacuucccggaaaugacaacagcacggcaacgcugugccuggggcaccaugcagugccaaacggaacgcuagugaaaacaaucacgaaugaccaaauugaagugacuaaugcuacugagcugguucagaguuccucaacagguggaauaugcgacaguccucaccaaauccuugauggagaaaacugcacacuaauagaugcucuauugggagacccucauugugauggcuuccaaaauaaggaaugggaccuuuuuguugaacgcagcaaagccuacagcaacuguuacccuuaugaugugccggauuaugccucccuuaggucacuaguugccucauccggcacacuggaguuuaacaaugaaagcuucaauuggacuggagucgcucagaauggaacaagcucugcuugcaaaaggagaucuaauaaaaguuucuuuaguagauugaauugguugcaccaauuaaaauacaaauacccagcacugaacgugacuaugccaaacaaugaaaaauuugacaaauuguacauuugggggguucaccacccgaguacggacagugaccaaaucagccuauaugcucaagcaccagggagagucacagucucuaccaaaagaagccaacaaacuguaaucccgaauaucggaucuagacccuggguaaggggugucuccagcggaauaagcaucuauuggacaauaguaaaaccgggagacauacuuuugauuaacugcacagggaaucuaauugcuccucgggguuacuucaaaauacgaagugggaaaagcucaauaaugaggucagaugcauccauuggcaaaugcaauucugaaugcaucacuccaaauggaagcauucccaaugacaaaccauuucaaaauguaaacaggaucacauauggggccugucccagauauguuaagcaaaacacucugaaauuggcaacagggaugcggaauguaccagagaaacaaacuagaggcauauucggcgcaaucgcggguuucauagaaaaugguugggagggaaugguggacgguugguacgguuucaggcaucaaaauucugagggcacaggacaagcagcagaucucaaaagcacucaagcagcaaucaaccaaaucaacgggaaacugaauagguuaaucgagaaaacgaacgagaaauuccaucaaauugaaaaagaauucucagaaguggaagggagaauucaggaccucgagaaauauguugaggacacuaaaauagaucucuggucguacaacgcggagcuucuuguugcccuggagaaccagcauacaauugaucuaacugacucagaaaugaacaaacuguuugaaagaacaaagaagcaacugagggaaaaugcugaggauaugggcaaugguuguuucaaaauauaccacaaaugugacaaugccugcauagggucaaucagaaaugggacuuaugaccaugauguauacagagacgaagcauuaaacaaccgguuccagaucaaagguguugagcugaagucaggauacaaagauuggauccuauggauuuccuuugccauaucauguuuuuugcuuuguguugucuugcugggguucaucaugugggccugccaaaaaggcaacauuaggugcaacauuugcauuuga

SEQ ID NO: 33402 - RNA, 1701 nt, Artificial Sequence
  derived and/or modified CDS sequence (wt) from hemagglutinin__InfluenzaA__ABJ16763
augaagacuaucauugcuuugagcuacauuuuaugucugguuuucgcucaaaaacuucccggaaaugacaacagcacggcaacgcugugccuggggcaccaugcagugccaaacggaacgcuagugaaaacaaucacgaaugaccaaauugaagugacuaaugcuacugagcugguucagaguuccucaacagguggaauaugcgacaguccucaccaaauccuugauggagaaaacugcacacuaauagaugcucuauugggagacccucauugugauggcuuccaaaauaaggaaugggaccuuuuuguugaacgcagcaaagccuacagcaacuguuacccuuaugaugugccggauuaugccucccuuaggucacuaguugccucauccggcacacuggaguuuaacaaugaaagcuucaauuggacuggagucgcucagaauggaacaagcucugcuugcaaaaggagaucuaauaaaaguuucuuuaguagauugaauugguugcaccaauuaaaauacaaauacccagcacugaacgugacuaugccaaacaaugaaaaauuugacaaauuguacauuugggggguucaccacccgaguacggacagugaccaaaucagccuauaugcucaagcaccagggagagucacagucucuaccaaaagaagccaacaaacuguaaucccgaauaucggaucuagacacuggguaaggggugucuccagcagaauaagcaucuauuggacaauaguaaaaccgggagacauacuuuugauuaacugcacagggaaucuaauugcuccucgggguuacuucaaaauacgaagugggaaaagcucaauaaugaggucagaugcauccauuggcaaaugcaauucugaaugcaucacuccaaauggaagcauucccaaugacaaaccauuucaaaauguaaacaggaucacauauggggccugucccagauauguuaagcaaaacacucugaaauuggcaacagggaugcggaauguaccagagaaacaaacuagaggcauauucggcgcaaucgcggguuucauagaaaaugguugggagggaaugguggacgguugguacgguuucaggcaucaaaauucugagggcacaggacaagcagcagaucucaaaagcacucaagcagcaaucaaccaaaucaacgggaaacugaauagguuaaucgagaaaacgaacgagaaauuccaucaaauugaaaaagaauucucagaaguggaagggagaauucaggaccucgagaaauauguugaggacacuaaaauagaucucuggucguacaacgcggagcuucuuguugcccuggagaaccagcauacaauugaucuaacugacucagaaaugaacaaacuguuugaaagaacaaagaagcaacugagggaaaaugcugaggauaugggcaaugguuguuucaaaauauaccacaaaugugacaaugccugcauagggucaaucagaaaugggacuuaugaccaugauguauacagagacgaagcauuaaacaaccgguuccagaucaaagguguugagcugaagucaggauacaaagauuggauccuauggauuuccuuugccauaucauguuuuuugcuuuguguugucuugcugggguucaucaugugggccugccaaaaaggcaacauuaggugcaacauuugcauuuga

SEQ ID NO: 33403 - RNA, 1701 nt, Artificial Sequence
  derived and/or modified CDS sequence (wt) from hemagglutinin__InfluenzaA__ABJ16774
augaagacuaucauugcuuugagcuacauuuuaugucugguuuucgcucaaaaacuucccguaaaugacaacagcacggcaacgcugugccugggacaccaugcagugccaaacggaacgcuagugaaaacaaucacgaaugaccacauugaagugacuaaugcuacugagcugguucagaguuccccaacagguagaauaugcgacaguccucaccaaauccuugauggagaaaacugcacacuaauagaugcucuauugggagacccucauugugauggcuuccaaaauaaggaaugggaccuuuuuguugaacgcagcacagccuacagcaacuguuacccuuaugaugugccggauuaugccucccuuaggucacuaguugccucauccggcacacuggaguuuaacaaugaaagcuucaauuggacuggagucgcucagaauggaacaagcucugcuugcaaaaggagaucuauuaaaaguuucuuuaguagauugaauugguugcaccaauuaaaauacaaauauccagcacugaacgugacuaugccaaacaaugaaaaauuugacaaauuguacauuugggggguucaccacccgaguacggacagugaccaaaucagccuauaugcucaagcaucagggagagucacagucucuaccaaaagaagccaacaaacuguaaucccgaauaucggaucuggacccuggguaaggggugucuccagcagaauaagcaucuauuggacaauaguaaaaccgggagacauacuuuugauuaacagcacagggaaucuaauugcuccucgggguuacuucaaaauacgaaaugggaaaagcucaauaaugaggucaaauacacccauuggcaaaugcaauucugaaugcaucacuccaaauggaagcauucccaaugacaaaccauuucaaaauguaaacaggaucacauauggggccugucccagauauguuaagcaaaacacucugaaauuggcaacagggaugcggaauguaccagagaaacaaacuagaggcauauucggcgcaauugcggguuucauagaaaaugguugggaaggaaugguggacgguugguacgguuucaggcaucaaaauucugagggcacaggacaagcagcagaucuuaaaagcacucaagcugcaaucaaccaaaucaacgggaaacugaauagguuaaucgagaaaacaaacgagaaauuccaucaaauugaaaaagaauucucagaaguagaagggagaauucaggaccucgagaaauauguugaagacacuaaaauagaucucuggucguacaacgcggagcuucuuguugcccuggagaaccaacauacaauugaucuaacugacucagaaaugaacaaacuguuugaaagaacaaggaagcaacugagggaaaaugcugaggauaugggcaaugguuguuucaaaauauaccacaaaugugacaaugccugcauagggucaaucagaaauggaacuuaugaccaugauguauacagagacgaagcauuaaacaaccgguuccagaucaaagguguugagcugaagucaggauacaaagauuggauccuauggauuuccuuugccauaucauguuuuuugcuuuguguuguuuugcugggguucaucaugugggccugccaaaaaggcaacauuaggugcaacauuugcauuuga

SEQ ID NO: 33404 - RNA, 1701 nt, Artificial Sequence
  derived and/or modified CDS sequence (wt) from hemagglutinin__InfluenzaA__ABJ16785
augaagacuaucauugcuuugagcuacauuuuaugucugguuuucgcucaaaaacuucccggaaaugacaacagcacggcaacgcugugccuggggcaccaugcagugccaaacggaacgcuagugaaaacaaucacgaaugaccaaauugaagugacuaaugcuacugagcugguucagaguuccucaacagguggaauaugcgacaguccucaccaaauccuugauggagaaaacugcacacuaauagaugcucuauugggagacccucauugugauggcuuccaaaauaaggaaugggaccuuuuuguugaacgcagcaaagccuacagcaacuguuacccuuaugaugugccggauuaugccucccuuaggucacuaguugccucauccggcacacuggaguuuaacaaugaaagcuucaauuggacuggagucgcucagaauggaacaagcuaugcuugcaaaaggagaucuaauaaaaguuucuuuaguagauugaauugguugcaccaauuaaaauacaaauacccagcacugaacgugacuaugccaaacaaugaaaaauuugacaaauuguacauuugggggguucaccacccgaguacggacagugaccaaaucagccuauaugcucaagcaccagggagagucacagucucuaccaaaagaagccaacaaacuguaaucccgaauaucggaucuagacccuggguaaggggugucuccagcagaauaagcaucuauuggacaauaguaaaaccgggagacauacuuuugauuaacugcacagggaaucuaauugcuccucgggguuacuucaaaauacgaagugggaaaagcucaauaaugaggucagaugcauccauuggcaaaugcaauucugaaugcaucacuccaaauggaagcauucccaaugacaaaccauuucaaaauguaaacaggaucacauauggggccugucccagauauguuaagcaaaacacucugaaauuggcaacagggaugcggaauguaccagagaaacaaacuagaggcauauucggcgcaaucgcggguuucauagaaaaugguugggagggaaugguggacgguugguacgguuucaggcaucaaaauucugagggcacaggacaagcagcagaucucaaaagcacucaagcagcaaucaaccaaaucaacgggaaacugaauagguuaaucgagaaaacgaacgagaaauuccaucaaauugaaaaagaauucucagaaguggaagggagaauucaggaccucgagaaauauguugaggacacuaaaauagaucucuggucguacaacgcggagcuucuuguugcccuggagaaccagcauacaauugaucuaacugacucagaaaugaacaaacuguuugaaagaacaaagaagcaacugagggaaaaugcugaggauaugggcaaugguuguuucaaaauauaccacaaaugugacaaugccugcauagggucaaucagaaaugggacuuaugaccaugauguauacagagacgaagcauuaaacaaccgguuccagaucaaagguguugagcugaagucaggauacaaagauuggauccuauggauuuccuuugccauaucauguuuuuugcuuuguguugucuugcugggguucaucaugugggccugccaaaaaggcaacauuaggugcaacauuugcauuuga

SEQ ID NO: 33405 - RNA, 1701 nt, Artificial Sequence
  derived and/or modified CDS sequence (wt) from hemagglutinin__InfluenzaA__ABJ53438
augaaagcaaaacuacuaguccuguugugugcauuuacagcuacauaugcagacacaauauguauaggcuaccaugcgaacaacucaaccgacacuguugacacaguacuugagaagaacgugacagugacacacucugucaaccuacuugaggacagucacaacggaaaacuaugccgacuaaaaggaacagccccacuacaauuggguaauugcagcguugccggauggaucuuaggaaacccagaaugcgaaucacuguuuucuaaggaaucaugguccuacauugcagaaacaccaaacccugagaauggaacauguuacccaggguauuucgccgacuaugaggaacugagggagcaauugagcucaguaucaucauucgagagauucgaaauauuccccaaggaaagcucauggcccaaccacacaguaaccaaaggaguaacggcaucaugcucccauaaugggaaaagcaguuuuuacaaaaauuugcuauggcugacggaaaagaauggcuuguacccaaaucugagcaaguccuauguaaacaacaaggagaaagaaguccuuguacuaugggguguucaucacccgucuaacauaggggaccaaagggccaucuaucauacagaaaaugcuuaugucucuguggugucuucacauuauagcagaagauucaccccagaaauagcaaaaagacccaaaguaagagaucaagaagggagaauuaacuacuacuggacucugcuggaacccggggacacaauaauauuugaggcaaauggaaaucuaauagcgccaugguacgcuuucgcauugaguagaggcuuugggucaggaaucaucaccucaaacgcaucaaugggugacugugacgcuaagugucaaacaccccaaggagcuauaaacaguagucuuccuuuccagaauguacacccagucacaauaggagagugucccaaguaugucaggaguacaaaauuaaggaugguuacaggacuaagaaacaucccauccauucaaucuagagguuuguuuggagccauugccgguuucauugaagggggguggacuggaaugauagauggaugguaugguuaucaucaucagaaugaacaaggaucuggcuaugcugcagacaaaaaaagcacacaaaaugccauugaugggauuacaaacaaggugaauucuguaaucgagaaaaugaacacucaauucacagcuguaggcaaagaauucaacaaauuagagagaaggauggaaaacuuaaauaagaaaguugaugauggauuucuggacauuuggacauauaaugcagaguuguugguucuccuggaaaaugaaaggacuuuggauuuucaugacucaaaugugaagaaucuguaugagaaaguaaaaaaccaauugaagaauaaugccaaagaaaucgggaacggguguuuugaauucuaucacaaguguaacaaugaaugcauggaaagugugaaaaauggaacuuaugacuauccaaaauauuccgaagaaucaaaguuaaaaagggaaaaaauugauggagugaaauuggaaucaaugggagucuaucagauucuggcgaucuacucaacugucgccaguucacuggugcuuuuggucucccugggggcaaucaguuucuggauguguucuaaugggucuuugcaguguagaauaugcaucuga

SEQ ID NO: 33406 - RNA, 1698 nt, Artificial Sequence; identical to SEQ ID NO: 32754
  derived and/or modified CDS sequence (wt) from hemagglutinin__InfluenzaA__ABJ53449

SEQ ID NO: 33407 - RNA, 1701 nt, Artificial Sequence
  derived and/or modified CDS sequence (wt) from hemagglutinin__InfluenzaA__ABJ53471
augaagacuaucauugcuuugagcuacauucuaugucugguuuucgcucaaaaaauucccggaaaugacaacagcacggcaacgcugugccuugggcaccaugcaguaccaaacggaacgauagugaaaacaaucacgaaugaccaaauugaaguuacuaaugcuacugagcugguucagaguuccucaacagguggaauaugcgacaguccucaucagauccuugauggagaaaacugcacacuaauagaugcucuauugggagacccucagugugauggcuuccaaaauaagaaaugggaccuuuuuguugaacgcagcaaagccuacagcaacuguuacccuuaugaugugccggauuaugccucccuuaggucacuaguugccucauccggcacacuggaguuuaacaaugaaagcuucaauuggacuggagucacucaaaauggaacaagcucugcuugcaaaaggggaucuaauaacaguuucuuuaguagauugaauugguugacccacuuaaaauucaaauacccagcauugaacgugacuaugccaaacaaugaaaaauuugacaaauuguacauuugggggguucaccacccggguacggacaaugaccaaaucuuccuguaugcucaagcaucaggaagaaucacagucucuaccaaaagaagccaacaaacuguaaucccgaauaucggaucuagacccagaguaaggaauauccccagcagaauaagcaucuauuggacaauaguaaaaccgggagacauacuucugauuaacagcacagggaaucuaauugcuccuagggguuacuucaaaauacgaagugggaaaagcucaauaaugagaucagaugcacccauuggcaaaugcaauucugaaugcaucacuccaaauggaagcauucccaaugacaaaccauuucaaaauguaaacaggaucacauauggggccugucccagauauguuaagcaaaacacucugaaauuggcaacagggaugcgaaauguaccagagaaacaaacuagaggcauauuuggcgcaaucgcggguuucauagaaaaugguugggagggaaugguggaugguugguacgguuucaggcaucaaaauucugagggaauaggacaagcagcagaucucaaaagcacucaagcagcaaucaaucaaaucaaugggaagcugaauagguugaucgggaaaaccaacgagaaauuccaucagauugaaaaagaauucucagaaguagaagggagaauucaggaccucgagaaauauguugaggacacuaaaauagaucucuggucauacaacgcggagcuucuuguugcccuggagaaccaacauacaauugaucuaacugacucagaaaugaacaaacuguuugaaagaacaaagaagcaacugagggaaaaugcugaggauaugggcaaugguuguuucaaaauauaccacaaaugugacaaugccugcauaggaucaaucagaaauggaacuuaugaccaugauguguacagagaugaagcauuaaacaaccgguuccagaucaaaggcguugagcugaagucaggauacaaagauuggauccuauggauuuccuuugccauaucauguuuuuugcuuuguguugcuuuguugggguucaucaugugggccugccaaaaaggcaacauuaggugcaacauuugcauuuga

SEQ ID NO: 33408 - RNA, 1701 nt, Artificial Sequence
  derived and/or modified CDS sequence (wt) from hemagglutinin__InfluenzaA__ABJ53482
augaagacuaucauugcuuugagcuacauucuaugucugguuuucgcucaaaaacuucccggaaaugacaacagcacggcaacgcugugccucgggcaccaugcaguaccaaacggaacgauagugagaacaaucacgaaugaccaaauugaaguuacuaaugcuacugagcugguucagaguuccucaacaggugaaauaugcgacagcccucaucagauccuugauggagaaaacugcacacuaauagaugcucuauugggagacccucagugugauggcuuccaaaauaagaaaugggaccuuuuuguugaacgcagcaaagccuacagcaacuguuacccuuaugaugugccggauuaugccucccuuaggucacuaguugccucauccggcacacuggaguuuaacaaugagagcuucaauuggacuggagucacucaaaauggaacaagcucugcuugcaaaaggagaucuaauaacaguuucuuuaguagauugaauugguugacccacuuaaaauucaaauacccagcauugaacgugacuaugccaaacaaugaaaaauuugacaaauuguacauuugggggguucaccacccggguacggacaaugaccaaaucuuccuguaugcucaagcaucaggaagaaucacagucucuaccaaaaggagccaacaaacuguaaucccgaauaucggaucuagacccagaguaaggaauauccccagcagaauaagcaucuauuggacaauaguaaaaccgggagacauacuuuugauuaacagcacagggaaucuaauugcuccuagggguuacuucaaaauacgaagugggaaaagcucaauaaugagaucagaugcacccauuggcaaaugcaauucugaaugcaucacuccaaauggaagcauucccaaugacaaaccauuucaaaauguaaacaggaucacauauggggccugucccagauauguuaagcaaaacacucugaaauuggcaacagggaugcgaaauguaccagagaaacaaacuagaggcauauuuggcgcaaucgcggguuucauagaaaaugguugggagggaaugguggaugguugguacgguuucaggcaucaaaauucugagggaauaggacaagcagcagaucucaaaagcacucaagcagcaaucaaucaaaucaaugggaagcugaauagguugaucgggaaaaccaacgagaaauuccaucagauugaaaaagaauucucagaaguagaagggagaauucaggaccucgagaaauauguugaggacacuaaaauagaucucuggucauacaacgcggagcuucuuguugcccuggagaaccaacauacaauugaucuaacugacucagaaaugaacaaacuguuugaaagaacaaagaagcaacugagggaaaaugcugaggauaugggcaaugguuguuucaaaauauaccacaaaugugacaaugccugcauaggaucaaucagaaauggaacuuaugaccaugauguauacagagaugaagcauuaaacaaccgguuccagaucaaaggcguugagcugaagucaggauacaaagauuggauccuauggauuuccuuugccauaucauguuuuuugcuuuguguugcuuuguugggguucaucaugugggccugccaaaaaggcaacauuaggugcaacauuugcauuuga

SEQ ID NO: 33409 - RNA, 1698 nt, Artificial Sequence; identical to SEQ ID NO: 33244
  derived and/or modified CDS sequence (wt) from hemagglutinin__InfluenzaA__ABJ53493

SEQ ID NO: 33410 - RNA, 1698 nt, Artificial Sequence
  derived and/or modified CDS sequence (wt) from hemagglutinin__InfluenzaA__ABJ53504
augaaagcaaaacuacuaguccuguuauguacauuuacagcuacauaugcagacacaauauguauaggcuaccaugccaacaacucaaccgacacuguugacacaguacuugagaagaaugugacagugacacacucugucaaccuacuugaggacagucacaauggaaaacuaugucuacuaaaaggaauagccccacuacaauuggguaauugcagcguugccggauggaucuuaggaaacccagaaugcgaaucacugauuucuaaggaaucaugguccuacauuguagagacaccaaacccugagaauggaacauguuacccaggguauuucgccgacuaugaggaacugagggagcaauugaguucaguaucuucauuugagagguucgaaauauuccccaaagaaagcucauggcccaaccacaccguaaccggaguaucggcaucaugcucccauaaugggaaaagcaguuuuuacagaaauuugcuauggcugacggagaagaauggcuuguacccaaaucugagcaaguccuauguaaacaacaaggagaaagaaguccuuguacuaugggguguucaucacccgucuaacauagggguccaaagggccaucuaucauacagaaaaugcuuaugucucuguagugucuucacauuauagcagaagauucaccccagaaauagcaaaaagacccaaaguaagagaucaggaaggaagaaucaacuacuacuggacucugcuggaacccggggacacaauaauauuugaggcaaauggaaaucuaauagcgccaugguaugcuuucgcacugaguagaggcuuugagucaggaaucaucaccucaaaugcaccaaugaaugaaugugaugcaaagugucaaacaccucugggagcuauaaacaguagucuuccuuuccagaauguacacccagucacaauaggagaguguccaaaguaugucaggagugcaaaauuaaggaugguuacaggacuaaggaacaucccauccauucaauccagagguuuguuuggagccauugccgguuucauugaagggggguggacuggaaugauagaugggugguaugguuaucaucaucagaaugagcaaggaucuggcuaugcugcagaucaaaaaagcacacaaaaugccauuaacgggauuacaaacaaggugaauucuguaauugagaaaaugaacacucaauucacagcugugggcaaagaauucaacaaauuagaaagaaggauggaaaacuuaaauaaaaaaguugaugauggauuucuagacauuuggacauauaaugcagaauuguugguucuacuggaaaaugaaaggacuuuggauuuccaugacucaaaugugaagaaucuguaugagaaaguaaaaagccaauuaaagaauaaugccaaagaaauaggaaacggguguuuugaauucuaucacaaguguaacaaugaaugcauggaaagugugaaaaauggaacuuaugacuauccaaaauauuccgaagaaucaaaguuaaacagggagaaaauugauggagugaaauuggaaucaaugggagucuaucagauucuggcgaucuacucaacugucgccaguucacugguucuuuuagucucccugggggcaaucagcuucuggauguguuccaaugggucuuugcaguguagaauaugcaucuga

SEQ ID NO: 33411 - RNA, 1701 nt, Artificial Sequence
  derived and/or modified CDS sequence (wt) from hemagglutinin__InfluenzaA__ABJ53515
augaaagcaaaacuacuaguucuguugugugcauuuacagcuacauaugcagacacaauauguauaggcuaccaugcgaacaacucaacugacacuguugacacaguacuugagaagaacgugacagugacacacucugucaaccuacuugaggacagucacaacggaaaacuaugccgacuaaaaggaacagccccacuacaauuggguaauugcagcauugccggauggaucuuaggaaauccagaaugcgaaucacuguuuucuaaggaaucauggucuuacauugcagaaacaccaaacccuaaaaauggaacauguuacccaggguauuucgccgacuaugaggaacugagggagcaauugagcucaguaucaucauucgagagauuugaaauauuccccaaggauagcucauggcccaaccacacuguaaccaaaggagugacggcaucaugcucccauaaugggaaaagcagcuuuuacaaaaauuugcuauggcugacggagaagaauggcuuguacccaaaucugagcaaguccuauguaaacaaaaagggaaaagaaguccuugugcuaugggguguucaucacccgucuaacaugggggaccaacgggccaucuaucauaaagaaaaugcuuauguuucuguguugucuucacauuauagcagaagauucaccccagaaauagcaagaagacccaaaguaagagaucaagaagggagaauuaacuacuacuggacucugcuggaacccggggacacaauaauauuugaggcaaauggaaaucuaauagcgccgugguacgcuuucgcacugaguagaggcuuugggucaggaaucaucaucucaaacgcaucaaugggugaaugugacgcuaagugucaaacaccccaaggagcuauaaacaguagucuccccuuccagaauguacacccagucacaauaggagaguguccaaaguaugucaggaguacaaaauuaaggaugguuacaggacuaaggaacgucccauccauucaauccagagguuuguuuggagccauugccgguuucauugaaggaggguggacuggaaugauagauggaugguaugguuaucaucaucaaaaugaacaaggaucuggcuaugcugcggaccaaaaaagcacacaaaaugccauuaaugggauuacaaacaaggugaauucuauaaucgagaaaaugaacacacaauucacagcuguaggcaaagaauucaacaaauuagaaagaaggauggaaaacuuaaauaagaaaguugaugauggauuucuggacauuuggacauauaaugcagaauuguuaguucuccuggaaaaugaaaggacuuuggauuuucaugacucaaaugugaagaaccuguaugagaaagugaaaaaccaauugaagaauaaugccaaagaaauagggaacggguguuuugaauucuaucacaaguguaacaaugaaugcauggaaagugugaaaaauggaacuuaugacuauccaaaauauuccaaagaaucaaaguuaaacagggaaaaaauugauggagugaaauuggaaucaaugggagucuaucagauucuggcgaucuacucaacugucgccaguucgcuggugcuuuuggucucccugggggcaaucagcuucuggauguguucuaaugggucuuugcaguguagaauaugcaucuga

SEQ ID NO: 33412 - RNA, 1701 nt, Artificial Sequence
  derived and/or modified CDS sequence (wt) from hemagglutinin__InfluenzaA__ABK39962
augaagacuaucauugcuuugagcuacauuuuaugccugguuuucgcucaaaaacuucccggaaaugacaacagcacggcaacgcugugccuggggcaccaugcagugccaaacggaacgcuagugaaaacaaucacgaaugaccaaauugaaguaacuaaugcuacugagcugguucagaguuccucaacagguagaauaugcgacaguccucaccaaauccuugauggagaaaacugcacacuaauagaugcucuauugggagacccucauugugauggcuuccaaaauaaggaaugggaccuuuuuguugaacgcagcaaagccuacagcaacuguuacccuuaugaugugccggauuaugucucccuuaggucacuaguugccucaucaggcacgcuggaguuuaacaaugaaagcuucaauuggacuggagucgcucagaauggaacaagcucugcuugcaaaaggagaucugauaaaaguuucuuuaguagauugaauugguugcaccaauuaaaauacaaauauccagcacugaacgugacuaugccaaacaaugaaaaauuugacaaauuguacauuugggggguccaccacccggguacagacagugaccaaaucagccuauaugcucaagcaucagggagagucacagucucuaccaaaagaagccaacaaacuguaaucccgaauaucggaucuagacccuggguaaggggugucuccagcagaauaagcaucuauuggacaauaguaaaaccgggagacauacuuuugauuaacagcacagggaaucuaauugcuccucgggguuacuucaaaauacgaagugggaaaagcucaauaaugaggucagaugcacccauuggcaaaugcaauucugaaugcaucacuccaaauggaagcauucccaaugacaaaccauuucaaaauguaaacaggaucacauauggggccugucccagauauguuaagcaaaaaacucugaaauuggcaacagggaugcggaaugugccagagaaacaaacuagaggcauauucggugcaaucgcgggcuucauagaaaaugguugggagggaaugauggacgguugguacgguuucaggcaucaaaauucugagggcacagggcaagcagcagaucuuaaaagcacucaagcagcaaucaaccaaaucaacgggaaacugaauagguugauugagaaaacgaacgagaaauuccaucaaauugaaaaagaauucucagaaguagaagggagaauucaggaccucgagaaauaugucgaggacacuaaaauagaucucuggucguacaaugcggagcuucuuguugcccuggagaaccaacauacaauugaucuaacugacucagaaaugaacaaacuguuugaaagaacaaagaagcaacugagggaaaaugcugaggauaugggcaaugguuguuucaaaauauaccacaaaugugacaaugccugcauagggucaaucagaaauggaacuuaugaccaugauguauacagagacgaagcauugaacaaccgguuccagaucaaagguguugagcugaagucaggauacaaagauuggauccuauggauuuccuuugccauaucauguuuuuugcuuuguauuguuuuacugggguucaucaugugggccugccaaaaaggcaacauuaggugcaacauuugcauuuga

SEQ ID NO: 33413 - RNA, 1701 nt, Artificial Sequence
  derived and/or modified CDS sequence (wt) from hemagglutinin__InfluenzaA__ABK39973
augaagacuaucauugcuuugagcuacauucuaugucugguuuucgcucaaaaacuucccggaaaugacaacagcacggcaacgcugugccuugggcaccaugcaguaccaaacggaacgauagugaaaacaaucacgaaugaccaaauugaaguuacuaaugcuacugagcugguucagaguuccucaacagguggaauaugcgacaguccucaucagauccuugauggagaaaacugcacacuaauagaugcucuauugggagacccucagugugauggcuuccaaaauaagaaaugggaccuuuuuguugaacgcagcaaagccuacagcaacuguuacccuuaugaugugccggauuaugccucccuuaggucacuaguugccucauccggcacacuggaguuuaacaaugaaagcuucaauuggacuggagucacucaaaauggaacaagcucugcuugcaaaaggagaucuaauaacaguuucuuuaguagauugaauugguugacccacuuaaaauucaaauacccagcauugaacgugacuaugccaaacaaugaaaaauuugacaaauuguacauuugggggguucaccacccggguacggacaaugaccaaaucuuccuguaugcucaagcaucaggaagaaucacagucucuaccaaaagaagccaacaaacuguaaucccgaauaucggaucuagacccagaguaaggaauauccccagcagaauaagcaucuauuggacaauaguaaaaccgggagacauacuuuugauuaacagcacagggaaucuaauugcuccuagggguuacuucaaaauacgaagugggaaaagcucaauaaugagaucagaugcacccauuggcaaaugcaauucugaaugcaucacuccaaauggaagcauucccaaugacaaaccauuucaaaauguaaacaggaucacauauggggccugucccagauauguuaagcaaaacacucugaaauuggcaacagggaugcgaaauguaccagagaaacaaacuagaggcauauuuggcgcaaucgcggguuucauagaaaaugguugggagggaaugguggaugguugguacgguuucaggcaucaaaauucugagggaauaggacaagcagcagaucucaaaagcacucaagcagcaaucaaucaaaucaaugggaagcugaauagguugaucgggaaaaccaacgagaaauuccaucagauugaaaaagaauucucagaaguagaagggagaauucaggaccucgagaaauauguugaggacacuaaaauagaucucuggucauacaacgcggagcuucuuguugcccuggagaaccaacauacaauugaucuaacugacucagaaaugaacaaacuguuugaaagaacaaagaagcaacugagggaaaaugcugaggauaugggcaaugguuguuucaaaauauaucacaaaugugacaaugccugcauaggaucaaucagaaauggaacuuaugaccaugauguauacagagaugaagcauuaaacaaccgguuccagaucaaaggcguugagcugaagucaggauacaaagauuggauccuauggauuuccuuugccauaucauguuuuuugcuuuguguugcuuuguugggguucaucaugugggccugccaaaaaggcaacauuaggugcaacauuugcauuuga

SEQ ID NO: 33414 - RNA, 1701 nt, Artificial Sequence
  derived and/or modified CDS sequence (wt) from hemagglutinin__InfluenzaA__ABK39984
augaagacuaucauugcuuugagcuacauucuaugucugguuuucgcucaaaaacuucccggaaaugacaacagcagggcaacgcugugccuugggcaccaugcaguaccaaacggaacgauagugaaaacaaucacgaaugaccaaauugaaguuacuaaugcuacugagcugguucagaguuccucaacagguggaauaugcgacaguccucaucagauccuugauggagaaaacugcacacuaauagaugcucuauugggagacccucagugugauggcuuccaaaauaagaaaugggaccuuuuuguugaacgcagcaaagccuacagcaacuguuacccuuaugaugugccggauuaugccucccuuaggucacuaguugccucauccggcacacuggaguuuaacaaugaaagcuucaauuggacuggagucacucaaaauggaacaagcucugcuugcaaaaggagaucuaauaacaguuucuuuaguagauugaauugguugacccacuuaaaauucaaauacccagcauugaacgugacuaugccaaacaaugaaaaauuugacaaauuguacauuugggggguucaccacccggguacggacaaugaccaaaucuuccuguaugcucaagcaucaggaagaaucacagucucuaccaaaagaagccaacaaacuguaaucccgaauaucggaucuagacccagaguaaggaauauccccagcagaauaagcaucuauuggacaauaguaaaaccgggagacauacuuuugauuaacagcacagggaaucuaauugcuccuagggguuacuucaaaauacgaagugggaaaagcucaauaaugagaucagaugcaccuauuggcaaaugcaacucugaaugcaucacuccaaauggaagcauucccaaugacaaaccauuucaaaauguaaacaggaucacauauggggccugucccagauauguuaagcaaaacacucugaaauuggcaacagggaugcgaaauguaccagagaaacaaacuagaggcauauuuggcgcaaucgcggguuucauagaaaaugguugggagggaaugguggaugguugguacgguuucaggcaucaaaauucugagggaauaggacaagcagcagaucucaaaagcacucaagcagcaaucgaucaaaucaaugggaagcugaauagguugaucgggaaaaccaacgagaaauuccaucagauugaaaaagaauucucagaaguagaagggagaauucaggaccucgagaaauauguugaggacacuaaaauagaucucuggucauacaacgcggagcuucuuguugcccuggagaaccaacauacaauugaucuaacugacucagaaaugaacaaacuguuugaaagaacaaagaagcaacugagggaaaaugcugaggauaugggcaaugguuguuucaaaauauaccacaaaugugacaaugccugcauaggaucaaucagaaauggaacuuaugaccaugauguauacagagaugaagcauuaaacaaccgguuccagaucaagggcguugagcugaagucaggauacaaagauuggauccuauggauuuccuuugccauaucauguuuuuugcuuuguguugcuuuguugggguucaucaugugggccugccaaaaaggcaacauuaggugcaacauuugcauuuga

SEQ ID NO: 33415 - RNA, 1698 nt, Artificial Sequence
  derived and/or modified CDS sequence (wt) from hemagglutinin__InfluenzaA__ABK39995
augaaaguaaaacuacugauccuguuauguacauuuacagcuacauaugcagacacaauauguauaggcuaccaugccaacaacucaaccgacacuguugacacaguacuugagaagaaugugacagugacacacucugucaaccuacuugaggacagucacaauggaaaacugugccuacuaaaaggaauagccccccuacaauuggguaauugcagcguugccggauggaucuuaggaaacccagaaugcgaauuacugauuuccaaggaaucaugguccuacauuguagaaacaccaaauccugagaauggagcauguuacccaggguauuucgccgacuaugaggagcuaagggagcaauugaguucaguauauucauuugagagauucgaaauauuccccaaagaaagcucauggcccaaccacaccguaaccggaguaucagcaucaugcucccauaaugggaaaagcaguuuuuacagaaauuugcuauggcugacggggaagaaugguuuguacccaaaccugagcaaguccuaugcaaacaacaaagagaaagaaguccuuauacuaugggguguucaucacccgccuaacauagggaaccaaaggacccucuaucacacagaaaaugcuuaugucucuguagugucuucacauuauagcagaagauucaccccagaaauaaccaaaaggcccaaaguaagagaucaggaaggaagaaucaacuacuacuggacucugcuggaacccggggauacaauaauauuugaggcaaauggaaaucuaauagcgccaugguaugcuuucgcacugaguagaggcuuuggaucaggaaucaucaccucaaaugcaccaauggaugaaugugaugcgaagugucaaacaccucagggagcuauaaacagcagucuuccuuuccagaauguacacccagucacaauaggagaguguccaaaguaugucaggagugcaaaauuaaggaugguuacaggacuaaggaacaucccauccauucaauccagagguuuguuuggagccauugccgguuucauugaagggggguggacuggaaugguagaugggugguaugguuaucaucaucagaaugagcaaggaucuggcuaugcugcagaucaaaaaagcacacaaaaugccauuaacgggauuacaaacaaggugaauucuguaauugagaaaaugaacacucaauucacagcugugggcaaagaauucaacaaauuggaaagaaggauggaaaacuuaaauaaaaagguugaugauggguuucuagacauuuggacauauaaugcagaauuguugguucuacuggaaaaugaaaggacuuuggauuuccacgacuccaaugugaagaaucuguacgagaaaguaaaaagccaauuaaagaauaaugccaaagaaauaggaaauggguguuuugaauucuaucacaaguguaacaaugaaugcauggagagugugaaaaauggaacuuaugacuauccaaaauauuccgaagaaucaaaguuaaacagggaaaaaauugauggagugaaauuggacucaaugggggucuaucagauucuggcgaucuacucaacugucgccaguucccugguucuuuuggucucccugggggcaaucagcuucuggauguguuccaaugggucuuugcaguguagaauaugcaucuga

SEQ ID NO: 33416 - RNA, 1701 nt, Artificial Sequence
  derived and/or modified CDS sequence (wt) from hemagglutinin__InfluenzaA__ABK40017
augaagacuaucauugcuuugagcuacauucuaugucugguuuucgcucaaaaacuucccggaaaugacaacagcacggcaacgcugugccuugggcaccaugcaguaccaaacggaacgauagugaaaacaaucacgaaugaccaaauugaaguuacuaaugcuacugagcugguucagaguuccucaacagguggaauaugcgacaguccucaucagauccuugauggagaaaacugcacacuaauagaugcucuauugggagacccucagugugauggcuuccaaaauaagaaaugggaccuuuuuguugaacgcagcaaagccuacagcaacuguuacccuuaugaugugccggauuaugccucccuuaggucacuaguugccucauccggcacacuggaguuuaacaaugaaagcuucaauuggacuggagucacucaaaauggaacaagcucugcuugcaaaaggagaucuaauaacaguuucuuuaguagauugaauugguugacccacuuaaaauucaaauacccagcauugaacgugacuaugccaaacaauaaaaaauuugacaaacuguacauuugggggguucaccacccggguacggacaaugaccaaaucagccuauaugcucaagcaucaggaagaaucacagucucuaccaaaagaagccaacaaacuguaaucccgaauaucggaucuagacccaggguaagggauauccccagcagaauaagcaucuauuggacaauaguaaaaccgggagacauacuuuugauuaacagcacagggaaucuaauugcuccucgggguuacuucaaaauacgaagugggaaaagcucaauaaugagaucagaugcacccauuggcaaaugcaauucugaaugcaucacuccaaauggaagcauucccaaugacaaaccauuucaaaauguaaacaggaucacauauggggccugucccagauauguuaagcaaaacacucugaaauuggcaacagggaugcgaaauguaccagagaaacaaacuagaggcauauuuggcgcaaucgcggguuucauagaaaaugguugggagggaaugguggaugguugguacgguuucaggcaucaaaauucugagggaauaggacaagcagcagaucucaaaagcacucaagcagcaaucaaccaaaucaaugggaagcugaauagguugaucgggaaaaccaacgagaaauuccaucagauugaaaaagaauucucagaaguagaagggagaauucaggaccucgagaaauauguugaggacacuaaaauagaucucuggucauacaacgcggagcuucuuguugcccuggagaaccaacauacaauugaucuaacugacucagaaaugaacaaacuguuugaaagaacaaagaagcaacugagggaaaaugcugaggauaugggcaaugguuguuucaaaauauaccacaaaugugacaaugccugcauagggucaaucagaaauggaacuuaugaccaugauguauacagagaugaagcauuaaacaaccgguuccagaucaaagguguugagcugaagucaggauacaaagauuggauccuauggauuuccuuugccauaucauguuuuuugcuuuguguugcuuuguugggguucaucaugugggccugccaaaaaggcaacauuaggugcaacauuugcauuuga

SEQ ID NO: 33417 - RNA, 1701 nt, Artificial Sequence
  derived and/or modified CDS sequence (wt) from hemagglutinin__InfluenzaA__ABK40028
augaaagcaaaacuacuaguucuguugugugcauuuacagcuacauaugcagacacaauauguauaggcuaccaugcgaacaacucaacugacacuguugacacaguacuugagaagaacgugacagugacacacucugucaaccuacuugaggacagucacaacggaaaacuaugccgacuaaaaggaacagccccacuacaauuggguaauugcagcauugccggauggaucuuaggaaauccagaaugcgaaucacuguuuucuaaggaaucauggucuuacauugcagaaacaccaaacccuaaaaauggaacauguuacccaggguauuucgccgacuaugaggaacugagggagcaauugagcucaguaucaucauucgagagauuugaaauauuccccaaggauagcucauggcccaaccacacuguaaccaaaggagugacggcaucaugcucccauaaugggaaaagcagcuuuuacaaaaauuugcuauggcugacggagaagaauggcuuguacccaaaucugagcaaguccuauguaaacaaaaagggaaaagaaguccuugugcuaugggguguucaucacccgucuaacaugggggaccaacgggccaucuaucauaaagaaaaugcuuauguuacuguguugucuucacauuauagcagaagauucaccccagaaauagcaagaagaccaaaaguaagagaucaagaagggagaauuaacuacuacuggacucugcuggaacccggggacacaauaauauuugaggcaaauggaaaucuaauagcgccgugguacgcuuucgcacugaguagaggcuuugggucaggaaucaucaucucaaacgcaucaaugggugaaugugacgcuaagugucaaacaccccaaggagcuauaaacaguagucuccccuuccagaauguacacccagucacaauaggagaguguccaaaguaugucaggaguacaaaauuaaggaugguuacaggacuaaggaacgucccauccauucaauccagagguuuguuuggagccauugccgguuucauugaaggaggguggacuggaaugauagauggaugguaugguuaucaucaucaaaaugaacaaggaucuggcuaugcugcggaccaaaaaagcacacaaaaugccauuaaugggauuacaaacaaggugaauucuauaaucgagaaaaugaacacucaauucacagcuguaggcaaagaauucaacaaauuagaaagaaggauggaaaacuuaaauaagaaaguugaugauggauuucuggacauuuggacauauaaugcagaauuguuaguucuccuggaaaaugaaaggacuuuggauuuucaugacucaaaugugaagaaccuguaugagaaagugaaaaaccaauugaagaauaaugccaaagaaauagggaacggguguuuugaauucuaucacaaguguaacaaugaaugcauggaaagugugaaaaauggaacuuaugacuauccaaaauauuccaaagaaucaaaguuaaacagggaaaaaauugauggagugaaauuggaaucaaugggagucuaucagauucuggcgaucuacucaacugucgccaguucgcuggugcuuuuggucucccugggggcaaucagcuucuggauguguucuaaugggucuuugcaguguagaauaugcaucuga

SEQ ID NO: 33418 - RNA, 1701 nt, Artificial Sequence
  derived and/or modified CDS sequence (wt) from hemagglutinin__InfluenzaA__ABK40039
augaaagcaaaacuacuaguucuguugugugcauuuacagcuacauaugcagacacaauauguauaggcuaccaugcgaacaacucaacugacacuguugacacaguacuugagaagaacgugacagugacacacucugucaaccuacuugaggacagucacaacggaaaacuaugccgacuaaaaggaacagccccacuacaauuggguaauugcagcauugccggauggaucuuaggaaauccagaaugcgaaucacuguuuucuaaggaaucauggucuuacauugcagaaacaccaaacccuaaaaauggaacauguuacccaggguauuucgccgacuaugaggaacugagggagcaauugagcucaguaucaucauucgagagauuugaaauauuccccaaggauagcucauggcccaaccacacuguaaccaaaggagugacggcaucaugcucccauaaugggaaaagcagcuuuuacaaaaauuugcuauggcugacggagaagaauggcuuguacccaaaucugagcaaguccuauguaaacaaaaagggaaaagaaguccuugugcuaugggguguucaucacccgucuaacaugggggaccaacgggccaucuaucauaaagaaaaugcuuauguuucuguguugucuucacauuauagcagaagauucaccccagaaauagcaagaagacccaaaguaagagaucaagaagggagaauuaacuacuacuggacucugcuggaacccggggacacaauaauauuugaggcaaauggaaaucuaauagcgccgugguacgcuuucgcacugaguagaggcuuugggucaggaaucaucaucucaaacgcaucaaugggugaaugugacgcuaagugucaaacaccccaaggagcuauaaacaguagucuccccuuccagaauguacacccagucacaauaggagaguguccaaaguaugucaggaguacaaaauuaaggaugguuacaggacuaaggaacgucccauccauucaauccagagguuuguuuggagccauugccgguuucauugaaggaggguggacuggaaugauagauggaugguaugguuaucaucaucaaaaugaacaaggaucuggcuaugcugcggaccaaaaaagcacacaaaaugccauuaaugggauuacaaacaaggugaauucuauaaucgagaaaaugaacacucaauucacagcuguaggcaaagaauucaacaaauuagaaagaaggauggaaaacuuaaauaagaaaguugaugauggauuucuggacauuuggacauauaaugcagaauuguuaguucuccuggaaaaugaaaggacuuuggauuuucaugacucaaaugugaagaaccuguaugagaaagugaaaaaccaauugaagaauaaugccaaagaaauagggaacggguguuuugaauucuaucacaaguguaacaaugaaugcauggaaagugugaaaaauggaacuuaugacuauccaaaauauuccaaagaaucaaaguuaaacagggaaaaaauugauggagugaaauuggaaucaaugggagucuaucagauucuggcgaucuacucaacugucgccaguucgcuggugcuuuuggucucccugggggcaaucagcuucuggauguguucuaaugggucuuugcaguguagaauaugcaucuga

SEQ ID NO: 33419 - RNA, 1701 nt, Artificial Sequence; identical to SEQ ID NO: 33399
  derived and/or modified CDS sequence (wt) from hemagglutinin__InfluenzaA__ABK40050

SEQ ID NO: 33420 - RNA, 1701 nt, Artificial Sequence; identical to SEQ ID NO: 32662
  derived and/or modified CDS sequence (wt) from hemagglutinin__InfluenzaA__ABK40061

SEQ ID NO: 33421 - RNA, 1701 nt, Artificial Sequence; identical to SEQ ID NO: 32662
  derived and/or modified CDS sequence (wt) from hemagglutinin__InfluenzaA__ABK40075

SEQ ID NO: 33422 - RNA, 1701 nt, Artificial Sequence; identical to SEQ ID NO: 32933
  derived and/or modified CDS sequence (wt) from hemagglutinin__InfluenzaA__ABK40510

SEQ ID NO: 33423 - RNA, 1701 nt, Artificial Sequence; identical to SEQ ID NO: 32933
  derived and/or modified CDS sequence (wt) from hemagglutinin__InfluenzaA__ABK40534

SEQ ID NO: 33424 - RNA, 1701 nt, Artificial Sequence
  derived and/or modified CDS sequence (wt) from hemagglutinin__InfluenzaA__ABK40546
augaaagcaaaacuacugguccuguuaugugcacuuucagcuacagaugcagacacaauauguauaggcuaccaugcgaacaacucaaccgacacuguugacacaguacucgaaaagaacgugacagugacacacucugucaaccuacuugaggacaaucacaacggaaaacuaugcaaacuaaaaggaauagccccacuacaauuggggaaaugcagcauugccggauggaucuuaggaaacccagaaugcgaaucacuguuuucuaauaaaucaugguccuacauugcagaaacaccaaacuccgagaauggaacauguuacccaggguauuucgccgacuaugaggaacugagggaacaauugaguucaguaucaucauucgagagauucgaaauauuccccaaggaaaguucauggcccaaacacaacguaaccaaaggaguaacggcaucaugcucccauaaggggaaaagcaguuuuuacagaaauuugcuauggcugacggagaaaaauggcucguacccaaaucugagcaaguccuaugugaacaacaaagagaaagaaguccuuguacuaugggguguucaucacccgucuaacauagaggaccaaaagaccaucuaucguaaagaaaaugcuuaugucucuguagugucuucacauuauaacaggagauucaccccagaaauagcaaaaagacccaaaguaagaaaucaagaagggagaauuaacuacuacuggacucugcuggaacccggggacacaauaauauuugaggcaaauggaaaucuaauagcgccaugguaugcuuucgcauugaguagaggcuuugggucaggaaucaucaccucaaacgcaucgauggaugaaugugacgcgaagugucaaacaccccagggagcuauaaacaguagucuuccuuuucagaauguacacccagucacaauaggagagugcccaaaguacgucaggaguacaaaauuaaggaugguuacaggacuaaggaacaucccauccauucaauccagagguuuguuuggagccauugccgguuucauugaagggggauggacuggaaugauugauggaugguaugguuaucaucaucagaaugaacagggaucuggcuaugcugcggaucaaaaaagcacacaaaaugccauuaacgggauuacaaacaaggugaacucuauaaucgagaaaaugaacacucaauucacagcuguggguaaagaauucaacaaacuagaaaaaaggauggaaaacuuaaauaaaaaaguugaugauggauuucuggacauuuggacauauaaugcagaauuguugguucuacuggaaaaugaaaggacuuuggauuuccaugacucaaaugugaagaaccuguaugagaaaguaaaaagccaauuaaagaauaaugccaaagaaauaggaaacggguguuuugaauucuaccacaaguguaacaaugaaugcauggaaaguguaaaaaaugggacuuaugacuauccaaaauauucagaagaaucaaaguuaaacagggaaaaaauugauggagugaaauuggaaucaaugggagucuaucagauucuggcgaucuacucaacugucgccaguucacuggugcuuuuggucucccugggggcaaucagcuucuggauguguucuaaugggucuuugcagugcagaauaugcaucuga

SEQ ID NO: 33425 - RNA, 1701 nt, Artificial Sequence; identical to SEQ ID NO: 32933
  derived and/or modified CDS sequence (wt) from hemagglutinin__InfluenzaA__ABK40557

SEQ ID NO: 33426 - RNA, 1701 nt, Artificial Sequence; identical to SEQ ID NO: 32933
  derived and/or modified CDS sequence (wt) from hemagglutinin__InfluenzaA__ABK40568

SEQ ID NO: 33427 - RNA, 1701 nt, Artificial Sequence
  derived and/or modified CDS sequence (wt) from hemagglutinin__InfluenzaA__ABK40579
augaaagcaaaacuacugguccuguuaugugcacuuucagcuacagaugcagacacaauauguauaggcuaccaugcgaacaacucaaccgacacuguugacacaguacucgaaaagaacgugacagugacacacucugucaaccuacuugaggacaaucacaacggaaaacuaugcaaacuaaaaggaauagccccacuacaauuggggaaaugcagcauugccggauggaucuuaggaaacccagaaugcgaaucacuguuuucuaagaaaucaugguccuacauugcagaaacaccaaacuccgagaauggaacauguuacccaggguauuucgccgacuaugaggaacugagggaacaauugaguucaguaucaucauucgagagauucgaaauauuccccaaggaaaguucauggcccaaacacaacguaaccaaaggaguaacggcaucaugcucccauaaggggaaaagcaguuuuuacagaaauuugcuauggcugacggagaaaaauggcucguacccaaaucugagcaaguccuaugugaacaacaaagagaaagaaguccuuguacuaugggguguucaucacccgucuaacauagaggaccaaaagaccaucuaucguaaagaaaaugcuuaugucucuguagugucuucacauuauaacaggagauucaccccagaaauagcaaaaagacccaaaguaagaaaucaagaagggagaauuaacuacuacuggacucugcuggaacccggggacacaauaauauuugaggcaaauggaaaucuaauagcgccaugguaugcuuucgcauugaguagaggcuuugggucaggaaucaucaccucaaacgcaucgauggaugaaugugacgcgaagugucaaacaccccagggagcuauaaacaguagucuuccuuuucagaauguacacccagucacaauaggagagugcccaaaguacgucaggaguacaaaauuaaggaugguuacaggacuaaggaacaucccauccauucaauccagagguuuguuuggagccauugccgguuucauugaagggggauggacugggaugauugauggaugguaugguuaucaucaucagaaugaacagggaucuggcuaugcugcggaucaaaaaagcacacaaaaugccauuaacgggauuacaaacaaggugaacucuauaaucgagaaaaugaacacucaauucacagcuguggguaaagaauucaacaaacuagaaaaaaggauggaaaacuuaaauaaaaaaguugaugauggauuucuggacauuuggacauauaaugcagaauuguugguucuacuggaaaaugaaaggacuuuggauuuccaugacucaaaugugaagaaccuguaugagaaaguaaaaagccaauuaaagaauaaugccaaagaaauaggaaacggguguuuugaauucuaccacaaguguaacaaugaaugcauggaaaguguaaaaaaugggacuuaugacuauccaaaauauucagaagaaucaaaguuaaacagggaaaaaauugauggagugaaauuggaaucaaugggagucuaucagauucuggcgaucuacucaacugucgccaguucacuggugcuuuuggucucccugggggcaaucagcuucuggauguguucuaaugggucuuugcagugcagaauaugcaucuga

SEQ ID NO: 33428 - RNA, 1701 nt, Artificial Sequence
  derived and/or modified CDS sequence (wt) from hemagglutinin__InfluenzaA__ABK40590
augaaagcaaaacuacugguccuguuaugugcacuuucagcuacagaugcagacacaauauguauaggcuaccaugcgaacaacucaaccgacacuguugacacaguacucgaaaagaacgugacagugacacacucugucaaccuacuugaggacaaucacaacggaaaacuaugcaaacuaaaaggaauagccccacuacaauuggggaaaugcagcauugccggauggaucuuaggaaacccagaaugcgaaucacuguuuucuaagaaaucaugguccuacauugcagaaacaccaaacuccgagaauggaacauguuacccaggguauuucgccgacuaugaggaacugagggaacaauugaguucaguaucaucauucgagagauucgaaauauuccccaaggaaaguucauggcccaaacacaacguaaccaaaggaguaacggcaucaugcucccauaaggggaaaagcaguuuuuacagaaauuugcuauggcugacggagaaaaauggcucguacccaaaucugagcaaguccuaugugaacaacaaagagaaagaaguccucguacuaugggguguucaucacccgucuaacauagaggaccaaaagaccaucuaucguaaagaaaaugcuuaugucucuguagugucuucacauuauaacaggagauucaccccagaaauagcaaaaagacccaaaguaagaaaucaagaagggagaauuaacuacuacuggacucugcuggaacccggggacacaauaauauuugaggcaaauggaaaucuaauagcgccaugguaugcuuucgcauugaguagaggcuuugggucaggaaucaucaccucaaacgcaucgauggaugaaugugacgcgaagugucaaacaccccagggagcuauaaacaguagucuuccuuuucagaauguacacccagucacaauaggagagugcccaaaguacgucaggaguacaaaauuaaggaugguuacaggacuaaggaacaucccauccauucaauccagagguuuguuuggagccauugccgguuucauugaagggggauggacuggaaugauugauggaugguaugguuaucaucaucagaaugaacagggaucuggcuaugcugcggaucaaaaaagcacacaaaaugccauuaacgggauuacaaacaaggugaacucuauaaucgagaaaaugaacacucaauucacagcuguggguaaagaauucaacaaacuagaaaaaaggauggaaaacuuaaauaaaaaaguugaugauggauuucuggacauuuggacauauaaugcagaauuguugguucuacuggaaaaugaaaggacuuuggauuuccaugacucaaaugugaagaaccuguaugagaaaguaaaaaaccaauuaaagaauaaugccaaagaaauaggaaacggguguuuugaauucuaccacaaguguaacaaugaaugcauggaaaguguaaaaaaugggacuuaugacuauccaaaauauucagaagaaucaaaguuaaacagggaaaaaauugauggagugaaauuggaaucaaugggagucuaucagauucuggcgaucuacucaacugucgccaguucacuggugcuuuuggucucccugggggcaaucagcuucuggauguguucuaaugggucuuugcagugcagaauaugcaucuga

SEQ ID NO: 33429 - RNA, 1701 nt, Artificial Sequence
  derived and/or modified CDS sequence (wt) from hemagglutinin__InfluenzaA__ABK40601
augaaagcaaaacuacugguccuguuaugugcacuuucagcuacagaugcagacacaauauguauaggcuaccaugcgaacaacucaaccgacacuguugacacaguacucgaaaagaacgugacagugacacacucugucaaccuacuugaggacaaucacaacggaaaacuaugcaaacuaaaaggaauagccccacuacaauuggggaaaugcagcauugccggauggaucuuaggaaacccagaaugcgaaucacuguuuucuaagaaaucgugguccuacauugcagaaacaccaaacuccgagaauggaacauguuacccaggguauuucgcagacuaugaggaacugagggaacaauugaguucaguaucaucauucgagagauucgaaauauuccccaaggaaaguucauggcccaaacacaacguaaccaaaggaguaacggcaucaugcucccauaaggggaaaagcaguuuuuacagaaauuugcuauggcugacggagaaaaauggcucguacccaaaucugagcaaguccuaugugaacaacaaagagaaagaaguccuuguacuaugggguguucaucacccgucuaacauagaggaccaaaagaccaucuaucguaaagaaaaugcuuaugucucuguagugucuucacauuauaacaggagauucaccccagaaauagcaaaaagacccaaaguaagaaaucaagaagggagaauuaacuacuacuggacucugcuggaacccggggacacaauaauauuugaggcaaauggaaaucuaauagcgccaugguaugcuuucgcauugaguagaggcuuugggucaggaaucaucaccucaaacgcaucgauggaugaaugugacgcgaagugucaaacaccccagggagcuauaaacaguagucuuccuuuucagaauguacacccagucacaauaggagagugcccaaaguacgucaggaguacaaaauuaaggaugguuacaggacuaaggaacaucccauccauucaauccagagguuuguuuggagccauugccgguuucauugaagggggauggacuggaaugauugauggaugguaugguuaucaucaucagaaugaacagggaucuggcuaugcugcggaucaaaaaagcacacaaaaugccauuaacgggauuacaaacaaggugaacucuauaaucgagaaaaugaacacucaauucacagcuguggguaaagaauucaacaaacuagaaaaaaggauggaaaacuuaaauaaaaaaguugaugauggauuucuggacauuuggacauauaaugcagaauuguugguucuacuggaaaaugaaaggacuuuggauuuccaugacucaaaugugaagaaccuguaugagaaaguaaaaagccaauuaaagaauaaugccaaagaaauaggaaacggguguuuugaauucuaccacaaguguaacaaugaaugcauggaaaguguaaaaaaugggacuuaugacuauccaaaauauucagaagaaucaaaguuaaacagggaaaaaauugauggagugaaauuggaaucaaugggagucuaucagauucuggcgaucuacucaacugucgccaguucacuggugcuuuuggucucccugggggcaaucagcuucuggauguguucuaaugggucuuugcagugcagaauaugcaucuga

SEQ ID NO: 33430 - RNA, 1701 nt, Artificial Sequence; identical to SEQ ID NO: 32662
  derived and/or modified CDS sequence (wt) from hemagglutinin__InfluenzaA__ABK40612

SEQ ID NO: 33431 - RNA, 1701 nt, Artificial Sequence
  derived and/or modified CDS sequence (wt) from hemagglutinin__InfluenzaA__ABK40623
augaagacuaucauugcuuugagcuacauuuuaugucugguuuucgcucaaaaacuucccguaaaugacaacagcacggcaacgcugugccugggacaccaugcagugccaaacggaacgcuagugaaaacaaucacgaaugaccacauugaagugacuaaugcuacugagcugguucagaguuccucaacggguagaauaugcgacaguccucaccaaauccuugauggagaaaacugcacacuaauagaugcucuauugggagacccucauugugauggcuuccaaaauaaggaaugggaccuuuuuguugaacgcagcacagccuacagcaacuguuacccuuaugaugugccggauuaugccucccuuaggucacuaguugccucauccggcacacuggaguuuaacaaugaaagcuucaauuggacuggagucgcucagaauggaacaagcucugcuugcaaaaggagaucuauuaaaaguuucuuuaguagauugaauugguugcaccaauuaaaauacaaauauccagcacugaacgugacuaugccaaacaaugaaaaauuugacaaauuguacauuugggggguucaccacccgaguacggacagugaccaaaucagccuauaugcucaagcaucagggagagucacagucucuaccaaaagaagccaacaaacuguaaucccgaauaucggaucuagacccuggguaaggggugucuccagcagaauaagcaucuauuggacaauaguaaaaccgggagacauacuuuugauuaacagcacagggaaucuaauugcuccucgggguuacuuuaaaauacgaaguggaaaaagcucaauaaugaggucaaaugcacccauuggcaaaugcaauucugaaugcaucacuccaaauggaagcauucccaaugacaaaccauuucaaaauguaaacaggaucgcauauggggccugucccagauauguuaagcaaaacacucugaaauuggcaacagggaugcggaauguaccagagaaacaaacuagaggcauauucggcgcaaucgcggguuucauagaaaaugguugggaggggaugguggacgguugguacgguuucaggcaucuaaauucugagggcacaggacaagcagcagaucuuaaaagcacucaagcagcaaucaaccaaaucaacgggaaacugaauagguuaaucgagaaaacaaacgagaaauuccaucaaauugaaaaagaauucucagaaguagaagggagaauucaggaccucgagaaauauguuaaggacacuaaaauagaucucuggucguacaacgcggagcuucuuguugcccuggagaaccaacauacaauugaucuaacugacucagaaaugaacaaacuguuugaaagaacaaggaagcaacugagggaaaaugcugaggaugugggcaaugguuguuucaaaauauaccacaaaugugacaaugccugcauagggucaaucagaaauggaacuuaugaccaugauguauacagagacgaagcauuaaacaaccgguuccagaucaaagguguugagcugaagucaggauacaaagauuggauccuauggauuuccuuugccauaucauguuuuuugcuuuguguuguuuugcugggguucaucaugugggccugccaaaaaggcaacauuaggugcaacauuugcauuuga

SEQ ID NO: 33432 - RNA, 1701 nt, Artificial Sequence
  derived and/or modified CDS sequence (wt) from hemagglutinin__InfluenzaA__ABK40645
augaagacuaucauugcuuugagcuacauuuuaugucugguuuucgcucaaaaacuucccggaaaugacaacagcacagcaacgcugugccugggacaccaugcagugccaaacggaacgcuagugaaaacaaucacgaaugaucaaauugaagugacuaaugcuacugagcugguucagaguuccccaacagguagaauaugcgacaguccucaccgaauccuugauggaaagaacugcacacugauagaugcucuauugggagacccucauugugauggcuuccaaaauaaggaaugggaccuuuuuguugaacgcagcaaagcuuacagcaacuguuacccuuaugaugugccggauuaugccucccuuaggucacuaguugccucaucaggcacccuggaguuuaccaacgaaaacuucaauuggacuggagucgcucaggaugggaaaagcuaugcuugcaaaaggggaucuguuaacaguuucuuuaguagauugaauugguugcacaaauuagaauacaaauauccagcgcugaacgugacuaugccaaacaauggcaaauuugacaaauuguacauuugggggguucaccacccgagcacggacagugaccaaaccagccuauauguccgagcaucagggaaagucacagucucuaccaaaagaagccaacaaacuguaaucccggauaucggguauagaccauggguaaggggucuguccaguagaauaagcaucuauuggacaauaguaaaaccgggagacauacuuuugauuaauagcacagggaaucuaauugcuccucgggguuacuucaaaauacgaaaugggaaaagcucaauaaugaggucagaugcacccauuggcaacugcaguucugaaugcaucacuccaaauggaagcauucccaaugacaaaccuuuucaaaauguaaacaggaucacauauggggccugccccagauauguuaagcaaaacacucugaaauuggcaacagggaugcggaauguaccagagaaacaaacuagaggcauauucggcgcaaucgcagguuucauagaaaaugguugggagggaaugguagacgguugguacgguuucaggcaucagaauucugagggcacaggacaagcugcagaucuuaaaagcacucaagcagcaaucgaccaaaucaacgggaaacugaauagguuagucgagaaaacgaacgagaaauuccaucaaaucgaaaaagaauucucagaaguagaagggagaauucaggaccucgagaaauauguugaagacacuaaaauagaucucuggucuuacaaugcggagcuucuuguugcucuggagaaccaacauacaauugaucuaacugacucagaaaugaacaaacuauuugaaagaacaaggaagcaacugagggaaaaugcugaggacaugggcaaugguuguuucaaaauauaccacaaaugugacaaugccugcauagggucaaucagaaauggaacuuaugaccaugauguauacagagacgaagcauuaaacaaccgguuccaaaucaaagguguugagcugaagucaggauacaaagauuggauccuauggauuuccuuugccauaucaugcuuuuugcuuuguguuguuuugcuuggguucaucaugugggccugccaaaaaggcaacauuaggugcaacauuugcauuuga

SEQ ID NO: 33433 - RNA, 1701 nt, Artificial Sequence
  derived and/or modified CDS sequence (wt) from hemagglutinin__InfluenzaA__ABK40656
augaagacuaucauugcuuugagcuacauuuuaugucugguuuucgcucaaaaacuucccggaaaugacaacagcacagcaacgcugugccugggacaccaugcagugccaaacggaacgcuagugaaaacaaucacgaaugaucaaauugaagugacuaaugcuacugagcugguucagaguuccccaacagguagaauaugcgacaguccucaccgaauccuugauggaaagaacugcacacugauagaugcucuauugggagacccucauugugauggcuuccaaaauaaggaaugggaccuuuuuguugaacgcagcaaagcuuacagcaacuguuacccuuaugaugugccggauuaugccucccuuaggucacuaguugccucaucaggcacccuggaguuuaccaacgaaaacuucaauuggacuggagucgcucaggaugggaaaagcuauucuugcaaaaggggaucuguuaacaguuucuuuaguagauugaauugguugcacaaauuagaauacaaauauccagcgcugaacgugacuaugccaaacaauggcaaauuugacaaauuguacauuugggggguucaccacccgagcacggacagugaccaaaccagccuauauguccgagcaucagggaaagucacagucucuaccaaaagaagccaacaaacuguaaucccggauaucggguauagaccauggguaaggggucuguccaguagaauaagcaucuauuggacaauaguaaaaccgggagacauacuuuugauuaauagcacagggaaucuaauugcuccucgggguuacuucaaaauacgaaaugggaaaagcucaauaaugaggucagaugcacccauuggcaacugcaguucugaaugcaucacuccaaauggaagcauucccaaugacaaaccuuuucaaaauguaaacaggaucacauaugggaccugccccagauauguuaagcaaaacacacugaaauuggcaacagggaugcggaauguaccagagaaacaaacuagaggcauauucggcgcaaucgcagguuucauagaaaaugguugggagggaaugguagacgguugguacgguuucaggcaucagaauucugagggcacaggacaagcugcagaucuuaaaagcacucaagcagcaaucgaccaaaucaacgggaaacugaauagguuagucgagaaaacgaacgagaaauuccaucaaaucgaaaaagaauucucagaaguagaagggagaauucaggaccucgagaaauauguugaagacacuaaaauagaucucuggucuuacaaugcggagcuucuuguugcucuggagaaucaacauacaauugaucuaacugacucagaaaugaacaaacuauuugaaagaacaaggaagcaacugagggaaaaugcugaggacaugggcaaugguuguuucaaaauauaccacaaaugugacaaugccugcauagggucaaucagaaauggaacuuaugaccaugauguauacagagacgaagcauuaaacaaccgguuccagaucaaagguguugagcugaagucaggauacaaagauuggauccuauggauuuccuuugccauaucaugcuuuuugcuuuguguuguuuugcuuggguucaucaugugggccugccaaaaaggcaacauuaggugcaacauuugcauuuga

SEQ ID NO: 33434 - RNA, 1701 nt, Artificial Sequence
  derived and/or modified CDS sequence (wt) from hemagglutinin__InfluenzaA__ABK40667
augaagacuaucauugcuuugagcuacauuuuaugucugguuuucgcucaaaaacuucccggaaaugacaacagcacagcaacgcugugccugggacaccaugcagugccaaacggaacgcuagugaaaacaaucacgaaugaucaaauugaagugacuaaugcuacugagcugguucagaguuccucaacagguagaauaugcgacaguccucaccgaauccuugauggaaaaaacugcacacugauagaugcucuauugggagacccucauugugauggcuuccaaaauaaggaaugggaccuuuuuguugaacgcagcaaagcuuacagcaacuguuacccuuaugaugugccggauuaugccucccuuaggucacuaguugccucaucaggcacccuggaguuuaccaaugaaggcuucaauuggacuggagucgcucaggaugggaaaagcuaugcuugcaaaagaggaucuguuaacaguuucuuuaguagauugaauugguugcacaaauuagaauacaaauauccagcacugaacgugacuaugccaaacaaugacaaauuugacaaauuguacauuugggggguucaccacccgagcacagacagugaccaaaccagccuauauguucaagcaucagggagagucacagucucuaccaaaagaagccaacaaacuguaaucccgaauaucgggucuagacccuggguaagggguaucuccaguagaauaagcaucuauuggacaauaguaaaaccgggagacauacuuuugauuaacagcacagggaaucuaauugcuccucgagguuacuucaaauuacgaaaugggaaaagcucaauaaugagaucagaugcacccauugacaacugcaauucugaaugcaucacuccaaauggaagcauucccaaugacaaaccuuuucaaaaugugaacaggaucacauauggggccugucccagauauguuaagcaaaacacucugaaguuggcaacagggaugcggaauguaccagagaaacaaacuagaggcauauucggcgcaaucgcagguuucauagaaaaugguugggagggaaugguagacgguugguacgguuucaggcaucaaaauucugagggcacaggacaagcagcagaucuuaaaagcacucaagcagcaaucgaccaaaucaacgggaaacugaauagauuaaccgagaaaacgaacgagaaauuccaucaaaucgaaaaagaauucucagaaguagaagggagaauucaggaccucgagaaauauguugaagacacuaaaauagaucucuggucuuacaacgcggagcuucuuguugcccuggagaaccaacauacaauugaucuaacugacucagaaaugaacaaacuguuugaaagaacaaggaagcaacugagggaaaaugcugaggacaugggcaaugguugcuucaaaauauaccacaaaugugacaaugccugcauagggucaaucagaaauggaacuuauaaccaugauguauacagagacgaagcauuaaacaaccgguuccagaucaaagguguugagcugaagucagguuacaaagauuggauccuauggauuuccuuugccauaucaugcuuuuugcuuuguguuguuuugcugggguucaucaugugggccugccaaaaaggcaacauuaggugcaacauuugcauuuga

SEQ ID NO: 33435 - RNA, 1701 nt, Artificial Sequence; identical to SEQ ID NO: 33078
  derived and/or modified CDS sequence (wt) from hemagglutinin__InfluenzaA__ABK40678

SEQ ID NO: 33436 - RNA, 1698 nt, Artificial Sequence
  derived and/or modified CDS sequence (wt) from hemagglutinin__InfluenzaA__ABK40689
augaaaguaaaacuacugguucuguuauguacauuuacagcuacauaugcagacacaauauguauaggcuaccaugccaacaacucaaccgacacuguugacacaguacuugagaagaaugugacagugacacacucugucaaccuacuugaggacagucacaauggaaaacuaugucuacuaaaaggaauagccccauuacaauuggguaauugcagcguugccggauggaucuuaggaaacccagaaugcgaauuacugauuuccaaggaaucaugguccuacauuguagaaacaccaaauccugagaauggaacauguuacccaggguauuucgccgacuaugaggaacugagggagcaauugaguucaguaucuucauuugagagguucgaaauauuccccaaagagagcucauggcccaaccacaccguaaccggaguaucagcaucaugcucccauaacgggaaaagcaguuuuuacagaaauuugcuauggcugacggggaagaaugguuuguacccaaaccugagcaagucuuaugcaaacaacaaagaaaaagaaguccuuguacuaugggguguucaucacccgccuaacauagggaaccaaagggcucucuaucauacagaaaaugcuuaugucucuguagugucuucacauuauagcagaagauucaccccagaaauagccaaaagacccaaggugagagaucaggaaggaagaaucaacuacuacuggacacugcuggaacccggggauacaauaauauuugaggcaaauggaaaucuaauagcgccaagguuugcuuucgcacugaguagaggcuuuggaucaggaaucaucaccucaaaugcaccaauggaugaaugugaugcaaagugucaaacaccucaaggagcuauaaacagcagucuuccuuuccagaauguacacccagucacaauaggggaguguccaaaguaugucaggagugcaaaauuaaggauggcuacaggacuaaggaacaucccauccauucaauccagagguuuguuuggagccauugccgguuucauugaagggggguggacuggaaugguagaugguugguaugguuaucaucaucagaaugagcaaggaucuggguaugcugcagaucaaaaaagcacacaaaaugccauuaacgggauuacaaacaaggugaauucuguaauugaaaaaaugaacacucaauucacagcugugggcaaagaauucagcaaauuggagagaaggauggaaaacuuaaauaaaaaaguugaugauggguuucuagacauuuggacauauaaugcagaauuguugguucuacuggaaaaugaaaggacuuuggauuuccacgacuccaacgugaagaaucuguaugagaaagugaaaagccaauuaaagaauaaugccaaagaaauaggaaacggguguuuugaauucuaucacaaauguaacgaugaaugcauggagagugugaaaaauggaacuuaugacuauccaaaauauuccgaagaaucaaaguuaaacagggagaaaauugauggagugaaauuggaaucaaugggagucuaucagauucuggcgaucuacucaacagucgccaguucccugguucuuuuggucucccugggggcaaucagcuucuggauguguuccaaugggucuuugcaguguagaauaugcaucuaa

SEQ ID NO: 33437 - RNA, 1701 nt, Artificial Sequence; identical to SEQ ID NO: 32662
  derived and/or modified CDS sequence (wt) from hemagglutinin__InfluenzaA__ABK40700

SEQ ID NO: 33438 - RNA, 1701 nt, Artificial Sequence
  derived and/or modified CDS sequence (wt) from hemagglutinin__InfluenzaA__ABK40711
augaagacuaucauugcuuugagcuacauuuuaugucugguuuucgcucaaaaacuucccggaaaugacaacagcacggcaacgcugugccuggggcaccaugcagugccaaacggaacgcuagugaaaacaaucacgaaugaccaaauugaagugaccaaugcuacugagcugguucagaguuccucaacagguggaauaugcgacaguccucaccaaauccuugauggagaaaacugcacacuaauagaugcucuauugggagacccucauugugauggcuuccaaaauaaggaaugggaccuuuuuguugaacgcagcaaagccuacagcaacuguuacccuuaugaugugccggauuaugccucccuuaggucacuaguugccucauccggcacacuggaguuuaacaaugaaagcuucaauuggacuggagucgcucagaauggaacaagcucugcuugcaaaaggagaucuaauaaaaguuucuuuaguagauugaauugguugcaccaauuaaaauacaaauacccagcacugaacgugacuaugccaaacaaugaaaaauuugacaaauuguacauuugggggguucaccacccgaguacggacagugaccaaaucagccuauaugcucaagcaccagggagagucacagucucuaccaaaagaagccaacaaacuguaaucccgaauaucggaucuagacccuggguaaggggugucuccagcagaauaagcaucuauuggacaauaguaaaaccgggagacauacuuuugauuaacugcacagggaaucuaauugcuccucgggguuacuucaaaauacgaagugggaaaagcucaauaaugaggucagaugcauccauuggcaaaugcaauucugaaugcaucacuccaaauggaagcauucccaaugacaaaccauuucaaaauguaaacaggaucacauauggggccugucccagauauguuaagcaaaacacucugaaauuggcaacagggaugcggaauguaccagagaaacaaacuagaggcauauucggcgcaaucgcggguuucauagaaaaugguugggagggaaugguggacgguugguacgguuucaggcaucaaaauucugaaggcacaggacaagcagcagaucucaaaagcacucaagcagcaaucaaccaaaucaacgggaaacugaauagguuaaucgagaaaacgaacgagaaauuccaucaaauugaaaaagaauucucagaaguggaagggagaauucaggaccucgagaaauauguugaggacacuaaaauagaucucuggucguacaacgcggagcuucuuguugcucuggagaaccagcauacaauugaucuaacugacucagaaaugaacaaacuauuugaaagaacaaagaagcaacugagggaaaaugcugaggauaugggcaaugguuguuucaaaauauaccacaaaugugacaaugccugcauagggucaaucagaaaugggacuuaugaccaugauguauacagagacgaagcauuaaacaaccgguuccagaucaaagguguugagcugaagucaggauacaaagauuggauccuauggauuuccuuugccauaucauguuuuuugcuuuguguugucuugcugggguucaucaugugggccugccaaaaaggcaacauuaggugcaacauuugcauuuga

SEQ ID NO: 33439 - RNA, 1701 nt, Artificial Sequence
  derived and/or modified CDS sequence (wt) from hemagglutinin__InfluenzaA__ABK40722
augaagacuaucauugcuuugagcuacauuuuaugucugguuuucgcucaaaaacuucccggaaaugacaacagcacggcaacgcugugccuggggcaccaugcagugccaaacggaacgcuagugaaaacaaucacgaaugaccaaauugaagugacuaaugcuacugagcugguucagaguuccucaacagguggaauaugcgacaguccucaccaaauccuugauggagaaaacugcacacuaauagaugcucuauugggagacccucauugugauggcuuccaaaauaaggaaugggaccuuuuuguugaacgcagcaaagccuacagcaacuguuacccuuaugaugugccggauuaugccucccuuaggucacuaguugccucauccggcacacuggaguuuaacaaugaaagcuucaauuggacuggagucgcucagaauggaacaagcucugcuugcaaaaggagaucuaauaaaaguuucuuuaguagauugaauugguugcaccaauuaaaauacaaauacccagcacugaacgugacuaugccaaacaaugaaaaauuugacaaauuguacauuugggggguucaccacccgaguacggacaaugaccaaaucagccuauaugcucaagcaccagggagagucacagucucuaccaaaagaagccaacaaacuguaaucccgaauaucggaucuagacccuggguaaggggugucuccagcagaauaagcaucuauuggacaauaguaaaaccgggagacauacuuuugauuaacugcacagggaaucuaauugcuccucgggguuacuucaaaauacgaagugggaaaagcucaauaaugaggucagaugcauccauuggcaaaugcaauucugaaugcaucacuccaaauggaagcauucccaaugacaaaccauuucaaaauguaaacaggaucacauauggggccugucccagauauguuaagcaaaacacucugaaauuggcaacagggaugcggaauguaccagagaaacaaacuagaggcauauucggcgcaaucgcggguuucauagaaaaugguugggagggaaugguggacgguugguacgguuucaggcaucaaaauucugagggcacaggacaagcagcagaucucaaaagcacucaagcagcaaucaaccaaaucaacgggaaacugaauagguuaaucgagaaaacgaacgagaaauuccaucaaauugaaaaagaauucucagaaguggaagggagaauucaggaccucgagaaauauguugaggacacuaaaauagaucucuggucguacaacgcggagcuucuuguugcccuggagaaccagcauacaauugaucuaacugacucagaaaugaacaaacuguuugaaagaacaaagaagcaacugagggaaaaugcugaggauaugggcaaugguuguuucaaaauauaccacaaaugugacaaugccugcauagggucaaucagaaaugggacuuaugaccaugauguauacagagacgaagcauuaaacaaccgguuccagaucaaagguguugagcugaagucaggauacaaagauuggauccuauggauuuccuuugccauaucauguuuuuugcuuuguguugucuugcugggguucaucaugugggccugccaaaaaggcaacauuaggugcaacauuugcauuuga

SEQ ID NO: 33440 - RNA, 1701 nt, Artificial Sequence
  derived and/or modified CDS sequence (wt) from hemagglutinin__InfluenzaA__ABK40733
augaagacuaucauugcuuugagcuacauuuuaugucugguuuucgcucaaaaacuucccggaaaugacaacagcacggcaacgcugugccuggggcaccaugcagugccaaacggaacgcuagugaaaacaaucacgaaugaccaaauugaagugaccaaugcuacugagcugguucagaguuccucaacagguggaauaugcgacaguccucaccaaauccuugauggagaaaacugcacacuaauagaugcucuauugggagacccucauugugauggcuuccaaaauaaggaaugggaccuuuuuguugaacgcagcaaagccuacagcaacuguuacccuuaugaugugccggauuaugccucccuuaggucacuaguugccucauccggcacacuggaguuuaacaaugaaagcuucaauuggacuggagucgcucagaauggaacaagcucugcuugcaaaaggagaucuaauaaaaguuucuuuaguagauugaauugguugcaccaauuaaaauacaaauacccagcacugaacgugacuaugccaaacaaugaaaaauuugacaaauuguacauuugggggguucaccacccgaguacggacagugaccaaaucagccuauaugcucaagcaccagggagagucacagucucuaccaaaagaagccaacaaacuguaaucccgaauaucggaucuagacccuggguaaggggugucuccagcagaauaagcaucuauuggacaauaguaaaaccgggagacauacuuuugauuaacugcacagggaaucuaauugcuccucgggguuacuucaaaauacgaagugggaaaagcucaauaaugaggucagaugcauccauuggcaaaugcaauucugaaugcaucacuccaaauggaagcauucccaaugacaaaccauuucaaaauguaaacaggaucacauauggggccugucccagauauguuaagcaaaacacucugaaauuggcaacagggaugcggaauguaccagagaaacaaacuagaggcauauucggagcaaucgcggguuucauagaaaaugguugggagggaaugguggacgguugguacgguuucaggcaucaaaauucugagggcacaggacaagcagcagaucucaaaagcacucaagcagcaaucaaccaaaucaacgggaaacugaauagguuaaucgagaaaacgaacgagaaauuccaucaaauugaaaaagaauucucagaaguggaagggagaauucaggaccucgagaaauauguugaggacacuaaaauagaucucuggucguacaacgcggagcuucuuguugcucuggagaaccagcauacaauugaucuaacugacucagaaaugaacaaacuauuugaaagaacaaagaagcaacugagggaaaaugcugaggauaugggcaaugguuguuucaaaauauaccacaaaugugacaaugccugcauagggucaaucagaaaugggacuuaugaccaugauguauacagagacgaagcauuaaacaaccgguuccagaucaaagguguugagcugaagucaggauacaaagauuggauccuauggauuuccuuugccauaucauguuuuuugcuuuguguugucuugcugggguucaucaugugggccugccaaaaaggcaacauuaggugcaacauuugcauuuga

SEQ ID NO: 33441 - RNA, 1701 nt, Artificial Sequence; identical to SEQ ID NO: 33317
  derived and/or modified CDS sequence (wt) from hemagglutinin__InfluenzaA__ABK40744

SEQ ID NO: 33442 - RNA, 1701 nt, Artificial Sequence; identical to SEQ ID NO: 32928
  derived and/or modified CDS sequence (wt) from hemagglutinin__InfluenzaA__ABK79948

SEQ ID NO: 33443 - RNA, 1698 nt, Artificial Sequence
  derived and/or modified CDS sequence (wt) from hemagglutinin__InfluenzaA__ABK79959
augaaaguaaaacuacugguucuguuauguacauuuacagcuacauaugcagacacaauauguauaggcuaccaugccaacaacucgaccgacacuguugacacaguacuugagaagaaugugacagugacacacucugucaaccuacuugaggacagucacaauggaaaacuaugucuacuaaaaggaauagccccacuacaauuggguaauugcagcguugccggauggaucuuaggaaacccagaaugcgaauuacugauuuccaaggaaucaugguccuacauuguagaaacaccaaauccugagaauggaacauguuacccaggguauuucgccgacuaugaggagcugagggagcaauugaguucaguaucuucauuugagagguucgaaauauuccccaaagagagcucauggcccaaccacaccguaaccggaguaucagcaucaugcucccauaacgggaaaagcaguuuuuacagaaauuuacuauggcugacggggaagaaugguuuguauccaaaucugagcaaguccuaugcaaacaacaaagagaaagaaguccuuguacugugggguguucaucacccgccuaacauaggggaccaaagggcccucuaucauacagaaaaugcuuaugucucuguagugucuucacauuauagcagaagauucaccccagaaauagccaaaagacccaagguaagagaucaggaaggaaggaucaacuacuacuggacucugcuggaacccggggauacaauaauauuugaggcaaauggaaaucuaauagcgccaagguuugcuuucgcacugaguagaggcuuuggaucaggaaucaucaccucaaaugcaccaauggaugaaugugaugcgaagugucaaacaccucagggagcuauaaacagcagucuuccuuuccagaauguacacccagucacaauaggagaguguccaaaguaugucaggagugcaaaauuaagaaugguuacaggacuaaggaacaucccauccauucaauccagagguuuguuuggagccauugccgguuucauugaagggggguggacuggaaugguagaugguugguaugguuaucaccaucagaaugagcaaggaucuggguaugcugcagaucaaaaaagcacacaaaaugccauuaacgggauuacaaacaaggugaauucuguaauugagaaaaugaacacucaauucacagcugugggcaaagaauucaacaaauuggaaagaaggauggaaaacuuaaauaaaaaaguugaugauggguuucuagacauuuggacauauaacgcagaauuguugguucuacuggaaaaugaaaggacuuuggacuuccaugacuccaacgugaagaaucuguaugagaaaguaaaaagccaauuaaagaauaaugccaaagaaauaggaaacggguguuuugaauucuaucacaaguguaacgaugaaugcauggagagugugaaaaauggaacuuaugacuauccaaaauauuccgaagaaucaaaguugaacagggagagaauugauggagugaaauuggaaucaaugggagucuaucagauucuggcgaucuacucaacagucgccaguucccugguucuuuuggucucccugggggcaaucagcuucuggauguguuccaaugggucuuugcaguguagaauaugcaucuaa

SEQ ID NO: 33444 - RNA, 1701 nt, Artificial Sequence
  derived and/or modified CDS sequence (wt) from hemagglutinin__InfluenzaA__ABK79970
augaaagcaaaacuacuaguucuguugugugcauuuacagcuacauaugcagacacaauauguauaggcuaccaugcgaacaacucaacugacacuguugacacaguacuugagaagaacgugacagugacacacucugucaaccuacuugaggacagucacaacggaaaacuaugccgacuaaaaggaacagccccacuacaauuggguaauugcagcauugccggauggaucuuaggaaauccagaaugcgaaucacuguuuucuaagaaaucauggucuuacauugcagaaacaccaaacccuaaaaauggaacauguuacccaggguauuucgccgacuaugaggaacugagggagcaauugagcucaguaucaucauucgagagauuugaaauauuccccaaggauagcucauggcccaaccacacuguaaccaaaggagugacggcaucaugcucccauaaugggaaaagcagcuuuuacaaaaauuugcuauggcugacggagaagaauggcuuguacccaaaucugagcaaguccuauguaaacaaaaagggaaaagaaguccuugugcuaugggguguucaucacccgucuaacaugggggaccaacgggccaucuaucauaaagaaaaugcuuauguuucuguguugucuucacauuauagcagaagauucaccccagaaauagcaagaagaccaaaaguaagagaucaagaagggagaauuaacuacuacuggacucugcuggaacccggggacacaauaauauuugaggcaaauggaaaucuaauagcgccgugguacgcuuucgcacugaguagaggcuuugggucaggaaucaucaucucaaacgcaucaaugggugaaugugacgcuaagugucaaacaccccaaggagcuauaaacaguagucuccccuuccagaauguacacccagucacaauaggagaguguccaaaguaugucaggaguacaaaauuaaggaugguuacaggacuaaggaacgucccauccauucaauccagagguuuguuuggagccauugccgguuucauugaaggaggguggacuggaaugauagauggaugguaugguuaucaucaucaaaaugaacaaggaucuggcuaugcugcggaccaaaaaagcacacaaaaugccauuaaugggauuacaaacaaggugaauucuauaaucgagaaaaugaacacucaauucacagcuguaggcaaagaauucaacaaauuagaaagaaggauggaaaacuuaaauaagaaaguugaugauggauuucuggacauuuggacauauaaugcagaauuguuaguucuccuggaaaaugaaaggacuuuggauuuucaugacucaaaugugaagaaccuguaugagaaagugaaaaaccaauugaagaauaaugccaaagaaauagggaacggguguuuugaauucuaucacaaguguaacaaugaaugcauggaaagugugaaaaauggaacuuaugacuauccaaaauauuccaaagaaucaaaguuaaacagggaaaaaauugauggagugaaauuggaaucaaugggagucuaucagauucuggcgaucuacucaacugucgccaguucgcuggugcuuuuggucucccugggggcaaucagcuucuggauguguucuaaugggucuuugcaguguagaauaugcaucuga

SEQ ID NO: 33445 - RNA, 1701 nt, Artificial Sequence
  derived and/or modified CDS sequence (wt) from hemagglutinin__InfluenzaA__ABK79981
augaagacuaucauugcuuugagcuacauuuuaugucugguuuucacucaaaaacuucccggaaaugacaacagcacggcaacgcugugccuggggcaccaugcagugccaaacggaacgcuagugaaaacaaucacgaaugaccaaauugaagugacuaaugcuacugagcugguucagaguuccucaacagguggaauaugcgacaguccucaccaaauccuugauggagaaaacugcacacuaauagaugcucuauugggagacccucauugugauggcuuccaaaauaaggaaugggaccuuuuuguugaacgcagcaaagccuacagcaacuguuacccuuaugaugugccggauuaugccucccuuaggucacuaguugccucauccggcacacuggaguuuaacaaugaaagcuucaauuggacuggagucgcucagaauggaacaagcucugcuugcaaaaggagaucuaauaaaaguuucuuuaguagauugaauugguugcaccaauuaaaauacaaauacccagcacugaacgugacuaugccaaacaaugaaaaauuugacaaauuguacauuugggggguucaccacccgaguacggacagugaccaaaucagccuauaugcucaagcaccagggagagucacagucucuaccaaaagaagccaacaaacuguaaucccgaauaucggaucuagacccuggguaaggggugucuccagcagaauaagcaucuauuggacaauaguaaaaccgggagacauacuuuugauuaacugcacagggaaucuaauugcuccucgggguuacuucaaaauacgaagugggaaaagcucaauaaugaggucagaugcauccauuggcaaaugcaauucugaaugcaucacuccaaauggaagcauucccaaugacaaaccauuucaaaauguaaacaggaucacauauggggccugucccagauauguuaagcaaaacacucugaaauuggcaacagggaugcggaauguaccagagaaacaaacuagaggcauauucggcgcaaucgcggguuucauagaaaaugguugggagggaaugguggacgguugguacgguuucaggcaucaaaauucugagggcacaggacaagcagcagaucucaaaagcacucaagcagcaaucaaccaaaucaacgggaaacugaauagguuaaucgagaaaacgaacgagaaauuccaucaaauugaaaaagaauucucagaaguggaagggagaauucaggaccucgagaaauauguugaggacacuaaaauagaucucuggucguacaacgcggagcuucuuguugcccuggagaaccagcauacaauugaucuaacugacucagaaaugaacaaacuguuugaaagaacaaagaagcaacugagggaaaaugcugaggauaugggcaaugguuguuucaaaauauaccacaaaugugacaaugccugcauagggucaaucagaaaugggacuuaugaccaugauguauacagagacgaagcauuaaacaaccgguuccagaucaaagguguugagcugaagucaggauacaaagauuggauccuauggauuuccuuugccauaucauguuuuuugcuuuguguugucuugcugggguucaucaugugggccugccaaaaaggcaacauuaggugcaacauuugcauuuga

SEQ ID NO: 33446 - RNA, 1701 nt, Artificial Sequence; identical to SEQ ID NO: 32662
  derived and/or modified CDS sequence (wt) from hemagglutinin__InfluenzaA__ABK79992

SEQ ID NO: 33447 - RNA, 1701 nt, Artificial Sequence; identical to SEQ ID NO: 32933
  derived and/or modified CDS sequence (wt) from hemagglutinin__InfluenzaA__ABK80025

SEQ ID NO: 33448 - RNA, 1701 nt, Artificial Sequence; identical to SEQ ID NO: 32933
  derived and/or modified CDS sequence (wt) from hemagglutinin__InfluenzaA__ABK80036

SEQ ID NO: 33449 - RNA, 1701 nt, Artificial Sequence; identical to SEQ ID NO: 32981
  derived and/or modified CDS sequence (wt) from hemagglutinin__InfluenzaA__ABK80047

SEQ ID NO: 33450 - RNA, 1701 nt, Artificial Sequence
  derived and/or modified CDS sequence (wt) from hemagglutinin__InfluenzaA__ABK80058
augaagacuaucauugcuuugagcuacauuuuaugucugguuuucgcucaaaaacuucccguaaaugacaacagcacggcaacgcugugccugggacaccaugcagugccaaacggaacgcuagugaaaacaaucacgaaugaccacauugaagugacuaaugcuacugagcugguucagaguuccccaacagguagaauaugcgacaguccucaccaaauccuugauggagaaaacugcacacuaauagaugcucuauugggagacccucauugugauggcuuccaaaauaaggaaugggaccuuuuuguugaacgcagcacagccuacagcaacuguuacccuuaugaugugccggauuaugccucccuuaggucacuaguugccucauccggcacacuggaguuuaacaaugaaagcuucaauuggacuggagucgcucagaauggaacaagcucugcuugcaaaaggagaucuauuaaaaguuucuuuaguagauugaauugguugcaccaauuaaaauacaaauauccagcacugaacgugacuaugccaaacaaugaaaaauuugacaaauuguacauuugggggguucaccacccgaguacggacagugaccaaaucagccuauaugcucaagcaucagggagagucacagucucuaccaaaagaagccaacaaacuguaaucccgaauaucggaucuagacccuggguaaggggugucuccagcagaauaagcaucuauuggacaauaguaaaaccgggagacauacuuuugauuaacagcacagggaaucuaauugcuccucgggguuacuucaaaauacgaagugggaaaagcucaauaaugaggucaaaugcacccauuggcaaaugcaauucugaaugcaucacuccaaauggaagcauucccaaugacaaaccauuucaaaauguaaacaggaucacauauggggccugucccagauauguuaagcaaaacacucugaaauuggcaacagggaugcggaauguaccagagaaacaaacuagaggcauauucggcgcaauugcggguuucauagaaaaugguugggaaggaaugguggacgguugguacgguuucaggcaucaaaauucugagggcacaggacaagcagcagaucuuaaaagcacucaagcugcaaucaaccaaaucaacgggaaacugaauagguuaaucgagaaaacaaacgagaaauuccaucaaauugaaaaagaauucucagaaguagaagggagaauucaggaccucgagaaauauguugaggacacuaaaauagaucucuggucguacaacgcggagcuucuuguugcccuggagaaccaacauacaauugaucuaacugacucagaaaugaacaaacuguuugaaagaacaaggaagcaacugagggaaaaugcugaggauaugggcaaugguuguuucaaaauauaccacaaaugugacaaugccugcauagggucaaucagaaauggaacuuaugaccaugauguauacagagacgaagcauuaaacaaccgguuccagaucaaagguguugagcugaagucaggauacaaagauuggauccuauggauuuccuuugccauaucauguuuuuugcuuuguguuguuuugcugggguucaucaugugggccugccaaaaaggcaacauuagaugcaacauuugcauuuga

SEQ ID NO: 33451 - RNA, 1701 nt, Artificial Sequence
  derived and/or modified CDS sequence (wt) from hemagglutinin__InfluenzaA__ABK80069
augaagacuaucauugcuuugagcuacauuuuaugucugguuuucgcucaaaaacuucccguaaaugacaacagcacggcaacgcugugccugggacaccaugcagugccaaacggaacgcuagugaaaacaaucacgaaugaccacauugaagugacuaaugcuacugagcugguucagaguuccucaacggguagaauaugcgacaguccucaccaaauccuugauggagaaaacugcacacuaauagaugcucuauugggagacccucauugugauggcuuccaaaauaaggaaugggaccuuuuuguugaacgcagcacagccuacagcaacuguuacccuuaugaugugccggauuaugccucccuuaggucacuaguugccucauccggcacacuggaguuuaacaaugaaagcuucaauuggacuggagucgcucagaauggaacaagcucugcuugcaaaaggagaucuauuaaaaguuucuuuaguagauugaauugguugcaccaauuaaaauacaaauauccagcacugaacgugacuaugccaaacaaugaaaaauuugacaaauuguacauuugggggguucaccacccgaguacggacagugaccaaaucagccuauaugcucaagcaucagggagagucacagucucuaccaaaagaagccaacaaacuguaaucccgaauaucggaucuagacccuggauaaggggugucuccagcagaauaagcaucuauuggacaauaguaaaaccgggagacauacuuuugauuaacagcacagggaaucuaauugcuccucgggguuacuuuaaaauacgaaguggaaaaagcucaauaaugaggucaaaugcacccauuggcaaaugcaauucugaaugcaucacuccaaauggaagcauucccaaugacaaaccauuucaaaauguaaacaggaucgcauauggggccugucccagauauguuaagcaaaacacucugaaauuggcaacagggaugcggaauguaccagagaaacaaacuagaggcauauucggcgcaaucgcggguuucauagaaaaugguugggaggggaugguggacgguugguacgguuucaggcaucuaaauucugagggcacaggacaagcagcagaucuuaaaagcacucaagcagcaaucaaccaaaucaacgggaaacugaauagguuaaucgagaaaacaaacgagaaauuccaucaaauugaaaaagaauucucagaaguagaagggagaauucaggaccucgagaaauauguugaggacacuaaaauagaucucuggucguacaacgcggagcuucuuguugcccuggagaaccaacauacaauugaucuaacugacucagaaaugaacaaacuguuugaaagaacaaggaagcaacugagggaaaaugcugaggaugugggcaaugguuguuucaaaauauaccacaaaugugacaaugccugcauagggucaaucagaaauggaacuuaugaccaugauguauacagagacgaagcauuaaacaaccgguuccagaucaaagguguugagcugaagucaggauacaaagauuggauccuauggauuuccuuugccauaucauguuuuuugcuuuguguuguuuugcugggguucaucaugugggccugccaaaaaggcaacauuaggugcaacauuugcauuuga

SEQ ID NO: 33452 - RNA, 1701 nt, Artificial Sequence
  derived and/or modified CDS sequence (wt) from hemagglutinin__InfluenzaA__ABK80080
augaagacuaucauugcuuugagcuacauuuuaugucugguuuucgcucaaaaacuucccguaaaugacaacagcacggcaacgcugugccugggacaccaugcagugccaaacggaacgcuagugaaaacaaucacgaaugaccacauugaagugacuaaugcuacugaacugguucagaguuccucaacagguagaauaugcgacaguccucaccaaauccuugauggagaaaacugcacacuaauagaugcucuauugggagacccucauugugauggcuuccaaaauaaggaaugggaccuuuuuguugaacgcagcacagccuacagcaacuguuacccuuaugaugugccggauuaugccucccuuaggucacuaguugccucauccggcacacuggaguuuaacaaugaaagcuucaauuggacuggagucgcucagaauggaacaagcucugcuugcaaaaggagaucuauuaaaaguuucuuuaguagauugaauugguugcaccaauuaaaauacaaauauccagcacugaacgugacuaugccaaacaaugaaaaauuugacaaauuguacauuugggggguucaccacccgaguacggacagugaccaaaucagccuauaugcucaagcaucagggagagucacagucucuaccaaaagaagccaacaaacuguaaucccgaauaucggaucuagacccuggguaaggggugucuccagcagaauaagcaucuauuggacaauaguaaaaccgggagacauacuuuugauuaacagcacagggaaucuaauugcuccucgggguuacuuuaaaauacgaagugggaaaagcucaauaaugaggucaaaugcacccauuggcaaaugcaauucugaaugcaucacuccaaauggaagcauucccaaugacaaaccauuucaaaauguaaacaggaucacauauggggccugucccagauauguuaagcaaaacacucugaaauuggcaacagggaugcggaauguaccagagaaacaaacuagaggcauauucggcgcaaucgcggguuucauagaaaaugguugggagggaaugguggacgguugguacgguuucaggcaucaaaauucugagggcacaggacaagcagcagaucuuaaaagcacucaagcagcaaucaaccaaaucaacgggaaacugaauagauuaaucgagaaaacaaacgagaaauuccaucaaauugaaaaggaauucucagaaguagaagggagaauucaggaccucgagaaauauguugaggacacuaaaauagaucucuggucguacaacgcggagcuucuuguugcccuggagaaccaacauacaauugaucuaacugacucagaaaugaacaaacuguuugaaagaacaaggaagcaacugagggaaaaugcugaggauaugggcaaugguuguuuaaaaauauaccacaaaugugacaaugccugcauagggucaaucagaaauggaacuuaugaccaugauguauacagagacgaagcauuaaacaaccgguuccagaucaaagguguugagcugaagucaggauacaaagauuggauccuauggauuuccuuugccauaucauguuuuuugcuuuguguuguuuugcugggguucaucaugugggccugccaaaaaggcaacauuagaugcaacauuugcauuuga

SEQ ID NO: 33453 - RNA, 1701 nt, Artificial Sequence; identical to SEQ ID NO: 32662
  derived and/or modified CDS sequence (wt) from hemagglutinin__InfluenzaA__ABK80091

SEQ ID NO: 33454 - RNA, 1701 nt, Artificial Sequence; identical to SEQ ID NO: 32662
  derived and/or modified CDS sequence (wt) from hemagglutinin__InfluenzaA__ABK80102

SEQ ID NO: 33455 - RNA, 1701 nt, Artificial Sequence
  derived and/or modified CDS sequence (wt) from hemagglutinin__InfluenzaA__ABK80113
augaagacuaucauugcuuugagcuacauuuuaugucugguuuucgcucaaaaacuucccggaaaugacaacagcacggcaacgcugugccuggggcaccaugcagugccaaacggaacgcuagugaaaacaaucacgaaugaccaaauugaagugacuaaugcuacugagcugguucagaguuccucaacagguagaauaugcgacaguccucaccaaauccuugauggagaaaacugcacacuaauagaugcucuauugggagacccucauugugauggcuuccaaaauaaggaaugggaccuuuuuguugaacgcagcaaagccuacagcaacuguuacccuuaugaugugccggauuaugucucccuuaggucacuaguugccucaucaggcacgcuggaguuuaacaaugaaagcuucaauuggacuggagucgcucagaauggaacaagcucugcuugcaaaaggagaucugauaaaaguuucuuuaguagauugaauugguugcaccaauuaaaauacaaauauccagcacugaacgugacuaugccaaacaaugaaaaauuugacaaauuguacauuugggggguucaccacccggguacagacagugaccaaaucagccuauaugcucaagcaucagggagagucacagucucuaccaaaagaagccaacaaacuguaaucccgaauaucggaucuagacccuggguaaggggugucuccagcagaauaagcaucuauuggacaauaguaaaaccgggagacauacuuuugauuaacagcacagggaaucuaauugcuccucgggguuacuucaaaauacgaagugggaaaagcucaauaaugaggucagaugcacccauuggcaaaugcaauucugaaugcaucacuccaaauggaagcauucccaaugacaaaccauuucaaaauguaaacaggaucacauaugggcccugucccagauauguuaagcaaaacacucugaaauuggcaacagggaugcggaaugugccagagaaacaaacuagaggcauauucggugcaaucgcgggcuucauagaaaaugguugggagggaaugauggacgguugguacgguuucaggcaucaaaauucugagggcacagggcaagcagcagaucuuaaaagcacucaagcagcaaucaaccaaaucaacgggaaacugaauagguuaaucgagaaaacgaacgagaaauuccaucaaauugaaaaagaauucucagaaguagaagggagaauucaggaccucgagaaauauguugaggacacuaaaauagaucucuggucguacaaugcggagcuucuuguugcccuggagaaccaacauacaauugaucuaacugacucagaaaugaacaaacuguuugaaagaacaaagaagcaacugagggaaaaugcugaggauaugggcaaugguuguuucaaaauauaccacaaaugugacaaugccugcauagggucaaucagaaauggaacuuaugaccaugauguauacagagacgaagcauugaacaaccgguuccagaucaaagguguugagcugaagucaggauacaaagauuggauccuauggauuuccuuugccauaucauguuuuuugcuuuguauuguuuugcugggguucaucaugugggccugccaaaaaggcaacauuaggugcaacauuugcauuuga

SEQ ID NO: 33456 - RNA, 1701 nt, Artificial Sequence
  derived and/or modified CDS sequence (wt) from hemagglutinin__InfluenzaA__ABK80124
augaagacuaucauugcuuugagcuacauuuuaugucugguuuucgcucaaaaacuucccggaaaugacaacagcacggcaacgcugugccuggggcaccaugcagugccaaacggaacgcuagugaaaacaaucacgaaugaccaaauugaagugacuaaugcuacugagcugguucagaguuccucaacagguagaauaugcgacaguccucaccaaauccuugauggagaaaacugcacacuaauagaugcucuauugggagacccucauugugauggcuuccaaaauaaggaaugggaccuuuuuguugaacgcagcaaagccuacagcaacuguuacccuuaugaugugccggauuaugucucccuuaggucacuaguugccucaucaggcacgcuggaguuuaacaaugaaagcuucaauuggacuggagucgcucagaauggaacaagcucugcuugcaaaaggagaucugauaaaaguuucuuuaguagauugaauugguugcaccaauuaaaauacaaauauccagcacugaacgugacuaugccaaacaaugaaaaauuugacaaauuguacauuugggggguucaccacccggguacagacagugaccaaaucagccuauaugcucaagcaucagggagagucacagucucuaccaaaagaagccaacaaacuguaaucccgaauaucggaucuagacccuggguaaggggugucuccagcagaauaagcaucuauuggacaauaguaaaaccgggagacauacuuuugauuaacagcacagggaaucuaauugcuccucgggguuacuucaaaauacgaagugggaaaagcucaauaaugaggucagaugcacccauuggcaaaugcaauucugaaugcaucacuccaaauggaagcauucccaaugacaaaccauuucaaaauguaaacaggaucacauaugggcccugucccagauauguuaagcaaaacacucugaaauuggcaacagggaugcggaaugugccagagaaacaaacuagaggcauauucggugcaaucgcgggcuucauagaaaaugguugggagggaaugauggacgguugguacgguuucaggcaucaaaauucugagggcacagggcaagcagcagaucuuaaaagcacucaagcagcaaucaaccaaaucaacgggaaacugaauagguuaaucgagaaaacgaacgagaaauuccaucaaauugaaaaagaauucucagaaguagaagggagaauucaggaccucgagaaauauguugaggacacuaaaauagaucucuggucguacaaugcggagcuucuuguugcccuggagaaccaacauacaauugaucuaacugacucagaaaugaacaaacuguuugaaagaacaaagaagcaacugagggaaaaugcugaggauaugggcaaugguuguuucaaaauauaccacaaaugugacaaugccugcauagggucaaucagaaauggaacuuaugaccaugauguauacagagacgaagcauugaacaaccgguuccagaucaaagguguugagcugaagucaggauacaaaaauuggauccuauggauuuccuuugccauaucauguuuuuugcuuuguauuguuuugcugggguucaucaugugggccugccaaaaaggcaacauuaggugcaacauuugcauuuga

SEQ ID NO: 33457 - RNA, 1701 nt, Artificial Sequence; identical to SEQ ID NO: 33455
  derived and/or modified CDS sequence (wt) from hemagglutinin__InfluenzaA__ABK80135

SEQ ID NO: 33458 - RNA, 1701 nt, Artificial Sequence; identical to SEQ ID NO: 33455
  derived and/or modified CDS sequence (wt) from hemagglutinin__InfluenzaA__ABK80146

SEQ ID NO: 33459 - RNA, 1701 nt, Artificial Sequence; identical to SEQ ID NO: 33455
  derived and/or modified CDS sequence (wt) from hemagglutinin__InfluenzaA__ABK80157

SEQ ID NO: 33460 - RNA, 1701 nt, Artificial Sequence; identical to SEQ ID NO: 32574
  derived and/or modified CDS sequence (wt) from hemagglutinin__InfluenzaA__ABK80168

SEQ ID NO: 33461 - RNA, 1701 nt, Artificial Sequence
  derived and/or modified CDS sequence (wt) from hemagglutinin__InfluenzaA__ABK80179
augaagacuaucauugcuuugagcuacauuuuaugccugguuuucgcucaaaaacuucccggaaaugacaacagcacggcaacgcugugccuggggcaucaugcggugccaaacggaacgcuagugaaaacaaucacgaaugaccaaauugaaguaacuaaugcuacugagcugguucagaguuccucaacagguagaauaugcgacaguccucaucaaauccuugauggagaaaacugcacacuaauagaugcucuauugggagacccucauugugauggcuuccaaaauaaggaaugggaccuuuuuguugaacgcagcaaagccuacagcaacuguuacccuuaugaugugccggauuaugucucccuuaggucacuaguugccucaucaggcacgcuggaguuuaacaaugaaagcuucaauuggacuggagucgcucagaauggaacaagcucugcuugcaaaaggagaucugauaaaaguuucuuuaguagauugaauugguugcaccaauuaaaauacaaauauccagcacugaacgugacuaugccaaacaaugaaaaauuugacaaauuguacauuugggggguucaccacccggguacagacagugaccaaaucagccuauaugcucaagcaucagggagagucacagucucuaccaaaagaagccaacaaacuguaaucccgaauaucggaucuagacccuggguaaggggugucuccagcagaauaagcaucuauuggacaauaguaaaaccgggagacauacuuuugauuaacagcacagggaaucuaauugcuccucgggguuacuucaaaauacgaagugggaaaagcucaauaaugaggucagaugcacccauuggcaaaugcaauucugaaugcaucacuccaaauggaagcguucccaaugacaaaccauuucaaaauguaaacaggaucacauauggggccugucccagauauguuaagcaaaacacucugaaauuggcaacagggaugcggaaugugccagagaaacaaacuagaggcauauucggugcaaucgcgggcuucauagaaaaugguugggagggaaugauggacgguugguacgguuucaggcaucaaaauucugagggcacagggcaagcagcagaucuuaaaagcacucaagcagcaaucaaccaaaucaacgggaaacugaauagguuaaucgagaaaacgaacgagaaauuccaucaaauugaaaaagaauucucagaaguagaagggagaauucaggaccucgagaaauauguugaggacacuaaaauagaucucuggucguacaaugcggagcuucuuguugcccuggagaaccaacauacaauugaucuaacugacucagaaaugaacaaacuguuugaaagaacaaagaagcaacugagggaaaaugcugaggauaugggcaaugguuguuucaaaauauaccacaaaugugacaaugccugcauagggucaaucagaaauggaacuuaugaccaugauguauacagagacgaagcauugaacaaccggcuccagaucaaagguguugagcugaagucaggauacaaagauuggauccuauggauuuccuuugccauaucauguuuuuugcuuuguauuguucugcugggguucaucaugugggccugccaaaaaggcaacauuaggugcaacauuugcauuuga

SEQ ID NO: 33462 - RNA, 1701 nt, Artificial Sequence
  derived and/or modified CDS sequence (wt) from hemagglutinin__InfluenzaA__ABK80190
augaagacuaucauugcuuugagcuacauuuuaugccugguuuucgcucaaaaacuucccggaaaugacaacagcacggcaacgcugugucuggggcaucaugcagugccaaacggaacgcuagugaaaacaaucacgaaugaccaaauugaaguaacuaaugcuacugagcugguucagaguuccucaacagguagaauaugcgacaguccucaccaaauccuugauggagaaaacugcacacuaauagaugcucuauugggagacccucauugugauggcuuccaaaauaaggaaugggaccuuuuuguugaacgcagcaaagccuacagcaacuguuacccuuaugaugugccggauuaugucucccuuaggucacuaguugccucaucaggcacgcuggaguuuaacaaugaaagcuucaauuggacuggagucgcucagaauggaacaagcucugcuugcaaaaggagaucugauaaaaguuucuuuaguagauugaauugguugcaccaauuaaaauacaaauauccagcacugaacgugacuaugccaaacaaugaaaaauuugacaaauuguacauuugggggguucaccacccggguacagacagugaccaaaucagccuauaugcucaagcaucggggagagucacagucucuaccaaaagaagccaacaaacuguaaucccgaauaucggaucuagacccuggguaaggggugucuccagcagaauaagcaucuauuggacaauaguaaaaccgggagacauacuuuugauuaacagcacagggaaucuaauugcuccucgggguuacuucaaaauacgaagugggaaaagcucaauaaugaggucagaugcacccauuggcaaaugcaauucugaaugcaucacuccaaauggaagcauucccaaugacaaaccauuucaaaauguaaacaggaucacauauggggccugucccagauauguuaagcaaaacacucugaaauuggcaacagggaugcggaaugugccagagaaacaaacuagaggcauauucggugcaaucgcgggcuucauagaaaaugguugggagggaaugauggacgguugguacgguuucaggcaucaaaauucugagggcacagggcaagcagcagaucuuaaaagcacucaagcagcaaucaaccaaaucaacgggaaacugaauagguuaaucgagaaaacgaacgagaaauuccaucaaauugaaaaagaauucucagaaguagaagggagaauucaggaccucgagaaauauguugaggacacuaaaauagaucucuggucguacaaugcggagcuucuuguugcccuggagaaccaacauacaauugaucuaacugacucagaaaugaacaaacuguuugaaagaacaaagaagcaacugagggaaaaugcugaggauaugggcaaugguuguuucaaaauauaccacaaaugugacaaugccugcauagggucaaucagaaauggaacuuaugaccaugauguauacagagacgaagcauugaacaaccgguuccagaucaaagguguugagcugaagucaggauacaaagauuggguccuauggauuuccuuugccauaucauguuucuugcuuuguauuguuuugcugggguucaucaugugggccugccaaaaaggcaacauuaggugcaacauuugcauuuga

SEQ ID NO: 33463 - RNA, 1701 nt, Artificial Sequence
  derived and/or modified CDS sequence (wt) from hemagglutinin__InfluenzaA__ABK80201
augaagacuaucauugcuuugagcuacauuuuaugccugguuuucgcucaaaaacuucccggaaaugacaacagcacggcaacgcugugccuggggcaucaugcggugccaaacggaacgcuagugaaaacaaucacgaaugaccaaauugaaguaacuaaugcuacugagcugguucagaguuccucaacagguagaauaugcgacaguccucaucaaauccuugauggagaaaacugcacacuaauagaugcucuauugggagacccucauugugauggcuuccaaaauaaggaaugggaccuuuuuguugaacgcagcaaagccuacagcaacuguuacccuuaugaugugccggauuaugucucccuuaggucacuaguugccucaucaggcacgcuggaguuuaacaaugaaagcuucaauuggacuggagucgcucagaauggaacaagcucugcuugcaaaaggagaucugauaaaaguuucuuuaguagauugaauugguugcaccaauuaaaauacaaauauccagcacugaacgugacuaugccaaacaaugaaaaauuugacaaauuguacauuugggggguucaccacccggguacagacagugaccaaaucagccuauaugcucaagcaucagggagagucacagucucuaccaaaagaagccaacaaacuguaaucccgaauaucggaucuagacccuggguaaggggugucuccagcagaauaagcaucuauuggacaauaguaaaaccgggagacauacuuuuaauuaacagcacagggaaucuaauugcuccucgggguuacuucaaaauacgaagugggaaaagcucaauaaugaggucagaugcacccauuggcaaaugcaauucugaaugcaucacuccaaauggaagcauucccaaugacaaaccauuucaaaauguaaacaggaucacauauggggccugucccagauauguuaagcaaaacacucugaaauuggcaacagggaugcggaaugugccagagaaacaaacuagaggcauauucggugcaaucgcgggcuucauagaaaaugguugggagggaaugauggacgguugguacgguuucaggcaucaaaauucugagggcacagggcaagcagcagaucuuaaaagcacucaagcagcaaucaaccaaaucaacgggaaacugaauagguuaaucgagaaaacgaacgagaaauuccaucaaauugaaaaagaauucucagaaguagaagggagaauucaggaccucgagaaauauguugaggacacuaaaauagaucucuggucguacaaugcggagcuucuuguugcccuggagaaccaacauacaauugaucuaacugacucagaaaugaacaaacuguuugaaagaacaaagaagcaacugagggaaaaugcugaggauaugggcaaugguuguuucaaaauauaccacaaaugugacaaugccugcauagggucaaucagaaauggaacuuaugaccaugauguauacagagacgaagcauugaacaaccgguuccagaucaaagguguugagcugaagucaggauacaaagauuggauccuauggauuuccuuugccauaucauguuuuuugcuuuguauuguuuugcugggguucaucaugugggccugccaaaaaggcaacauuaggugcaacauuugcauuuga

SEQ ID NO: 33464 - RNA, 1701 nt, Artificial Sequence
  derived and/or modified CDS sequence (wt) from hemagglutinin__InfluenzaA__ABK80212
augaagacuaucauugcuuugagcuacauucuaugucugguuuucgcucaaaaacuucccggaaaugacaacagcacggcaacgcugugccuugggcaccaugcaguaccaaacggaacgauagugaaaacaaucacgaaugaccaaauugaaguuacuaaugcuacugagcugguucagaguuccucaacagguggaauaugcgacaguccucaucagauccuugauggagaaaacugcacacuaauagaugcucuauugggagacccucagugugauggcuuccaaaauaagaaaugggaccuuuuuguugaacgcagcaaagccuacagcaacuguuacccuuaugaugugccggauuaugccucccuuaggucacuaguugccucauccggcacacuggaguuuaacaaugaaagcuucgauuggacuggagucacucagaauggaacaagcucugcuugcaaaaggagaucuaauaaaaguuucuuuaguagauugaauugguugacccacuuaaaauacaaauacccagcauugaacgugacuaugccaaacaaugaaaaauuugacaaauuguacauuugggggguucaccacccggguacggacagugaccaaaucagccuauaugcucaagcaucaggaagaaucacagucucuaccaaaagaagccaacaaacuguaaucccgaauaucggaucuagacccaggguaagggaugucuccagccgaauaagcaucuauuggacaauaguaaaaccgggagacauacuuuugauuaacagcacagggaaucuaauugcuccucgggguuacuucaaaauacgaagugggaaaagcucaauaaugagaucagaugcacccauuggcaaaugcaauucugaaugcaucacuccaaauggaagcauucccaaugacaaaccauuucaaaauguaaacaggaucacauauggggccugucccagauauguuaagcaaaacacucugaaauuggcaacagggaugcgaaauguaccagagaaacaaacuagaggcauauuuggcgcaaucgcggguuucauagaaaaugguugggagggaaugguggacgguugguacgguuucaggcaucaaaauucugagggcacaggacaagcagcagaucucaaaagcacucaagcagcaaucaaccaaaucaaugggaaacugaauagguuaaucgggaaaacaaacgagaaauuccaucagauugaaaaagaauucucagaaguagaagggagaauucaggaccucgagaaauauguugaggacacuaaaauagaucucuggucauacaacgcggagcuucuuguugcccuggagaaccaacauacaauugaucuaacugacucagaaaugaacaaacuguuugaaagaacaaagaagcaacugagggaaaaugcugaggauaugggcaaugguuguuucaaaauauaccacaaaugugacaaugccugcauagggucaaucagaaauggaacuuaugaccaugauguguacagagaugaagcauuaaacaaccgguuccagaucaaagguguugagcugaagucaggauauaaaaauuggauccuauggauuuccuuugccauaucauguuuuuugcuuuguguugcuuuguugggguucaucaugugggccugccaaaaaggcaacauuaggugcaacauuugcauuuga

SEQ ID NO: 33465 - RNA, 1701 nt, Artificial Sequence; identical to SEQ ID NO: 32532
  derived and/or modified CDS sequence (wt) from hemagglutinin__InfluenzaA__ABK80223

SEQ ID NO: 33466 - RNA, 1701 nt, Artificial Sequence
  derived and/or modified CDS sequence (wt) from hemagglutinin__InfluenzaA__ABK80234
augaggacuaucauugcuuugagcuacauucuaugucugguuuucgcucaaaaacuucccggaaaugacaacagcacggcaacgcugugccuugggcaccaugcaguaccaaacggaacgauagugaaaacaaucacaaaugaccaaauugaaguuacuaaugcuacugagcugguucagaguuccucaacagguggaauaugcgacaguccucaucagauccuugauggagaaaacugcacacuaauagaugcucuauugggagacccucagugugauggcuuccaaaauaagaaaugggaccuuuuuguugaacgcagcaaagccuacagcaacuguuacccuuaugaugugccggaucaugccucccuuaggucacuaguugccucauccggcacacuggaguuuaacaaugaaagcuucgauuggacuggagucacucagaauggaacaagcucugcuugcaaaaggagaucuaauaaaaguuucuuuaguagauugaauugguugacccacuuaaaauacaaauacccagcauugaacgugacuaugccaaacaaugaaaaauuugacaaauuguacauuugggggguucaccacccggguacggacagugaccaaaucagccuauaugcucaagcaucaggaagaaucacagucucuaccaaaagaagccaacaaacuguaaucccgaauaucggaucuagacccaggguaagggaugucuccagccgaauaagcaucuauuggacaauaguaaaaccgggagacauacuuuugauuaacagcacagggaaucuaauugcuccucgggguuacuucaaaauacgaagugggaaaagcucaauaaugagaucagaugcacccauuggcaaaugcaauucugaaugcaucacuccaaauggaagcauucccaaugacaaaccauuucaaaauguaaacaggaucacauauggggccugucccagauauguuaagcaaaacacucugaaauuggcaacagggaugcgaaauguaccagagaaacaaacuagaggcauauuuggcgcaaucgcggguuucauagaaaaugguugggagggaaugguggacgguugguacgguuucaggcaucaaaauucugagggcacaggacaagcagcagaucucaaaagcacucaagcagcaaucaaccaaaucaaugggaaacugaauagguuaaucgggaaaacaaacgagaaauuccaucagauugaaaaagaauucucagaaguagaagggagaauucaggaccucgagaaauauguugaggacacuaaaauagaucucuggucauacaacgcggagcuucuuguugcccuggagaaccaacauacaauugaucuaacugacucagaaaugaacaaacuguuugaaagaacaaagaagcaacugagggaaaaugcugaggauaugggcaaugguuguuucaaaauauaccacaaaugugacaaugccugcauagggucaaucagaaauggaacuuaugaccaugauguguacagagaugaagcauuaaacaaccgguuccagaucaaagguguugagcugaagucaggauauaaagauuggauccuauggauuuccuuugccauaucauguuuuuugcuuuguguugcuuuguugggguucaucaugugggccugccaaaaaggcaacauuaggugcaacauuugcauuuga

SEQ ID NO: 33467 - RNA, 1701 nt, Artificial Sequence
  derived and/or modified CDS sequence (wt) from hemagglutinin__InfluenzaA__ABK80245
augaagacuaucauugcuuugagcuacauccuaugucugguuuucgcucaaaaacuucccggaaaugacaacagcacggcaacgcugugccuugggcaccaugcaguaccaaacggaacgauagugaaaacaaucacgaaugaccaaauugaaguuacuaaugcuacugagcugguucagaguuccucaacagguggaauaugcgacaguccucaucagauccuugauggagaaaacugcacacuaauagaugcucuauugggagacccucagugugauggcuuccaaaauaagaaaugggaccuuuuuguugaacgcagcaaagcccacagcaacuguuacccuuaugaugugccggauuaugccucccuuaggucacuaauugccucauccggcacacuggaguuuaacaaugaaagcuucaauuggacuggagucacucagaauggaacaagcucugcuugcaaaaggagaucuaaucaaaguuucuuuaguagauugaauugguugacccauuuaaaauucaaauacccagcauugaacgugacuaugccaaacaaugaaaaauuugacaaauuguacauuugggggguucaccacccggguacggacagugaccaaaucagccuauaugcucaagcaccaggaagaaucacagucucuaccaaaagaagccaacaaacuguaaucccgaauaucggaucuagacccaggguaagggauaucuccagcagaauaagcaucuauuggacaauaguaaaaccgggagacauacuuuugauuaacagcacagggaaucuaauugcuccucgggguuacuucaaaauacgaagugggaaaagcucaauaaugaaaucagaugcacccauuggcaaaugcaauucugaaugcaucacuccaaauggaagcauucccaaugacaaaccauuucaaaauguaaacaggaucacauauggggccugucccagauauguuaagcaaaacacucugaaauuggcaacagggaugcgaaaugugccagagaaacaaacuagaggcauauuuggcgcaauugcggguuucauagaaaaugguugggagggaaugguggacgguugguacgguuucaggcaucagaauucugagggcacaggacaagcagcagaucucaaaagcacucaagcagcaaucaaccaaaucaaugggaaacugaauagguuaaucgggaaaacaaacgagaaauuccaucagauugaaaaagaauucucagaaguagaagggagaauucaggaccucgagaaauauguugaggacacuaaaauagaucucuggucauacaacgcggagcuucuuguugcccuggagaaccaacauacaauugaucuaacugacucagaaaugaacaaacuguuugaaagaacaaagaagcaacugagggaaaaugcugaggauaugggcaaugguuguuucaaaauauaccacaaaugugacaaugccugcauagggucaaucagaaauggaacuuaugaccaugauguauacagagaugaagcauuaaacaaccgguuccagaucaaagguguugagcugaagucaggauacaaagauuggauccuauggauuuccuuugccauaucaugucuuuugcuuuguguugcuuuguugggguucaucaugugggccugccaaaaaggcaacauuaggugcaacauuugcauuuga

SEQ ID NO: 33468 - RNA, 1701 nt, Artificial Sequence; identical to SEQ ID NO: 33467
  derived and/or modified CDS sequence (wt) from hemagglutinin__InfluenzaA__ABK80256

SEQ ID NO: 33469 - RNA, 1701 nt, Artificial Sequence
  derived and/or modified CDS sequence (wt) from hemagglutinin__InfluenzaA__ABK80267
augaagacuaucauugcuuugagcuacauucuaugucugguuuucgcucaaaaacuucccggaaaugacaacagcacggcaacgcugugccuugggcaccaugcaguaccaaacggaacgauagugaaaacaaucacgaaugaccaaauugaaguuacuaaugcuacugagcugguucagaguuccucaacagguggaauaugcgacaguccucaucagauccuugauggagaaaacugcacacuaauagaugcucuauugggagacccucagugugauggcuuccaaaauaagaaaugggaccuuuuuguugaacgcagcaaagccuacagcaacuguuacccuuaugaugugccggauuaugucucccuuaggucacuaguugccucauccggcacacuggaguuuaacaaugaaagcuucaauuggacuggagucacucaaaauggaacaagcucugcuugcaaaaggagaucuaauaacaguuucuuuaguagauugaauugguugacccauuuaaaauucaaauacccagcauugaacgugacuaugccaaacaaugaaaaauuugacaaauuguacauuugggggguucaccacccggguacggacaaugaccaaaucagccuauaugcucaagcaucaggaagaaucacagucucuaccaaaagaagccaacaaacuguaaucccgaauaucggaucuagacccaggguaagggauauccccagcagaauaagcaucuauuggacaauaguaaaaccgggagacauacuuuugauuaacagcacagggaaucuaauugcuccucgggguuacuucaaaauacgaagugggaaaagcucaauaaugagaucagaugcacccauuggcaaaugcaauucugaaugcaucacuccaaauggaagcauucccaaugacaaaccauuucaaaauguaaacaggaucacauauggggccugucccagauauguuaagcaaaacacucugaaauuggcaacagggaugcgaaauguaccagagaaacaaacuagaggcauauuuggcgcaaucgcggguuucauagaaaaugguugggagggaaugguggaugguugguacgguuucaggcaucaaaauucugagggaauaggacaagcagcagaucucaaaagcacucaagcagcaaucaaccaaaucaaugggaagcugaauagguugaucgggaaaaccaacgagaaauuccaucagauugaaaaagaauucucagaaguagaagggagaauucaggaccucgagaaauauguugaggacacuaaaauagaucucuggucauacaacgcggagcuucuuguugcccuggagaaccaacauacaauugaucuaacugacucagaaaugaacaaacuguuugaaagaacaaagaagcaacugagggaaaaugcugaggauaugggcaaugguuguuucaaaauauaccacaaaugugacaaugccugcauagggucaaucagaaauggaacuuaugaccaugauguauacagagaugaagcauuaaacaaccgguuccagaucaaagguguugagcugaagucaggauacaaagauuggauccuauggauuuccuuugccauaucauguuuuuugcuuuguguugcuuuguugggguucaucaugugggccugccaaaaaggcaacauuaggugcaacauuugcauuuga

SEQ ID NO: 33470 - RNA, 1701 nt, Artificial Sequence
  derived and/or modified CDS sequence (wt) from hemagglutinin__InfluenzaA__ABK80278
augaagacuaucauugcuuugagcuacauucuaugucugguuuucgcucaaaaacuucccggaaaugacaacagcacggcaacgcugugccuugggcaccaugcaguaccaaacggaacgauagugaaaacaaucacgaaugaccaaauugaaguuacuaaugcuacugagcugguucagaguuccucaacagguggaauaugcgacaguccucaucagauccuugauggagaaaacugcacacuaauagaugcucuauugggagacccucagugugauggcuuccaaaauaagaaaugggaccuuuuuguugaacgcagcaaagccuacagcaacuguuacccuuaugaugugccggauuaugccucccuuaggucacuaauugccucauccggcacacuggaguuuaacaaugaaagcuucaauuggacuggagucacucaaaauggaacaagcucugcuugcaaaaggagaucuaauagcaguuucuuuaguagauuaaauugguugacccacuuaaaauucaaauacccagcauugaacgugacuaugccaaacaaugaagaauuugacaaauuguacauuugggggguucaccacccggguacauacaaugaccaaaucagccuauaugcucaagcaucaggaagaaucacagucucuaccaaaagaagccaacaaacuguaaucccgaauaucgggucuagacccaggguaagggauauccccagcagaauaagcaucuauuggacaauaguaaaaccgggagacauacuuuugauuaacagcacagggaaucuaauugcuccucgggguuacuucaaaauacgaagugggaaaagcucaauaaugagaucagaugcacccauuggcaaaugcaauucugaaugcaucacuccaaauggaagcauucccaaugacaaaccauuucaaaauguaaacaggaucacauauggggccugucccagauauguuaagcaaaacacucugaaauuggcaacagggaugcgaaauguaccagagaaacaaacuagaggcauauuuggcgcaaucgcggguuucauagaaaaugguugggagggaaugguggaugguugguacgguuucaggcaucaaaauucugagggaauaggacaagcagcagaucucaaaagcacucaagcagcaaucgaccaaaucaaugggaagcugaauagguugaucgggaaaaccaacgagaaauuccaucagauugaaaaagaauucucagaaguagaagggagaauucaggaccucgagaaauauguugaggacacuaaaauagaucucuggucauacaacgcggagcuucuuguugcccuggagaaccaacauacaauugaucuaacugacucagaaaugaacaaacuguuugaaagaacaaagaagcaacugagggaaaaugcugaggauaugggcaaugguuguuucaaaauauaccacaaaugugacaaugccugcauagggucaaucagaaauggaacuuaugaccaugauguauacagagaugaagcauuaaacaaccgguuccagaucaaagguguugagcugaagucaggauacaaagauuggauccuauggauuuccuuugccauaucauguuuuuugcuuuguguugcuuuguugggguucaucaugugggccugccaaaaaggcaacauuaggugcaacauuugcauuuga

SEQ ID NO: 33471 - RNA, 1701 nt, Artificial Sequence
  derived and/or modified CDS sequence (wt) from hemagglutinin__InfluenzaA__ABK80289
augaagacuaucauugcuuugagcuacauucuaugucugguuuucgcucaaaaacuucccggaaaugacaacagcacggcaacgcugugccuugggcaccaugcaguaccaaacggaacgauagugaaaacaaucacgaaugaccaaauugaaguuacuaaugcuacugagcugguucagaguuccucaacagguggaauaugcgacaguccucaucagauccuugauggagaaaacugcacacuaauagaugcucuauugggagacccucagugugauggcuuccaaaauaagaaaugggaccuuuuuguugaacgcagcaaagccuacagcaacuguuacccuuaugaugugccggauuaugccucccuuaggucacuaguugccucauccggcacacuggaguuuaacaaugaaagcuucaauuggacuggagucacucaaaauggaacaagcucugcuugcaaaaggagaucuaauaacaguuucuuuaguagauugaauugguugacccacuuaaaauucaaauacccagcauugaacgugacuaugccaaacaaugaaaaguuugacaaauuguacauuugggggguucaccacccggguacggacaaugaccaaaucuuccuguaugcucaagcaucaggaagaaucacaguuucuaccaaaagaagccaacaaacuguaaucccgaauaucggaucuagacccagaguaaggaauauccccaguagaauaagcauauauuggacaauaguaaaaccgggagacauacuuuugauuaacagcacagggaaucuaauugcuccuagggguuacuucaaaauacgaagugggaaaagcucaauaaugagaucagaugcacccauuggcaaaugcaauucugaaugcaucacuccaaauggaagcauucccaaugacaaaccauuucaaaauguaaacaggaucacauauggggccugucccagauauguuaagcaaaacacucugaaauuggcaacagggaugcgaaauguaccagagaaacaaacuagaggcauauuuggcgcaaucgcggguuucauagaaaaugguugggagggaaugguggaugguugguacgguuucaggcaucaaaauucugagggaacaggacaagcagcagaucucaaaagcacucaagcagcaaucaaucaaaucaaugggaagcugaauagguugaucgggaaaaccaacgagaaauuccaucagauugaaaaagaauucucagaaguagaagggagaauucaggaccucgagaaauauguugaggacacuaaaauagaucucuggucauacaacgcggagcuucuuguugcccuggagaaccaacauacaauugaucuaacugacucagaaaugaacaaacuguuugaaagaacaaagaagcaacugagggaaaaugcugaggauaugggcaaugguuguuucaaaauauaccacaaaugugacaaugccugcauaggaucaaucagaaauggaacuuaugaccaugauguauacagagaugaagcauuaaacaaccgguuccagaucaaaggcguugagcugaagucaggauacaaagauuggauccuauggauuuccuuugccauaucauguuuuuugcuuuguguugcuuuguugggguucaucaugugggccugccaaaaaggcaacauuaggugcaacauuugcauuuga

SEQ ID NO: 33472 - RNA, 1701 nt, Artificial Sequence
  derived and/or modified CDS sequence (wt) from hemagglutinin__InfluenzaA__ABK80300
augaagacuaucauugcuuugagcuacauuuuaugucugguuuucgcucaaaaacuucccggaaaugacaacagcacggcaacgcugugccuggggcaccaugcagugccaaacggaacgcuagugaaaacaaucacgaaugaccaaauugaagugacuaaugcuacugagcugguucagaguuccucaacagguagaauaugcgacaguccucaccaaauccuugauggagaaaacugcacacuaauagaugcucuauugggagacccucauugugauggcuuccaaaauaaggaaugggaccuuuuuguugaacgcagcaaagccuacagcaacuguuacccuuaugaugugccggauuaugucucccuuaggucacuaguugccucaucaggcacgcuggaguuuaacaaugaaagcuucaauuggacuggagucgcucagaauggaacaagcucugcuugcaaaaggagaucugauaaaaguuucuuuaguagauugaauugguugcaccaauuaaaauacaaauauccagcacugaacgugacuaugccaaacaaugaaaaauuugacaaauuguacauuugggggguucaccacccggguacagacagugaccaaaucagccuauaugcucaagcaucagggagagucacagucucuaccaaaagaagccaacaaacuguaaucccgaauaucggaucuagacccuggguaaggggugucuccagcagaauaagcaucuauuggacaauaguaaaaccgggagacauacuuuugauuaacagcacagggaaucuaauugcuccucgggguuacuucaaaauacgaagugggaaaagcucaauaaugaggucagaugcacccauuggcaaaugcaauucugaaugcaucacuccaaauggaagcauucccaaugacaaaccauuucaaaauguaaacaggaucacauaugggcccugucccagauauguuaagcaaaacacucugaaauuggcaacagggaugcggaaugugccagagaaacaaacuagaggcauauucggugcaaucgcgggcuucauagaaaaugguugggagggaaugauggacgguugguacgguuucaggcaucaaaauucugagggcacagggcaagcagcagaucuuaaaagcacucaagcagcaaucaaccaaaucaacgggaaacugaauagguuaaucgagaaaacgaacgagaaauuccaucaaauugaaaaggaauucucagaaguagaagggagaauucaggaccucgagaaauauguugaggacacuaaaauagaucucuggucguacaaugcggagcuucuuguugcccuggagaaccaacauacaauugaucuaacugacucagaaaugaacaaacuguuugaaagaacaaagaagcaacugagggaaaaugcugaggauaugggcaaugguuguuucaaaauauaccacaaaugugacaaugccugcauagggucaaucagaaaugggacuuaugaccaugauguauacagagacgaagcauugaacaaccgguuccagaucaaagguguugagcugaagucaggauacaaagauuggauccuauggauuuccuuugccauaucauguuuuuugcuuuguauuguuuugcugggguucaucaugugggccugccaaaaaggcaacauuaggugcaacauuugcauuuga

SEQ ID NO: 33473 - RNA, 1701 nt, Artificial Sequence
  derived and/or modified CDS sequence (wt) from hemagglutinin__InfluenzaA__ABK80311
augaagacuaucauugcuuugagcuacauuuuaugucugguuuucgcucaaaaacuucccggaaaugacaacagcacggcaacgcugugccuggggcaccaugcagugccaaacggaacgcuagugaaaacaaucacgaaugaccaaauugaagugacuaaugcuacugagcugguucagaguuccucaacagguagaauaugcgacaguccucaccaaauccuugauggagaaaacugcacacuaauagaugcucuauugggagacccucauugugauggcuuccaaaauaaggaaugggaccuuuuuguugaacgcagcaaagccuacagcaacuguuacccuuaugaugugccggauuaugucucccuuaggucacuaguugccucaucaggcacgcuggaguuuaacaaugaaagcuucaauuggacuggagucgcucagaauggaacaagcucugcuugcaaaaggagaucugauaaaaguuucuuuaguagauugaauugguugcaccaauuaaaauacaaauauccagcacugaacgugacuaugccaaacaaugaaaaauuugacaaauuguacauuugggggguucaccacccggguacagacagugaccaaaucagccuauaugcucaagcaucagggagagucacagucucuaccaaaagaagccaacaaacuguaaucccgaauaucggaucuagacccuggguaaggggugucuccagcagaauaagcaucuauuggacaauaguaaaaccgggagacauacuuuugauuaacagcacagggaaucuaauugcuccucgggguuacuucaaaauacgaagugggaaaagcucaauaaugaggucagaugcacccauuggcaaaugcaauucugaaugcaucacuccaaauggaagcauucccaaugacaaaccauuucaaaauguaaacaggaucacauauggacccugucccagauauguuaagcaaaacacucugaaauuggcaacagggaugcggaaugugccagagaaacaaacuagaggcauauucggugcaaucgcgggcuucauagaaaaugguugggagggaaugauggacgguugguacgguuucaggcaucaaaauucugagggcacagggcaagcagcagaucuuaaaagcacucaagcagcaaucaaccaaaucaacgggaaacugaauagguuaaucgagaaaacgaacgagaaauuccaucaaauugaaaaagaauucucagaaguagaagggagaauucaggaccucgagaaauauguugaggacacuaaaauagaucucuggucguacaaugcggagcuucuuguugcccuggagaaccaacauacaauugaucuaacugacucagaaaugaacaaacuguuugaaagaacaaagaagcaacugagggaaaaugcugaggauaugggcaaugguuguuucaaaauauaccacaaaugugacaaugccugcauagggucaaucagaaauggaacuuaugaccaugauguauacagagacgaagcauugaacaaccgguuccagaucaaagguguugagcugaagucaggauacaaagauuggauccuauggauuuccuuugccauaucauguuuuuugcuuuguauuguuuugcugggguucaucaugugggccugccaaaaaggcaacauuaggugcaacauuugcauuuga

SEQ ID NO: 33474 - RNA, 1707 nt, Artificial Sequence
  derived and/or modified CDS sequence (wt) from hemagglutinin__InfluenzaA__ABL07019
auggagaaaauagugcuucuucuuucaauagucagucuuguuaaaagugaucagauuugcauugguuaccaugcaaacaauucaacagagcagguugacacaaucauggaaaagaacguuacuguuacacaugcccaagacauacuggaaaagacacacaacgggaagcucugcgaucuagauggagugaagccucuaauuuuaagagauuguaguguagcuggauggcuccucgggaacccaaugugugacgaauucaucaacguaccggaauggucuuacauaguggaaaaggccaauccaaccaaugaccucuguuacccagggaguuucaacgacuaugaagaacugaaacaccuauugagcagaauaaaccauuuugagaaaauucagaucauccccaaaaguucuugguccgaucaugaagccucaucaggagugagcucagcauguccauaccugggaagucccuccuuuuuuagaaaugugguauggcuuaccaaaaagaacaguacauacccaacaauaaagaaaagcuacaauaauaccaaccaagaagaucuuuugguacuguggggaauucaccauccuaauaaugaggcagagcagacaaggcuauaucaaaacccaaccaccuauauuuccauugggacaucaacacuaaaccagagauugguaccaaaaauagcuacuagauccaaaguaaacgggcaaaguggaaggauggaguucuucuggacaauuuuaaaaccaaaugaugcaaucaacuucgagaguaauggaaauuucauugcuccagaauaugcauacaaaauugucaagaaaggggacucagcaauuaugaaaagugaauuggaauauaguaacugcaacaccaagugucaaacuccaaugggggcgauaaacucuaguaugccauuccacaacauacacccucucaccaucggggaaugccccaaauaugugaaaucaaacagauuaguccuugcaacagggcucagaaauagcccucaaagagagagcagaagaaaaaagagaggucuauuuggagcuauagcagguuuuauagagggaggauggcagggaaugguagaugguugguauggguaccaccauaguaaugagcaggggaguggguacgcugcagacaaagaaucuacucaaaaggcaauagauggagucaccaauaaggucaacucaauuauugacaaaaugaacacucaguuugaggccguuggaagggaauuuaauaacuuagaaaggagaauagagaauuuaaacaagaagauggaagacggguuucuagauguuuggacuuauaaugccgaacuucugguucucauggaaaaugagagaacucuagacuuucaugacucaaauguuaagaaccucuaugacaagguccgacuacagcuuagggauaaugcaaaggagcuggguaacgguuguuucgaguucuaucacaaaugugauaaugaauguauggaaaguauaagaaacggaacguacaacuauccgcaguauucagaagaagcaagauuaaaaagagaggaaauaagugggguaaaguuggaaucaauaggaacuuaccaaauacugucaauuuacucaacaguggcgaguucccuagcacuggcaaucaugauagcuggucuaucuuuauggaugugcuccaauggaucguuacaaugcagaauuugcauuuaa

SEQ ID NO: 33475 - RNA, 1707 nt, Artificial Sequence
  derived and/or modified CDS sequence (wt) from hemagglutinin__InfluenzaA__ABL07030
auggagaaaauagugcuucuucuugcaauagucagucuuguuaaaagugaucagauuugcauugguuaccaugcaaacaauucaacagagcagguugacacaaucauggaaaagaacguuacuguuacacaugcccaagacauacuggaaaagacacacaacgggaagcucugcgaucuagauggagugaagccucuaauuuuaagagauuguaguguagcuggauggcuccucgggaacccaaugugugacgaauucaucaauguaccggaauggucuuacauaguggagaaggccaauccaaccaaugaccucuguuacccagggaguuucaacgacuaugaagaacugaaacaucuauugagccgaauaaaccauuuugagaaaauucaaaucauccccaaaaguucuugguccgaucaugaagccucaucaggagugagcucagcauguccauaccugggaagucccuccuuuuuuagaaaugugguauggcuuaucaaaaagaacaguacauacccaacaauaaagaaaagcuacaauaauaccaaccaagaagaucuuuugguacuguggggaauucaccaucccaaugaugcagcagagcagacaaggcuauaucaaaacccaaccaccuauauuuccauugggacaucaacacuaaaccagagauugguaccaaaaauagcuacuagauccaaaguaaacgggcaaaguggaaggauggaguucuucugggcaauuuuaaaaccuaaugaugcaaucaacuucgagaguaauggaaauuucauugcuccagaauaugcauacaaaauugucaagaaaggggacucagcaauuaugaaaagugaauuggaauaugguaacugcaacaccaagugucaaacuccaaugggggcgauaaacucuaguaugccauuccacaacauacacccucucaccaucggggaaugccccaaauaugugaaaucaaacagauuaguccuugcaacagggcucagaaauagcccucaaagagagagcagaagaaaaaagagaggacuauuuggagcuauagcagguuuuauagagggaggauggcagggaaugguagauggcugguauggguaccaccauagcaaugagcaggggaguggguacgcugcagacaaagaauccacucaaaaggcaauagauggagucaccaauaaggucaacucaauuauugacaaaaugaacacucaguuugaggcuguuggaagggaauuuaauaacuuagaaaggagaauagagaauuuaaacaagaagauggaagacggguuucuagauguuuggacuuauaaugccgaacuucugguucucauggaaaaugagagaacucuagacuuucaugacucaaauguuaagaaccucuacgacaagguccgacuacagcuuagggauaaugcaaaagagcuggguaacgguuguuucgaguucuaucacaaaugugauaaugaauguauggaaaguauaagaaacggaacguacaacuauccgcaguauucagaagaagcaagauuaaaaagggaggaaauaagugggguaaaauuggaaucaauaggaacuuaccaaauacugucaauuuauucaacaguagcgaguucccuagcacuggcaaucaugauagcuggucuaucuuuauggaugugcuccaauggaucguuacaaugcagaauuugcauuuaa

SEQ ID NO: 33476 - RNA, 1707 nt, Artificial Sequence
  derived and/or modified CDS sequence (wt) from hemagglutinin__InfluenzaA__ABL10088
auggagaaaauagugcuucuuuuugcaauagucagucuuguuaaaagugaucagauuugcauugguuaccaugcaaacaacucgacagagcagguugacacaauaauggaaaagaacguuacuguuacacaugcccaagacauacuggaaaagacacacaacgggaagcucugcgaucuagauggagugaagccucuaauuuugagagauuguaguguagcuggauggcuccucggaaacccaaugugugacgaauucaucaaugugccggaaugguccuacauaguggagaaggccaauccagucaaugaccucuguuacccaggggauuucaaugacuaugaagaauugaaacaccuauugagcagaauaaaccauuuugagaaaauucagaucauccccaaaaguucuugguccagucaugaagccucauuaggggugagcucagcauguccauaccagggaaaguccuccuuuuucagaaaugugguauggcuuaucaaaaagaacaguacauacccaacaauaaagaggagcuacaauaauaccaaccaagaagaucuuuugguacugugggggauucaccauccuaaugaugcggcagagcagacaaagcucuaucaaaacccaaccaccuauauuuccguugggacaucaacacuaaaccagagauugguaccaagaauagcuacuagauccgaaguaaacgggcaaaguggaaggauggaguucuucuggacaauuuuaaaaccgaaugaugcaaucaacuucgagaguaauggaaauuucguugcuccagaauaugcauacaaaauugucaagaaaggggacucaacaauuaugaaaagugaauuggaauaugguaacugcaacaccaagugucaaacuccaaugggggcgauaaacucuaguaugccauuccacaauauacacccucucaccaucggggaaugccccaaauaugugaaaucaaacagauuaguccuugcgacugggcucagaaauagcccucaaagagagagaagaagaaaaaagagaggauuauuuggagcuauagcagguuuuauagagggaggauggcagggaaugguagaugguugguauggguaccaccauagcaaugagcaggggaguggguacgcugcaaacaaagaauccacucaaaaggcaauagauggagucaccaauaaggucaacucgaucauugacaaaaugaacacucaguuugaggccguuggaagggaauuuaacaacuuagaaaggagaauagagaauuuaaacaagaagauggaagacggguuccuagaugucuggacuuauaaugcugaacuucugguucucauggaaaaugagagaacucuagacuuucaugacucaaaugucaagaaccuuuacgacaagguccgacuacagcuuagggauaaugcaaaggaacuggguaacgguuguuucgaguucuaucauaaaugugauaaugaauguauggaaaguguaagaaacggaacguaugacuacccgcaguauucagaagaagcaagacuaaaaagagaggaaauaaguggaguaaaauuggaaucaauaggaauuuaccaaauacugucaauuuauucuacaguggcgaguucccuagcacuggcaaucaugguagcuggucuauccuuauggaugugcuccaaugggucguuacaaugcagaauuugcauuuaa

SEQ ID NO: 33477 - RNA, 1707 nt, Artificial Sequence
  derived and/or modified CDS sequence (wt) from hemagglutinin__InfluenzaA__ABL31766
auggagaaaauagugcuucuucuugcaauagucaguuuuguuaaaagugaucagauuugcauugguuaccaugcaaacaauucaacagagcagguugacacaaucauggaaaagaacguuacuguuacacaugcccaagacauacuggaaaagacacacaacgggaagcucugcgaucuagauggagugaagccucuaauuuuaagagauuguaguguagcuggauggcuccucgggaacccaaugugugacgaauucaucaauguaccggaauggucuuacauaguggagaaggccaauccaaccaaugaccucuguuacccagggaguuucaacgacuaugaagaacugaaacaucuauugagcagaauaaaccauuuugagaaaauucaaaucauccccaaaaguuccugguccgaucaugaagccucaucaggagugagcucagcauguccauaccugggaagucccuccuuuuuuagaaaugugguauggcuuaucaaaaagaacaguacauacccaacaauaaagaaaagcuacaauaauaccaaccaagaagaucuuuugguacuguggggaauucaccauccuaaugaugcggcagagcagacaaggcuauaucaaaacccaaccaccuauauuuccauugggacaucaacacuaaaccagagauugguaccaaaaauagcuacuagauccaaaguaaacgggcaaaguggaaggauggaguucuucugggcaauuuuaaaaccuaaugaugcaaucaacuucgagaguaauggaaauuucauugcuccagaauaugcauacaaaauugucaagaaaggggacucagcaauuaugaaaagugaauuggaauaugguaacugcaacaccaagugucaaacuccaaugggggcgauaaacucuaguaugccauuccacaacauacacccucucaccaucggggaaugccccaaauaugugaaaucaaacagauuaguccuugcaacagggcucagaaauagcccucaaagagagagcagaagaaaaaagagaggacuauuuggagcuauagcagguuuuauagagggaggauggcagggaaugguagauggcugguauggguaccaccauagcaaugagcaggggaguggguacgcugcagacaaagaauccacucaaaaggcaauagauggagucaccaauaaggucaacucaauuauugacaaaaugaacacucaguuugaggcuguuggaagggaauuuaauaacuuagaaaggagaauagagaauuuaaacaagaagauggaagacggguuucuagauguuuggacuuauaaugccgaacuucugguucucauggaaaaugagagaacucuagacuuucaugacucaaauguuaagaaccucuacgacaagguccgacuacagcuuagggauaaugcaaaagagcuggguaacgguuguuucgaguucuaucacaaaugugauaaugaauguauggaaaguauaagaaacggaacguacaacuauccgcaguauucagaagaagcaagauuaaaaagagaggaaauaagugggguaaaauuggaaucaauaggaacuuaccaaauacugucaauuuauucaacaguagcgaguucccuagcacuggcaaucaugauagcuggucuaucuuuauggaugugcuccaauggaucguuacaaugcagaauuugcauuuaa

SEQ ID NO: 33478 - RNA, 1707 nt, Artificial Sequence
  derived and/or modified CDS sequence (wt) from hemagglutinin__InfluenzaA__ABL31780
auggagaaaauaguacuucuucuuucaauagucagucuuguuaaaagugaucagauuugcauugguuaccaugcaaacaauucaacagagcagguugacacaaucauggaaaagaacguuacuguuacacaugcccaagacauacuggaaaagacacacaacgggaagcucugcgaucuagauggagugaagccucuaauuuuaagagauuguaguguagcuggauggcuccucgggaacccaaugugugacgaauucaucaacguaccggaauggucuuacauaguggagaaggccaauccaaccaaugaccucuguuacccagggaguuucaacgacuaugaagaacugaaacaccuauugagcagaauaaaccauuuugagaaaauucagaucauccccaaagguucuugguccgaucaugaagccucaucaggagugagcucagcauguccauaccugagaagucccuccuuuuuuagaaaugugguauggcuuaucaaaaagaacaguacauacccaacaauaaagaaaagcuacaauaauaccaaccaagaagaucuuuugguacuguggggaauucaccauccuaauaaugaggcagagcagacaaggcuauaucaaaacccaaccaccuauauuuccauugggacaucaacacuaaaccagagauugguaccaaaaauagcuacuagauccaaaguaaacgggcaaaguggaaggauggaguucuucuggacaauuuuaaaaccaaaugaugcaaucaacuucgagaguaauggaaauuucauugcuccagaauaugcauacaaaauugucaagaaaggggacucagcaauuaugaaaagugaauuggaauaugguaacugcaacaccaagugucaaacuccaaugggggcgauaaacucuaguaugccauuccacaacauacacccucucaccaucggggaaugccccaaauaugugaaaucaaacagauuaguccuugcaacagggcucagaaauagcccucaaagagagagcagaagaaaaaagagaggucuauuuggagcuauagcagguuuuauagagggaggauggcagggaaugguagaugguugguauggguaccaccauagcaaugagcaggggaguggguacgcugcagacaaagaaucuacucaaaaggcaauagauggagucaccaauaaggucaacucaauuauugacaaaaugaacacucaguuugaggccguuggaagggaauuuaauaacuuagaaaggagaauagagaauuuaaacaagaagauggaagacggguuucuagauguuuggacuuauaaugccgaacuucugguucucauggaaaaugagagaacucuagacuuucaugacucaaauguuaaaaaccucuaugacaagguccgacuacagcuuagggauaaugcaaaggagcuggguaacgguuguuucgaguucuaucacaaaugugauaaugaauguauggaaaguauaagaaacggaacguacaacuauccgcaguauucagaagaagcaagauuaaaaagagaggaaauaagugggguaaaguuggaaucaauaggaacuuaccaaauacugucaauuuacucaacaguggcgaguucccuagcacuggcaaucaugauagcuggucuaucuuuauggaugugcuccaauggaucguuacaaugcagaauuugcauuuaa

SEQ ID NO: 33479 - RNA, 1701 nt, Artificial Sequence
  derived and/or modified CDS sequence (wt) from hemagglutinin__InfluenzaA__ABL67165
augaagacuaucauugcuuugagcuacauucuaugucugguuuucgcucaaaaacuucccggaaaugacaacagcacggcaacgcugugccuugggcaccaugcaguaccaaacggaacgauagugaaaacaaucacaaaugaccaaauugaaguuacuaaugcuacugagcugguucagaguuccucaacaaguggaauaugcgacaguccucaucagauccuugauggagaaaacugcacacuaauagaugcucuauugggagacccucagugugauggcuuccaaaauaagaaaugggaccuuuuuguugaacgcagcaaagccuacagcaacuguuacccuuaugaugugccggaucaugccucccuuaggucacuaguugccucauccggcacacuggaguuuaacaaugaaagcuucgauuggacuggagucacucagaauggaacaagcucugcuugcaaaaggagaucuaauaaaaguuucuuuaguagauugaauugguugacccacuuaaaauacaaauacccagcauugaacgugacuaugccaaacaaugaaaaauuugacaaauuguacauuugggggguucaccacccggguacggacagugaccaaaucagccuauaugcucaagcaucaggaagaaucacagucucuaccaaaagaagccaacaaacuguaaucccgaauaucggaucuagacccaggguaagggaugucuccagccgaauaagcaucuauuggacaauaguaaaaccgggagacauacuuuugauuaacagcacagggaaucuaauugcuccucgggguuacuucaaaauacgaagugggaaaagcucaauaaugagaucagaugcacccauuggcaaaugcaauucugaaugcaucacuccaaauggaagcauucccaaugacaaaccauuucaaaauguaaacaggaucacauauggggccugucccagauauguuaagcaaaacacucugaaauuggcaacagggaugcgaaauguaccagagaaaaaaacuagaggcauauuuggcgcaaucgcagguuucauagaaaaugguugggagggaaugguggacgguugguacgguuucaggcaucaaaauucugagggcacaggacaagcagcagaucucaaaagcacucaagcagcaaucaaccaaaucaaugggaaacugaauagguuaaucgggaaaacaaacgagaaauuccaucagauugaaaaagaauucucagaaguagaagggagaauucaggaccucgagaaauauguugaggacacuaaaauagaucucuggucauacaacgcggagcuucuuguugcccuggagaaccaacauacaauugaucuaacugacucagaaaugaacaaacuguuugaaagaacaaagaagcaacugagggaaaaugcugaggauaugggcaaugguuguuucaaaauauaccacaaaugugacaaugccugcauagggucaaucagaaauggaacuuaugaccaugauguguacagagaugaagcauuaaacaaccgguuccagaucaaagguguugagcugaagucaggauauaaagauuggauccuauggauuuccuuugccauaucauguuuuuugcuuuguguugcuuuguugggguucaucaugugggccugccaaaaaggcaacauuaggugcaacauuugcauuuga

SEQ ID NO: 33480 - RNA, 1701 nt, Artificial Sequence
  derived and/or modified CDS sequence (wt) from hemagglutinin__InfluenzaA__ABL67176
augaagacuaucauugcuuugagcuacauuuuaugucugguuuucacucaaaaacuucccggaaaugacaacagcacggcaacgcugugccuggggcaccaugcagugccaaacggaacgcuagugaaaacaaucacgaaugaccaaauugaagugacuaaugcuacugagcugguucagaguuccucaacagguggaauaugcgacaguccucaccaaauccuugauggagaaaacugcacacuaauagaugcucuauugggagacccucauugugauggcuuccaaaauaaggaaugggaccuuuuuguugaacgcagcagagccuacagcaacuguuacccuuaugaugugccggauuaugccucccuuaggucacuaguugccucauccggcacacuggaguuuaacaaugaaagcuucaauuggacuggagucgcucagaauggaacaagcucugcuugcaaaaggagaucuaauaaaaguuucuuuaguagauugaauugguugcaccaauuaaaauacaaauacccagcacugaacgugacuaugccaaacaaugaaaaauuugacaaauuguacauuugggggguucaccacccgaguacggacagugaccaaaucagccuauaugcucaagcaccagggagagucacagucucuaccaaaagaagccaacaaacuguaaucccgaauaucggaucuagacccuggguaaggggugucuccagcagaauaagcaucuauuggacaauaguaaaaccgggagacauacuuuugauuaacugcacagggaaucuaauugcuccucgggguuacuucaaaauacgaagugggaaaagcucaauaaugaggucagaugcauccauuggcaaaugcaauucugaaugcaucacuccaaauggaagcauucccaaugacaaaccauuucaaaauguaaacaggaucacauauggggccugucccagauauguuaagcaaaacacucugaaauuggcaacagggaugcggaauguaccagagaaacaaacuagaggcauauucggcgcaaucgcggguuucauagaaaaugguugggagggaaugguggacgguugguacgguuucaggcaucaaaauucugagggcacaggacaagcagcagaucucaaaagcacucaagcagcaaucaaccaaaucaacgggaaacugaauagguuaaucgagaaaacgaacgagaaauuccaucaaauugaaaaagaauucucagaaguggaagggagaauucaggaccucgagaaauauguugaggacacuaaaauagaucucuggucguacaacgcggagcuucuuguugcccuggagaaccagcauacaauugaucuaacugacucagaaaugaacaaacuguuugaaagaacaaagaagcaacugagggaaaaugcugaggauaugggcaaugguuguuucaaaauauaccacaaaugugacaaugccugcauagggucaaucagaaaugggacuuaugaccaugauguauacagagacgaagcauuaaacaaccgguuccagaucaaagguguugagcugaagucaggauacaaagauuggauccuauggauuuccuuugccauaucauguuuuuugcuuuguguugucuugcugggguucaucaugugggccugccaaaaaggcaacauuaggugcaacauuugcauuuga

SEQ ID NO: 33481 - RNA, 1701 nt, Artificial Sequence; identical to SEQ ID NO: 33444
  derived and/or modified CDS sequence (wt) from hemagglutinin__InfluenzaA__ABL67187

SEQ ID NO: 33482 - RNA, 1701 nt, Artificial Sequence; identical to SEQ ID NO: 33399
  derived and/or modified CDS sequence (wt) from hemagglutinin__InfluenzaA__ABL67209

SEQ ID NO: 33483 - RNA, 1701 nt, Artificial Sequence; identical to SEQ ID NO: 32981
  derived and/or modified CDS sequence (wt) from hemagglutinin__InfluenzaA__ABL67253

SEQ ID NO: 33484 - RNA, 1701 nt, Artificial Sequence
  derived and/or modified CDS sequence (wt) from hemagglutinin__InfluenzaA__ABL67264
augaaagcaaaacuacugguccuguuaugugcacuuucagcuacagaugcagacacaauauguauaggcuaccaugcgaacaacucaaccgacacuguugacacaguacucgaaaagaacgugacagugacacacucugucaaccuacuugaggacaaucacaacggaaaacuaugcaaacuaaaaggaauagccccacuacaauuggggaaaugcagcauugccggauggaucuuaggaaacccagaaugcgaaucacuguuuucuaagaaaucaugguccuacauugcagaaacaccaaacuccgagaauggaacauguuacccaggguauuucgccgacuaugaggaacugagggaacaauugaguucaguaucaucauucgagagauucgaaauauuccccaaggaaaguucauggcccaaacacaacguaaccaaaggaguaacggcaucaugcucccauaaggggaaaagcaguuuuuacagaaauuugcuauggcugacggagaaaaauggcucguacccaaaucugagcaaguccuaugugaacaacaaagagaaagaaguccuuguacuaugggguguucaucacccgucuaacauagaggaccaaaagaccaucuaucguaaagaaaaugcuuaugucucuguagugucuucacauuauaacaggagauucaccccagaaauagcaaaaagacccaaaguaagaaaucaagaagggagaauuaacuacuacuggacucugcuggaacccggggacacaauaauauuugaggcaaauggaaaucuaauagcgccaugguaugcuuucgcauugaguagaggcuuugggucaggaaucaucaccucaaacgcaucgauggaugaaugugacgcgaagugucaaacaccccagggagcuauaaacaguaguuuuccuuuucagaauguacacccagucacaauaggagagugcccaaaguacgucaggaguacaaaauuaaggaugguuacaggacuaaggaacaucccauccauucaauccagagguuuguuuggagccauugccgguuucauugaagggggauggacuggaaugauugauggaugguaugguuaucaucaucagaaugaacagggaucuggcuaugcugcggaucaaaaaagcacacaaaaugccauuaacgggauuacaaacaaggugaacucuauaaucgagaaaaugaacacucaauucacagcuguggguaaagaauucaacaaacuagaaaaaaggauggaaaacuuaaauaaaaaaguugaugauggauuucuggacauuuggacauauaaugcagaauuguugguucuacuggaaaaugaaaggacuuuggauuuccaugacucaaaugugaagaaccuguaugagaaaguaaaaagccaauuaaagaauaaugccaaagaaauaggaaacggguguuuugaauucuaccacaaguguaacaaugaaugcauggaaaguguaaaaaaugggacuuaugacuauccaaaauauucagaagaaucaaaguuaaacagggaaaaaauugauggagugaaauuggaaucaaugggagucuaucagauucuggcgaucuacucaacugucgccaguucacuggugcuuuuggucucccugggggcaaucagcuucuggauguguucuaaugggucuuugcagugcagaauaugcaucuga

SEQ ID NO: 33485 - RNA, 1701 nt, Artificial Sequence
  derived and/or modified CDS sequence (wt) from hemagglutinin__InfluenzaA__ABL67275
augaagacuaucauugcuuugagcuacauuuuaugucugguuuucgcucaaaaacuucccguaaaugacaacagcacggcaacgcugugccugggacaccaugcagugccaaacggaacgcuagugaaaacaaucacgaaugaccacauugaagugacuaaugcuacugagcugguucagaguuccucaacggguagaauaugcgacaguccucaccaaauccuugauggagaaaacugcacacuaauagaugcucuauugggagacccucauugugauggcuuccaaaauaaggaaugggaccuuuuuguugaacgcagcacagccuacagcaacuguuacccuuaugaugugccggauuaugccucccuuaggucacuaguugccucauccggcacacuggaguuuaacaaugaaagcuucaauuggacuggagucgcucagaauggaacaagcucugcuugcaaaaggagaucuauuaaaaguuucuuuaguagauugaauugguugcaccaauuaaaauacaaauauccagcacugaacgugacuaugccaaacaaugaaaaauuugacaaauuguacauuugggggguucaccacccgaguacggacagugaccaaaucagccuauaugcucaagcaucagggagagucacagucucuaccaaaagaagccaacaaacuguaaucccgaauaucggaucuagacccuggguaaggggugucuccagcagaauaagcaucuauuggacaauaguaaaaccgggagacauacuuuugauuaacagcacagggaaucuaauugcuccucgggguuacuuuaaaauacgaaguggaaaaagcucaauaaugaggucaaaugcacccauuggcaaaugcaauucugaaugcaucacuccaaauggaagcauucccaaugacaaaccauuucaaaauguaaacaggaucacauauggggccugucccagauauguuaagcaaaacacucugaaauuggcaacagggaugcggaauguaccagagaaacaaacuagaggcauauucggcgcaaucgcggguuucauagaaaaugguugggaggggaugguggacgguugguacgguuucaggcaucaaaauucugagggcacaggacaagcagcagaucuuaaaagcacucaagcagcaaucaaccaaaucaacgggaaacugaauagguuaaucgagaaaacaaacgagaaauuccaucaaauugaaaaagaauucucagaaguagaagggagaauucaggaccucgagaaauauguugaggacacuaaaauagaucucuggucguacaacgcggagcuucuuguugcccuggagaaccaacauacaauugaucuaacugacucagaaaugaacaaacuguuugaaagaacaaggaagcaacugagggaaaaugcugaggaugugggcaaugguuguuucaaaauauaccacaaaugugacaaugccugcauagggucaaucagaaauggaacuuaugaccaugauguauacagagacgaagcauuaaacaaccgguuccagaucaaagguguuaagcugaagucaggauacaaagauuggauccuauggauuuccuuugccauaucauguuuuuugcuuuguguuguuuugcugggguucaucaugugggccugccaaaaaggcaacauuaggugcaacauuugcauuuga

SEQ ID NO: 33486 - RNA, 1701 nt, Artificial Sequence
  derived and/or modified CDS sequence (wt) from hemagglutinin__InfluenzaA__ABL67286
augaagacuaucauugcuuugagcuacauuuuaugucugguuuucgcucaaaaacuucccggaaaugacaacagcacggcaacgcugugccuggggcaccaugcagugccaaacggaacgcuagugaaaacaaucacgaaugaccaaauugaagugacuaaugcuacugagcugguucagaguuccucaacagguagaauaugcgacaguccucaccaaauccuugauggagaaaacugcacacuaauagaugcucuauugggagacccucauugugauggcuuccaaaauaaggaaugggaccuuuuuguugaacgcagcaaagccuacagcaacuguuacccuuaugaugugccggauuaugucucccuuaggucacuaguugccucaucaggcacgcuggaguuuaacaaugaaagcuucaauuggacuggagucgcucagaauggaacaagcucugcuugcaaaaggagaucugauaaaaguuucuuuaguagauugaauugguugcaccaauuaaaauacaaauauccagcacugaacgugacuaugccaaacaaugaaaaauuugacaaauuguacauuugggggguucaccacccggguacagacagugaccaaaucagccuauaugcucaagcaucagggagagucacagucucuaccaaaagaagccaacaaacuguaaucccgaauaucggaucuagacccuggguaaggggugucuccagcagaauaagcaucuauuggacaauaguaaaaucgggagacauacuuuugauuaacagcacagggaaucuaauugcuccucgggguuacuucaaaauacgaagugggaaaagcucaauaaugaggucagaugcacccauuggcaaaugcaauucugaaugcaucacuccaaauggaagcauucccaaugacaaaccauuucaaaauguaaacaggaucacauaugggcccugucccagauauguuaagcaaaacacucugaaauuggcaacagggaugcggaaugugccagagaaacaaacuagaggcauauucggugcaaucgcgggcuucauagaaaaugguugggagggaaugauggacgguugguacgguuucaggcaucaaaauucugagggcacagggcaagcagcagaucuuaaaagcacucaagcagcaaucaaccaaaucaacgggaaacugaauagguuaaucgagaaaacgaacgagaaauuccaucaaauugaaaaagaauucucagaaguagaagggagaauucaggaccucgagaaauauguugaggacacuaaaauagaucucuggucguacaaugcggagcuucuuguugcccuggagaaccaacauacaauugaucuaacugacucagaaaugaacaaacuguuugaaagaacaaagaagcaacugagggaaaaugcugaggauaugggcaaugguuguuucaaaauauaccacaaaugugacaaugccugcauagggucaaucagaaauggaacuuaugaccaugauguauacagagacgaagcauugaacaaccgguuccagaucaaagguguugagcugaagucaggauacaaagauuggauccuauggauuuccuuugccauaucauguuuuuugcuuuguauuguuuugcugggguucaucaugugggccugccaaaaaggcaacauuaggugcaacauuugcauuuga

SEQ ID NO: 33487 - RNA, 1701 nt, Artificial Sequence; identical to SEQ ID NO: 33017
  derived and/or modified CDS sequence (wt) from hemagglutinin__InfluenzaA__ABL67297

SEQ ID NO: 33488 - RNA, 1701 nt, Artificial Sequence
  derived and/or modified CDS sequence (wt) from hemagglutinin__InfluenzaA__ABL67308
augaagacuaucauugcuuugagcuacauuuuaugucugguuuucgcucaaaaacuucccggaaaugacaacagcauggcaacgcugugccuggggcaccaugcagugccaaacggaacgcuagugaaaacaaucacgaaugaccaaauugaagugacuaaugcuacugagcugguucagaguuccucaacagguagaauaugcgacaguccucaccaaauccuugauggagaaaacugcacacuaauagaugcucuauugggagacccucauugugauggcuuccaaaauaaggaaugggaccuuuuuguugaacgcagcaaagccuacagcagcuguuacccuuaugaugugccggauuaugucucccuuaggucacuaguugccucaucaggcacgcuggaguuuaacaaugaaagcuucaauuggacuggagucgcucagaauggaacaagcucugcuugcaaaaggagaucugauaaaaguuucuuuaguagauugaauugguugcaucaauuaaaauacaaauauccggcacugaacgugacuaugccaaacaaugaaaaauuugacaaauuguacauuugggggguucaccacccggguacagacagugaccaaaucagccuauaugcucaagcaucagggagagucacagucucuaccaaaagaagccaacaaacuguaaucccgaauaucggaucuagacccuggguaaggggugucuccagcagaauaagcaucuauuggacaauaguaaaaccgggagacauacuuuugauuaacagcacagggaaucuaauugcuccucgggguuacuucaaaauacgaagugggaaaagcucaauaaugaggucagaugcacccauugacaaaugcaauucugaaugcaucacuccaaauggaagcauucccaaugacaaaccauuucaaaauguaaacaggaucacauaugggcucugucccagauauguuaagcaaaacacucugaaauuggcaacagggaugcggaaugugccagagaaacaaacuagaggcauauucggugcaaucgcgggcuucauagaaaaugguugggagggaaugauggacgguugguacgguuucaggcaucaaaauucugagggcacagggcaagcagcagaucuuaaaagcacucaagcagcaaucaaccaaaucaacgggaaacugaauagguuaaucgaaaaaacgaacgagaaauuccaucaaauugaaaaagaauucucagaaguagaagggagaauucaggaccucgagaaauauguugaggacacuaaaauagaucucuggucguacaaugcggagcuucuuguugcccuggagaaccaacauacaauugaucuaacugacucagaaaugaacaaacuguuugaaagaacaaagaagcaacugagggaaaaugcugaggauaugggcaaugguuguuucaaaauauaccacaaaugugacaaugccugcauagggucaaucagaaauggaacuuaugaccaugauguauacagagacgaagcauugaacaaccgguuccagaucaaagguguugagcugaagucaggauacaaagauuggauccuauggauuuccuuugccauaucauguuuuuugcuuuguauuguuuugcugggguucaucaugugggccugccaaaaaggcaacguuaggugcaacauuugcauuuga

SEQ ID NO: 33489 - RNA, 1701 nt, Artificial Sequence; identical to SEQ ID NO: 33319
  derived and/or modified CDS sequence (wt) from hemagglutinin__InfluenzaA__ABL67319

SEQ ID NO: 33490 - RNA, 1701 nt, Artificial Sequence
  derived and/or modified CDS sequence (wt) from hemagglutinin__InfluenzaA__ABL67330
augaagacuaucauugcuuugagcuacauuuuaugccugguuuucgcucaaaaacuucccggaaaugacaacagcacggcaacgcugugccuggggcaucaugcggugccaaacggaacgcuagugaaaacaaucacgaaugaccaaauugaaguaacuaaugcuacugagcugguucagaguuccucaacagguagaauaugcgacaguccucaucaaauccuugauggagaaaacugcacacuaauagaugcucuauugggagacccucauugugauggcuuccaaaauaaggaaugggaccuuuuuguugaacgcagcaaagccuacagcaacuguuacccuuaugaugugccggauuaugucucccuuaggucacuaguugccucaucaggcacgcuggaguuuaacaaugaaagcuucaauuggacuggagucgcucagaauggaacaagcucugcuugcaaaaggagaucugauaaaaguuucuuuaguagauugaauugguugcaccaauuaaaauacaaauauccagcucugaacgugacuaugccaaacaaugaaaaauuugacaaauuguacauuugggggguucaccacccggguacagacagugaccaaaucagccuauaugcucaagcaucagggagagucacagucucuaccaaaagaagccaacaaacuguaaucccgaauaucggaucuagacccuggguaaggggugucuccagcagaauaagcaucuauuggacaauaguaaaaccgggagacauacuuuugauuaacagcacagggaaucuaauugcuccucgggguuacuucaaaauacgaagugggaaaagcucaauaaugaggucagaugcacccauuggcaaaugcaauucugaaugcaucacuccaaauggaagcauucccaaugacaaaccauuucaaaauguaaacaggaucacauauggggccugucccagauauguuaagcaaaacacucugaaauuggcaacagggaugcggaaugugccagagaaacaaacuagaggcauauucggugcaaucgcgggcuucauagaaaaugguugggagggaaugauggacgguugguacgguuucaggcaucaaaauucugagggcacagggcaagcagcagaucuuaaaagcacucaagcagcaaucaaccaaaucaacgggaaacugaauagguuaaucgagaaaacgaacgagaaauuccaucaaauugaaaaagaauucucagaaguagaagggagaauucaggaccucgagaaauauguggaggacacuaaaauagaucucuggucguacaaugcggagcuucuuguugcccuggagaaccaacauacaauugaucuaacugacucagaaaugaacaaacuguuugaaagaacaaagaagcaacugagggaaaaugcugaggauaugggcaaugguuguuucaaaauauaccacaaaugugacaaugccugcauagggucaaucagaaauggaacuuaugaccaugauguauacagagacgaagcauugaacaaccgguuccagaucaaagguguugagcugaagucaggauacaaagauuggauccuauggauuuccuuugccauaucauguuuuuugcuuuguauuguuuugcugggguucaucaugugggccugccaaaaaggcaacauuaggugcaacauuugcauuuga

SEQ ID NO: 33491 - RNA, 1701 nt, Artificial Sequence; identical to SEQ ID NO: 32532
  derived and/or modified CDS sequence (wt) from hemagglutinin__InfluenzaA__ABL67341

SEQ ID NO: 33492 - RNA, 1701 nt, Artificial Sequence
  derived and/or modified CDS sequence (wt) from hemagglutinin__InfluenzaA__ABL67352
augaagacuaucauugcuuugagcuacauucuaugucugguuuucgcucaaaaacuucccggaaaugacaacagcacggcaacgcugugccuugggcaccaugcaguaccaaacggaacgauagugaaaacaaucacaaaugaccaaauugaaguuacuaaugcuacugagcugguucagaguuccucaacagguggaauaugcgacaguccucaucagauccuugauggagaaaacugcacacuaauagaugcucuauugggagacccucagugugauggcuuccaaaauaagaaaugggaccuuuuuguugaacgcagcaaagccuacagcaacuguuacccuuaugaugugccggaucaugccucccuuaggucacuaguugcuucauccggcacacuggaguuuaacaaugaaagcuucgauuggacuggagucacucagaauggaacaagcucugcuugcaaaaggagaucuaauaaaaguuucuuuaguagauugaauugguugacccacuuaaaauacaaauacccagcauugaacgugacuaugccaaacaaugaaaaauuugacaaauuguacauuugggggguucaccacccggguacggacagugaccaaaucagccuauaugcucaagcaucaggaagaaucacagucucuaccaaaagaagccaacaaacuguaaucccgaauaucggaucuagacccaggguaagggaugucuccagccgaauaagcaucuauuggacaauaguaaaaccgggagacauacuuuugauuaacagcacagggaaucuaauugcuccucgggguuacuucaaaauacgaagugggaaaagcucaauaaugagaucagaugcacccauuggcaaaugcaauucugaaugcaucacuccaaauggaagcauuccaaaugacaaaccauuucaaaauguaaacaggaucacauauggggccugccccagauauguuaagcaaaacacucugaaauuggcaacagggaugcgaaauguaccagagaaacaaacuagaggcauauuuggcgcaaucgcggguuucauagaaaaugguugggagggaaugguggacgguugguacgguuucaggcaucaaaauucugagggcacaggacaagcagcagaucucaaaagcacucaagcagcaaucaaccaaaucaaugggaaacugaauagguuaaucgggaaaacaaacgagaaauuccaucagauugaaaaagaauucucagaaguagaagggagaauucaggaccucgagaaauauguugaggacacuaaaauagaucucuggucauacaacgcggagcuucuuguugcccuggagaaccaacauacaauugaucuaacugacucagaaaugaacaaacuguuugaaagaacaaagaagcaacugagggaaaaugcugaggauaugggcaaugguuguuucaaaauauaccacaaaugugacaaugccugcauagggucaaucagaaauggaacuuaugaccaugauguguacagagaugaagcauuaaacaaccgguuccagaucaaagguguugagcugaagucaggauauaaagauuggauccuauggauuuccuuugccauaucauguuuuuugcuuuguguugcuuuguugggguucaucaugugggccugccaaaaaggcaacauuaggugcaacauuugcauuuga

SEQ ID NO: 33493 - RNA, 1701 nt, Artificial Sequence
  derived and/or modified CDS sequence (wt) from hemagglutinin__InfluenzaA__ABL67363
augaagacuaucauugcuuugagcuacauucuaugucugguuuucgcucaaaaacuucccggaaaugacaacagcacggcaacgcugugccuugggcaccaugcaguaccaaacggaacgauagugaaaacaaucacgaaugaccaaauugaaguuacuaaugcuacugagcugguucagaguuccucaacagguggaauaugcgacaguccucaucagauccuugauggagaaaacugcacacuaauagaugcucuauugggagacccucagugugauggcuuccaaaauaagaaaugggaccuuuuuguugaacgcagcaaagccuacagcaacuguuacccuuaugaugugccggauuaugccucccuuaggucacuaguugccucauccggcacacuggaguuuaacaaugaaagcuucgauuggacuggagucacucagaauggaacaagcucugcuugcaaaaggagaucuaauaaaaguuucuuuaguagauugaauugguugacccacuuaaaauacaaauacccagcauugaacgugacuaugccaaacaaugaaaaauuugacaaauuguacauuugggggguucaccacccggguacggacagugaccaaaucagccuauaugcucaagcaucaggaagaaucacagucucuaccaaaagaagccaacaaacuguaaucccgaauaucggaucuagacccaggguaagggaugucuccagccgaauaagcaucuauuggacaauaguaaaaccgggagacauacuuuugauuaacagcacagggaaucuaauugcuccucgggguuacuucaaaauacgaagugggaaaagcucaauaaugagaucagaugcacccauuggcaaaugcaauucugaaugcaucacuccaaauggaagcauucccaaugacaaaccauuucaaaauguaaacaggaucacauauggggccugucccagauauguuaagcaaaacacucugaaauuggcaacagggaugcgaaauguaccagagaaacaaacuagaggcauauuuggcgcaaucgcggguuucauagaaaaugguugggagggaaugguggacgguugguacgguuucaggcaucaaaauucugagggcacaggacaagcagcagaucucaaaagcacucaagcagcaaucaaccaaaucaaugggaaacugaauagguuaaucgggaaaacaaacgagaaauuccaucagauugaaaaagaauucucagaaguagaagggagaauucaggaccucgagaaauauguugaggacacuaaaauagaucucuggucauacaacgcggagcuucuuguugcccuggagaaccaacauacaauugaucuaacugacucagaaaugaacaaacuguuugaaagaacaaagaagcaacugagggaaaaugcugaggauaugggcaaugguuguuucaaaauauaccacaaaugugacaaugccugcauagggucaaucagaaauggaacuuaugaccaugauguguacagagaugaagcauuaaacaaccgguuccagaucaaagguguugagcugaagucaggauauaaagauuggauccuauggauuuccuuugccauaucauguuuuuugcuuuguguugcuuuguugggguucaucaugugggccugccaaaaaggcaacauuaggugcaacauuugcauuuga

SEQ ID NO: 33494 - RNA, 1701 nt, Artificial Sequence
  derived and/or modified CDS sequence (wt) from hemagglutinin__InfluenzaA__ABL67374
augaagacuaucauugcuuugagcuacauccuaugucugguuuucgcucaaaaacuucccggaaaugacaacagcacggcaacgcugugccuugggcaccaugcaguaccaaacggaacgauagugaaaacaaucacgaaugaccaaauugaaguuacuaaugcuacugagcugguucagaguuccucaacagguggaauaugcgacaguccucaucagauccuugauggagaaaacugcacacuaauagaugcucuauugggagacccucagugugauggcuuccaaaauaagaaaugggaccuuuuuguugaacgcagcaaagcccacagcaacuguuacccuuaugaugugccggauuaugccucccuuaggucacuaauugccucauccggcacacuggaguuuaacaaugaaagcuucaauuggacuggagucacucagaauggaacaagcucugcuugcaaaaggagaucuaaucaaaguuucuuuaguagauugaauugguugacccauuuaaaauucaaauacccagcauugaacgugacuaugccaaacaaugaaaaauuugacaaauuguacauuugggggguucaccacccggguacggacagugaccaaaucagccuauaugcucaagcaccaggaagaaucacagucucuaccaaaagaagccagcaaacuguaaucccgaauaucggaucuagacccaggguaagggauaucuccagcagaauaagcaucuauuggacaauaguaaaaccgggagacauacuuuugauuaacagcacagggaaucuaauugcuccucgggguuacuucaaaaugcgaagugggaaaagcucaauaaugaaaucagaugcacccauuggcaaaugcaauucugaaugcaucacuccaaauggaagcauucccaaugacaaaccauuucaaaauguaaacaggaucacauauggggccugucccagauauguuaagcaaaacacucugaaauuggcaacagggaugcgaaauguaccagagaaacaaacuagaggcauauuuggcgcaauugcggguuucauagaaaaugguugggagggaaugguggacgguugguacgguuucaggcaucagaauucugagggcacaggacaagcagcagaucucaaaagcacucaagcagcaaucaaccaaaucaaugggaaacugaauagguuaaucgggaaaacaaacgagaaauuccaucagauugaaaaagaauucucagaaguagaagggagaauucaggaccucgagaaauauguugaggacacuaaaauagaucucuggucauacaacgcggagcuucuuguugcccuggagaaccaacauacaauugaucuaacugacucagaaaugaacaaacuguuugaaagaacaaagaagcaacugagggaaaaugcugaggauaugggcgaugguuguuucaaaauauaccacaaaugugacaaugccugcauagggucaaucagaaauggaacuuaugaccaugauguauacagagaugaagcauuaaacaaccgguuccagaucaaagguguugagcugaagucaggauacaaagauuggauccuauggauuuccuuugccauaucaugucuuuugcuuuguguugcuuuguugggguucaucaugugggccugccaaaaaggcaacauuaggugcaacauuugcauuuga

SEQ ID NO: 33495 - RNA, 1701 nt, Artificial Sequence; identical to SEQ ID NO: 32334
  derived and/or modified CDS sequence (wt) from hemagglutinin__InfluenzaA__ABL67385

SEQ ID NO: 33496 - RNA, 1701 nt, Artificial Sequence
  derived and/or modified CDS sequence (wt) from hemagglutinin__InfluenzaA__ABL67396
augaagacuaucauugcuuugagcuacauucuaugucugguuuucgcucaaaaacuucccggaaaugacaacagcacggcaacgcugugccuugggcaccaugcaguaccaaacggaacgauagugaaaacaaucacgaaugaccaaauugaaguuacuaaugcuacugagcugguucagaguuccucaacagguggaauaugcgacaguccucaucagauccuugauggagaaaacugcacacuaauagaugcucuauugggagacccucagugugauggcuuccaaaauaagaaaugggaccuuuuuguugaacgcagcaaagccuacagcaacuguuacccuuaugaugugccggauuaugucucccuuaggucacuaguugccucauccggcacacuggaguuuaacaaugaaagcuucaauuggacuggagucacucaaaauggaacaagcucugcuugcaaaaggagaucuaauaacaguuucuuuaguagauugaauugguugacccauuuaaaauucaaauacccagcauugaacgugacuaugccaaacaaugaaaaauuugacaaauuguacauuugggggguucaccacccggguacggacaaugaccaaaucagccuauaugcucaagcaucaggaagaaucacagucucuaccaaaagaagccaacaaacuguaaucccgaauaucggaucuagacccaggguaagggauauccccagcagaauaagcaucuauuggacaauaguaaaaccgggagacauacuuuugauuaacagcacagggaaucuaauugcuccucgggguuacuucaaaauacgaagugggaaaagcucaauaaugagaucagaugcacccauuggcaaaugcaauucugaaugcaucacuccaaauggaagcauucccaaugacaaaccauuucagaauguaaacaggaucacauauggggccugucccagauauguuaagcaaaacacucugaaauuggcaacagggaugcgaaauguaccagagaaacaaacuagaggcauauuuggcgcaaucgcggguuucauagaaaaugguugggagggaaugguggaugguugguacgguuucaggcaucaaaauucugagggaauaggacaagcagcagaucucaaaagcacucaagcagcaaucaaccaaaucaaugggaagcugaauagguugaucgggaaaaccaacgagaaauuccaucagauugaaaaagaauucucagaaguagaagggagaauucaggaccucgagaaauauguugaggacacuaaaauagaucucuggucauacaacgcggagcuucuuguugcccuggagaaccaacauacaauugaucuaacugacucagaaaugaacaaacuguuugaaagaacaaagaagcaacugagggaaaaugcugaggauaugggcaaugguuguuucaaaauauaccacaaaugugacaaugccugcauagggucaaucagaaauggaacuuaugaccaugauguauacagagaugaagcauuaaacaaccgguuccagaucaaagguguugagcugaagucaggauacaaagauuggauccuauggauuuccuuugccauaucauguuuuuugcuuuguguugcuuuguugggguucaucaugugggccugccaaaaaggcaacauuaggugcaacauuugcauuuga

SEQ ID NO: 33497 - RNA, 1701 nt, Artificial Sequence
  derived and/or modified CDS sequence (wt) from hemagglutinin__InfluenzaA__ABL67407
augaagacuaucauugcuuugagcuacauucuaugucugguuuucgcucaaaaacuucccggaaaugacaacagcacggcaacgcugugccuugggcaccaugcaguaccaaacggaacgauagugaaaacaaucacgaaugaccaaauugaaguuacuaaugcuacugagcugguucagaguuccucaacagguggaauaugugacaguccucaucagauccuugauggagaaaacugcacacuaauagaugcucuauugggagacccucagugugauggcuuccaaaauaagaaaugggaccuuuuuguugaacgcagcaaagccuacagcaacuguuacccuuaugaugugccggauuaugccucccuuaggucacuaguugccucauccggcacacuggaguuuaacaaugaaagcuucaauuggacuggagucacucaaaauggaacaagcucugcuugcaaaaggagaucuaauaacaguuucuuuaguagauugaauugguugacccacuuaaaauucaaauacccagcauugaacgugacuaugccaaacaaugaaaaauuugacaaauuguacauuugggggguucaccacccggguacggacaaugaccaaaucuuccuguaugcucaagcaucaggaagaaucacagucucuaccaaaagaagccaacaaacuguaaucccgaauaucggaucuagacccagaguaaggaauauccccagcagaauaagcaucuauuggacaauaguaaaaccgggagacauacuuuugauuaacagcacagggaaucuaauugcuccuagggguuacuucaaaauacgaagugggaaaagcucaauaaugagaucagaugcacccauuggcaaaugcaauucugaaugcaucacuccaaauggaaguauucccaaugacaaaccauuucaaaauguaaacaggaucacauauggggccugucccagauauguuaagcaaaacacucugaaauuggcaacagggaugcgaaauguaccagagaaacaaacuagaggcauauuuggcgcaaucgcggguuucauagaaaaugguugggagggaaugguggaugguugguacgguuucaggcaucaaaauucugagggaauaggacaagcagcagaucucaaaagcacucaagcagcaaucaaucaaaucaaugggaagcugaauagguugaucgggaaaaccaacgagaaauuccaucagauugaaaaagaauucucagaaguagaagggagaauucaggaccucgagaaauauguugaggacacuaaaauagaucucuggucauacaacgcggagcuucuuguugcccuggagaaccaacauacaauugaucuaacugacucagaaaugaacaaacuguuugaaagaacaaagaagcaacugagggaaaaugcugaggauaugggcaaugguuguuucaaaauauaccacaaaugugacaaugccugcauaggaucaaucagaaauggaacuuaugaccaugauguauacagagaugaagcauuaaacaaccgguuccagaucaaaggcguugagcugaagucaggauacaaagauuggauccuauggauuuccuuugccauaucauguuuuuugcuuuguguugcuuuguugggguucaucaugugggccugccaaaaaggcaacauuaggugcaacauuugcauuuga

SEQ ID NO: 33498 - RNA, 1701 nt, Artificial Sequence
  derived and/or modified CDS sequence (wt) from hemagglutinin__InfluenzaA__ABL67418
augaagacuaucauugcuuugagcuacauucuaugucugguuuucgcucaaaaacuucccggaaaugacaacagcacggcaacgcugugccuugggcaccaugcaguaccaaacggaacgauagugaaaacaaucacgaaugaccaaauugaaguuacuaaugcuacugagcugguucagaguuccucaacagguggaauaugcaacaguccucaucagauccuugauggagaaaacugcacacuaauagaugcucuauugggagacccucagugugauggcuuccaaaauaagaaaugggaccuuuuuguugaacgcagcaaagccuacagcaacuguuacccuuaugaugugccggauuaugccucccuuaggucacuaguugccucauccggcacacuggaguuuaacaaugaaagcuucaauuggacuggagucacucaaaauggaacaagcucugcuugcaaaaggagaucuaauaacaguuucuuuaguagauugaauugguugacccacuuaaaauucaaauacccagcauugaacgugacuaugccaaacaaugaaaaauuugacaaauuguacauuugggggguucaccacccggguacggacaaugaccaaaucuuccuguaugcucaagcaucaggaagaaucacagucucuaccaaaagaagccaacaaacuguaaucccgaauaucggaucuagacccagaguaaggaauauccccagcagaauaagcaucuauuggacaauaguaaaaccgggagacauacuuuugauuaacagcacagggaaucuaauugcuccuagggguuacuucaaaauacgaagugggaaaagcucaauaaugagaucagaugcacccauuggcaaaugcaauucugaaugcaucacuccaaauggaagcauucccaaugacaaaccauuucaaaauguaaacaggaucacauauggggccugucccagauauguuaagcaaaacacucugaaauuggcaacagggaugcgaaauguaccagagaaacaaacuagaggcauauuuggcgcaaucgcggguuucauagaaaaugguugggagggaaugguggaugguugguacgguuucaggcaucaaaauucugagggaauaggacaagcagcagaucucaaaagcacgcaagcagcaaucaaucaaaucaaugggaagcugaauagguugaucgggaagaccaacgagaaauuccaucagauugaaaaagaauucucagaaguagaagggagaauucaagaccucgagaaauauguugaggacacuaaaauagaucucuggucauacaacgcggagcuucuuguugcccuggagaaccaacauacaauugaucuaacugacucagaaaugaacaaacuguuugaaagaacaaagaagcaacugagggaaaaugcugaggauaugggcaaugguuguuucaaaauauaccacaaaugugacaaugccugcauaggaucaaucagaaauggaacuuaugaccaugauguauacagagaugaagcauuaaacaaccgguuccagaucaaaggcguugagcugaagucaggauacaaagauuggauccuauggauuuccuuugccauaucauguuuuuugcuuuguguugcuuuguugggguucaucaugugggccugccaaaaaggcaacauuaggugcaacauuugcauuuga

SEQ ID NO: 33499 - RNA, 1707 nt, Artificial Sequence
  derived and/or modified CDS sequence (wt) from hemagglutinin__InfluenzaA__ABL67781
auggagaaaauagugcuucuuuuugcaauagucagucuuguuaaaagugaucagauuugcauugguuaccaugcaaacaacucgacagagcagguugacacaauaauggaaaagaacguuacuguuacacaugcccaagacauacuggaaaagacacacaacgggaagcucugcgaucuagauggagugaagccucuaauuuugagagauuguaguguagcuggauggcuccucggaaacccaaugugugacgaauucaucaaugugccggaauggucuuacauaguggagaaggccaauccagucaaugaccucuguuacccaggggauuucaaugacuaugaagaauugaaacaccuauugagcaggauaaaccauuuugagaaaauucagaucauccccaaaaguucuugguccagucaugaagccucauuaggggugagcucagcauguccauaccagggaaaguccuccuuuuucagaaaugugguauggcuuaucaaaaagaacaguacauacccaacaauaaagaggagcuacaauaauaccaaccaagaagaucuuuugguacugugggggauucaccauccuaaugaugcggcagagcagacaaagcucuaucaaaacccaaccaccuauauuuccguugggacaucaacacuaaaccagagauugguaccaagaauagcuacuagauccaaaguaaacgggcaaaguggaaggauggaguucuucuggacaauuuuaaaaccgaaugaugcaaucaacuuugagaguaauggaaauuucauugcuccagaauaugcauacaaaauugucaagaaaggggacucaacaauuaugaaaagugaauuggaauaugguaacugcaacaccaagugucaaacuccaaugggggcgauaaacucuaguaugccauuccacaauauacacccucucaccaucggggaaugccccaaauaugugaaaucaaacagauuaguccuugcgacugggcucagaaauagcccucaaagagagagaagaagaaaaaagagaggauuauuuggagcuauagcagguuuuauagagggaggauggcagggaaugguagaugguugguauggguaccaccauagcaaugagcaggggaguggguacgcugcagacaaagaauccacucaaaaggcaauagauggagucaccaauaaggucaacucgaucauugacaaaaugaacacucaguuugaggccguuggaagggaauuuaacaaccuagaaaggagaauagagaauuuaaacaagaagauggaagacggguuccuagaugucuggacuuauaaugcugaacuucugguucucauggaaaaugagagaacucuagacuuucaugacucaaaugucaagaaccuuuacgacaagguccgacuacagcuuagggauaaugcaaaggagcuggguaacgguuguuucgaguucuaucauaaaugugauaaugaauguauggaaaguguaagaaacggaacguaugacuacccgcaguauucagaagaagcaagacuaaaaagagaggaaauaaguggaguaaaauuggaaucaauaggaauuuaccaaauacugucaauuuauucuacaguggcgaguucccuagcacuggcaaucaugguagcuggucuauccuuauggaugugcuccaaugggucguuacaaugcagaauuugcauuuaa

SEQ ID NO: 33500 - RNA, 1707 nt, Artificial Sequence
  derived and/or modified CDS sequence (wt) from hemagglutinin__InfluenzaA__ABL67794
auggagaaaauagugcuccuuuuugcaauagucagucuuguuaaaagugaucagauuugcauugguuaccaugcaaacaacucgacagagcagguugacacaauaauggaaaagaacguuacuguuacacaugcccaagacauacuggaaaagacacacaacgggaagcucugcgaucuagauggagugaagccucuaauuuugagagauuguaguguagcuggauggcuccucggaaacccaaugugugacgaauucaucaaugugccggaauggucuuacauaguggagaaggccaauccagucaaugaccucuguuacccaggggauuucaaugacuaugaagaauugaaacaccuauugagcagaauaaaccauuuugagaaaauucagaucauccccaaaaguucuugguccagucaugaagcuucauuaggggugagcucagcauguccauaccagggaaaguccuccuuuuucagaaaugugguauggcuuaucaaaaagaacaguacauacccaacaauaaagaggagcuacaauaauaccaaccaagaagaucuuuugguacugugggggauucaccauccuaaugaugcggcagagcagacaaagcucuaucaaaacccaaccaccuauauuuccguugggacaucaacacuaaaccagagauugguaccaagaauagcuacuagauccaaaguaaacgggcaaaguggaaggauggaguucuucuggacaauuuuaaaaccgaaugaugcaaucaacuucgagaguaauggaaacuucauugcuccagaauaugcauacaaaauugucaagaaaggggacucaacaauuaugaaaagugaauuggaauaugguaacugcaacaccaagugucaaacuccaaugggggcgauaaacucuaguaugccauuccacaauauacacccucucaccaucggggaaugccccaaauaugugaaaucaaacagauuaguccuugcgacugggcucagaaauagcccucaaagagagaaaagaagaaaaaagagaggauuauuuggagcuauagcagguuuuauagagggaggauggcagggaaugguagaugguugguauggguaccaccauagcaaugagcaggggaguggguacgcugcagacaaagaauccacucaaaaggcaauagauggagucaccaauaaggucaacucgaucauugacaaaaugaacacucaguuugaggccguuggaagggaauuuaacaacuuagaaaggagaauagagaauuuaaacaagaagauggaagacggguuccuagaugucuggacuuauaaugcugaacuucugguucucauggaaaaugagagaacucuagacuuucaugacucaaaugucaagaaccuuuacgacaagguccgacuacagcuuagggauaaugcaaaggagcuggguaacgguuguuucgaguucuaucauaaaugugauaaugaauguauggaaagcguaagaaacggaacguaugacuacccgcaguauucagaagaagcaagacuaaaaagagaggaaauaaguggaguaaaauuggaaucaauaggaauuuaccaaauacugucaauuuauucuacaguggcgaguucccuagcacuggcaaucaugguagcuggucuauccuuauggaugugcuccaaugggucguuacaaugcagaauuugcauuuaa

SEQ ID NO: 33501 - RNA, 1707 nt, Artificial Sequence
  derived and/or modified CDS sequence (wt) from hemagglutinin__InfluenzaA__ABL67816
auggagaaaauagugcuucuuuuugcaauagucagucuuguuaaaagugaucagauuugcauugguuaccaugcaaacaacucgacagagcagguugacacaauaauggaaaagaacguuacuguuacacaugcccaagacauacuggaaaagacacacaacgggaagcucugcgaucuagauggagugaagccucuaauuuugagagauuguaguguagcuggauggcuacucggaaacccaaugugugacgaauucaucaaugugccggaauggucuuacauaguggagaaggccaauccagucaaugaccucuguuacccaggggauuucaaugacuaugaagaauugaaacaccuauugagcagaauaaaccauuuugagaaaauucagaucauccccaaaaguucuugguccagucaugaagccucauuaggggugagcucagcauguccauaccagggaaaguccuccuuuuucagaaaugugguauggcuuaucaaaaagaacaguacauacccaacaauaaagaggagcuacaauaauaccaaccaagaagaucuguugguacugugggggauucaccauccuaaugaugcggcagagcagacaaagcucuaucaaaacccaaccaccuauauuuccguugggacaucaacacuaaaccagagauugguaccaagaauagcuacuagauccaaagugaacgggcaaaguggaaggauggaguucuucuggacaauuuuaaaaccgaaugaugcaaucaacuucgagaguaauggaaauuucauugcuccagaauaugcauacaaaauugucaagaaaggggacucaacaauuaugaaaagugaauuggaauaugguaacugcaacaccaagugucaaacuccaaugggggcgauaaacucuaguaugccauuccacaauauacacccucucaccaucggggaaugccccaaauaugugaaaucaaacagauuaguucuugcgacugggcucagaaauagcccucaaagagagagaagaagaaaaaagagaggauuauuuggagcuauagcagguuuuauagagggaggauggcagggaaugguagaugguugguauggguaccaccauagcaaugagcaggggaguggguacgcugcagacaaagaauccacucaaaaggcaauagauggagucaccaauaaggucaacucgaucauuaacaaaaugaacacucaguuugaggccguuggaagggaauuuaacaacuuagaaaggagaauagagaauuuaaacaagaagauggaagacggauuccuagaugucuggacuuauaaugcugaacuucugguucucauggaaaaugagagaacucuagacuuucaugacucaaaugucaagaaccuuuacgacaagguccgacuacagcuuagggauaaugcaaaggagcuggguaacgguuguuucgaguucuaucauaaaugugauaaugaauguauggaaaguguaagaaacggaacguaugacuacccgcaguauucagaagaagcaagacuaaaaagagaggaaauaaguggaguaaaauuggaaucaauaggaauuuaccaaauacugucaauuuauucuacaguggcgaguucccuagcacuggcaaucaugguagcuggucuauccuuauggaugugcuccaaugggucguuacaaugcagaauuugcauuuaa

SEQ ID NO: 33502 - RNA, 1707 nt, Artificial Sequence
  derived and/or modified CDS sequence (wt) from hemagglutinin__InfluenzaA__ABL67827
auggagaaaauagugcuucuuuuugcaauagucagucuuguuaaaagugaucauauuugcauugguuaccaugcaaacaacucgacagagcagguugacacaauaauggaaaagaacguuacuguuacacaugcccaagacauacuggaaaagacacacaacgggaagcucugcgaucuagauggagugaagccucuaauuuugagagauuguaguguagcuggauggcuacucggaaacccaaugugugacgaauucaucaaugugccggaauggucuuacauaguggagaaggccaauccagucaaugaccucuguuacccaggggauuucaaugacuaugaagaauugaaacaccuauugagcagaauaaaccauuuugagaaaauucagaucauccccaaaaguucuugguccagucaugaagccucauuaggggugagcucagcauguccauaccagggaaaguccuccuuuuucagaaaugugguauggcuuaucaaaaagaacaguacauacccaacaauaaagaggagcuacaauaauaccaaccaagaagaucuuuugguacugugggggauucaccauccuaaugaugcggcagagcagacaaagcucuaucaaaacccaaccaccuauauuuccguugggacaucaacacuaaaccagagauugguaccaagaauagcuacuagauccaaagugaacgggcaaaguggaaggauggaguucuucuggacaauuuuaaaaccgaaugaugcaaucaacuucgaaaguaauggaaauuucauugcuccagaauaugcauacgaaauugucaagaaaggggacucaacaauuaugaaaagugaauuggaauaugguaacugcaauaccaagugucaaacuccaaugggggcgauaaacucuaguaugccauuccacaauauacacccucucaccaucggggaaugccccaaauaugugaaaucaaacagauuaguucuugcgacugggcucagaaauagcccucaaauagagagaagaagaaaaaagagaggauuauuuggagcuauagcagguuuucuagagggaggauggcagggaaugguagaugguugguauggguaccaccauagcaaugagcaggggaguggguacgcugcagacaaagaauccacucaaaaggcaauagauggagucaccaauaaggucaacucgaucauuaacaaaaugaacacucaguuugaggccguuggaagggaauuuaacaacuuagaaaggagaauagagaauuuaaacaagaagauggaagauggguuccuagaugucuggacuuauaaugcugaacuucugguucucauggaaaaugagagaacucuagacuuucaugacucaaaugucaagaaccuuuacgacaagguccgacuacagcuuagggauaaugcaaaggagcuggguaacgguuguuucgaguucuaucauaaaugugauaaugaauguauggaaaguguaagaaacggaacguaugacuacccgcaguauucagaagaagcaagacuaaaaagagaggaaauaaguggaguaaaauuggaaucaauaggaauuuaccaaauacugucaauuuauucuacaguggcgaguucccuagcacuggcaaucaugguagcuggucuauccuuauggaugugcuccaaugggucguuacaaugcagaauuugcauuuaa

SEQ ID NO: 33503 - RNA, 1701 nt, Artificial Sequence
  derived and/or modified CDS sequence (wt) from hemagglutinin__InfluenzaA__ABM22015
augaagacuaucauugcuuugagcuacauucuaugucugguuuucgcucaaaaacuucccggaaaugacaacagcacggcaacgcugugccuugggcaccaugcaguaccaaacggaacgauagugaaaacaaucacgaaugaccaaauugaaguuacuaaugcuacugagcugguucagaguuccucaacagguggaauaugcgacaguccucaucagauccuugauggagaaaacugcacacuaauagaugcucuauugggagacccucagugugauggcuuccaaaauaagaaaugggaccuuuuuguugaacgcagcaaagccuacagcaacuguuacccuuaugaugugccggauuaugccucccuuaggucacuaguugccucauccggcacacuggaguuuaacaaugaaagcuucaauuggacuggagucacucaaaauggaacaagcucugcuugcaaaaggagaucuaauaacaguuucuuuaguagauugaauugguugacccacuuaaaauucaaauacccagcauugaacgugacuaugccaaacaaugaaaaauuugacaaauuguacauuugggggguucaccacccggguacggacaaugaccaaaucuuccuguaugcucaagcaucaggaagaaucacagucucuaccaaaagaagccaacaaacuguaaucccgaauaucggaucuagacccagaguaaggaauauccccagcagaauaagcaucuauuggacaauaguaaaaccgggagacauacuuuugauuaacagcacagggaaucuaauugcuccuagggguuacuucaaaauacgaagugggaaaagcucaauaaugagaucagaugcacccauuggcaaaugcaauucugaaugcaucacuccaaauggaagcauucccaaugacaaaccauuucaaaauguaaacaggaucacauauggggccugucccagauauguuaagcaaaacacucugaaauuggcaacagggaugcgaaauguaccagagaaacaaacuagaggcauauuuggcgcaaucgcggguuucauagaaaaugguugggagggaaugguggaugguugguacgguuucaggcaucaaaauucugagggaauaggacaagcagcagaucucaaaagcacucaagcagcaaucaaucaaaucaaugggaagcugaauagguugaucgggaaaaccaacgagaaauuccaucagauugaaaaagaauucucagaaguagaagggagaauucaggaccucgagaaauauguugaggacacuaaaauagaucucuggucauacaacgcggagcuucuuguugcccuggagaaccaacauacaauugaucuaacugacucagaaaugaacaaacuguuugaaagaacaaagaagcaacugagggaaaaugcugaggauaugggcaaugguuguuucaaaauauaccacaaaugugacaaugccugcauaggaucaaucagaaauggaacuuaugaccaugauguauacagagaugaagcauuaaacaaccgguuccagaucaaaggcguugagcugaagucaggauacaaagauuggauccuauggauuuccuuugccauaucauguuuuuugcuuuguguugcuuuguugggguucaucaugugggccugccaaaaaggcaacauuaggugcgacauuugcauuuga

SEQ ID NO: 33504 - RNA, 1701 nt, Artificial Sequence
  derived and/or modified CDS sequence (wt) from hemagglutinin__InfluenzaA__ABM22026
augaaagcaaaacuacuaguucuguugugugcauuuacagcuacauaugcagacacaauauguauaggcuaccaugcgaacaacucaacugacacuguugacacaguacuugagaagaacgugacagugacacacucugucaaccuacuugaggacagucacaacggaaaacuaugccgacuaaaaggaacagccccacuacaauuggguaauugcagcauugccggauggaucuuaggaaauccagaaugcgaaucacuguuuucuaaggaaucauggucuuacauugcagaaacaccaaacccuaaaaauggaacauguuacccaggguauuucgccgacuaugaggaacugagggagcaauugagcucaguaucaucauucaagagauuugaaauauuccccaaggauagcucauggcccaaccacacuguaaccaaaggagugacggcaucaugcucccauaaugggaaaagcagcuuuuacaaaaauuugcuauggcugacggagaagaauggcuuguacccaaaucugagcaaguccuauguaaacaaaaagggaaaagaaguccuugugcuaugggguguucaucacccgucuaacaugggggaccaacgggccaucuaucauaaagaaaaugcuuauguuucuguguugucuucacauuauagcagaagauucaccccagaaauagcaagaagaccaaaaguaagagaucaagaagggagaauuaacuacuacuggacucugcuggaacccggggacacaauaauauuugaggcaaauggaaaucuaauagcgccgugguacgcuuucgcacugaguagaggcuuugggucaggaaucaucaucucaaacgcaucaaugggugaaugugacgcuaagugucaaacaccccaaggagcuauaaacaguagucuccccuuccagaauguacacccagucacaauaggagaguguccaaaguaugucaggaguacaaaauuaaggaugguuacaggacuaaggaacgucccauccauucaauccagagguuuguuuggagccauugccgguuucauugaaggaggguggacuggaaugauagauggaugguaugguuaucaucaucaaaaugaacaaggaucuggcuaugcugcggaccaaaaaagcacacaaaaugccauuaaugggauuacaaacaaggugaauucuauaaucgagaaaaugaacacucaauucacagcuguaggcaaagaauucaacaaauuagaaagaaggauggaaaacuuaaauaagaaaguugaugauggauuucuggacauuuggacauauaaugcagaauuguuaguucuccuggaaaaugaaaggacuuuggauuuucaugacucaaaugugaagaaccuguaugagaaagugaaaaaccaauugaagaauaaugccaaagaaauagggaacggguguuuugaauucuaucacaaguguaacaaugaaugcauggaaagugugaaaaauggaacuuaugacuauccaaaauauuccaaagaaucaaaguuaaacagggaaaaaauugauggagugaaauuggaaucaaugggagucuaucagauucuggcgaucuacucaacugucgccaguucgcuggugcuuuuggucucccugggggcaaucagcuucuggauguguucuaaugggucuuugcaguguagaauaugcaucuga

SEQ ID NO: 33505 - RNA, 1701 nt, Artificial Sequence; identical to SEQ ID NO: 32645
  derived and/or modified CDS sequence (wt) from hemagglutinin__InfluenzaA__ABM22037

SEQ ID NO: 33506 - RNA, 1701 nt, Artificial Sequence; identical to SEQ ID NO: 33455
  derived and/or modified CDS sequence (wt) from hemagglutinin__InfluenzaA__ABM22059

SEQ ID NO: 33507 - RNA, 1701 nt, Artificial Sequence
  derived and/or modified CDS sequence (wt) from hemagglutinin__InfluenzaA__ABM22070
augaagacuaucauugcuuugagcuacauuuuaugccugguuuucgcucaaaaacuucccggaaaugacaacagcacggcaacgcugugccuggggcaucaugcggugccaaacggaacgcuagugaaaacaaucacgaaugaccaaauugagguaacuaaugcuacugagcugguucagaguuccucaacagguagaauaugcgacaguccucaucaaauccuugauggagaaaacugcacacuaauagaugcucuauugggagacccucauugugauggcuuccaaaauaaggaaugggaccuuuuuguugaacgcagcaaagccuacagcaacuguuacccuuaugaugugccggauuaugucucccuuaggucacuaguugccucaucaggcacgcuggaguuuaacaaugaaagcuucaauuggacuggagucgcucagaauggaacaagcucugcuugcaaaaggagaucugauaaaaguuucuuuaguagauugaauugguugcaccaauuaaaauacaaauauccagcacugaacgugacuaugccaaacaaugaaaaauuugacaaauuguacauuugggggguucaccacccggguacagacagugaccaaaucagccuauaugcucaagcaucagggagagucacagucucuaccaaaagaagccaacaaacuguaaucccgaauaucggaucuagacccuggguaaggggugucuccagcagaauaagcaucuauuggacaauaguaaaaccgggagacauacuuuugauuaacagcacagggaaucuaauugcuccucgggguuacuucaaaauacgaagugggaaaagcucaauaaugaggucagaugcacccauuggcaaaugcaauucugaaugcaucacuccaaauggaagcauucccaaugacaaaccauuucaaaauguaaacaggaucacauauggggccugucccagauauguuaagcaaaacacucugaaauuggcaacagggaugcggaaugugccagagaaacaaacuagaggcauauucggugcaaucgcgggcuucauagaaaaugguugggagggaaugauggacgguugguacgguuucaggcaucaaaauucugagggcacagggcaagcagcagaucuuaaaagcacucaagcagcaaucaaccaaaucaacgggaaacugaauagguuaaucgagaaaacgaacgagaaauuccaucaaauugaaaaagaauucucagaaguagaagggagaauucaggaccucgagaaauauguugaggacacuaaaauagaucucuggucguacaaugcggagcuucuuguugcccuggagaaccaacauacaauugaucuaacugacucagaaaugaacaaacuguuugaaagaacaaagaagcaacugagggaaaaugcugaggauaugggcaaugguuguuucaaaauauaccacaaaugugacaaugccugcauagggucaaucagaaauggaacuuaugaccaugauguauacagagacgaagcauugaacaaccgguuccagaucaaagguguugagcugaagucaggauacaaagauuggauccuauggauuuccuuugccauaucauguuuuuugcuuuguauuguuuugcugggguucaucaugugggccugccaaaaaggcaacauuaggugcaacauuugcauuuga

SEQ ID NO: 33508 - RNA, 1701 nt, Artificial Sequence
  derived and/or modified CDS sequence (wt) from hemagglutinin__InfluenzaA__ABM22081
augaagacuaucauugcuuugagcuacauucuaugucugguuuucgcucaaaaacuucccggaaaugacaacagcacggcaacgcugugccuugggcaccaugcaguaccaaacggaacgauagugaaaacaaucacaaaugaccaaauugaaguuacuaaugcuacugagcugguucagaguuccucaacagguggaauaugcgacaguccucaucagauccuugauggagaaaacugcacacuaauagaugcucuauugggagacccucagugugauggcuuccaaaauaagaaaugggaccuuuuuguugaacgcagcaaagccuacagcaacuguuacccuuaugaugugccggaucaugccucccuuaggucacuaguugccucauccggcacacuggaguuuaacaaugaaagcuucgauuggacuggagucacucagaauggaacaagcucugcuugcaaaaggagaucuaauaaaaguuucuuuaguagauugaauugguugacccacuuaaaauacaaauacccagcauugaacgugacuaugccaaacaaugaaaaauuugacaaauuguacauuugggggguucaccacccggguacggacagugaccaaaucagccuauaugcucaagcaucaggaagaaucacagucucuaccaaaagaagccaacaaacuguaaucccgaauaucggaucuagacccaggguaagggaugucuccagccgaauaagcaucuauuggacaauaguaaaaccgggagacauacuuuugauuaacagcacagggaaucuaauugcuccucgggguuacuucaaaauacgaagugggaaaagcucaauaaugagaucagaugcacccauuggcaaaugcaauucugaaugcaucacuccaaauggaagcauucccaaugacaaaccauuucaaaauguaaacaggaucacauauggggccugucccagauauguuaagcaaaacacucugaaauuggcaacagggaugcgaaauauaccagagaaacaaacuagaggcauauuuggcgcaaucgcggguuucauagaaaaugguugggagggaaugguggacgguugguacgguuucaggcaucaaaauucugagggcacaggacaagcagcagaucucaaaagcacucaagcagcaaucaaccaaaucaaugggaaacugaauagguuaaucgggaaaacaaacgagaaauuccaucagauugaaaaagaauucucagaaguagaagggagaauucaggaccucgagaaauauguugaggacacuaaaauagaucucuggucauacaacgcggagcuucuuguugcccuggagaaccaacauacaauugaucuaacugacucagaaaugaacaaacuguuugaaagaacaaagaagcaacugagggaaaaugcugaggauaugggcaaugguuguuucaaaauauaccacaaaugugacaaugccugcauagggucaaucagaaauggaacuuaugaccaugauguguacagagaugaagcauuaaacaaccgguuccagaucaaagguguugagcugaagucaggauauaaagauuggauccuauggauuuccuuugccauaucauguuuuuugcuuuguguugcuuuguugggguucaucaugugggccugccaaaaaggcaacauuaggugcaacauuugcauuuga

SEQ ID NO: 33509 - RNA, 1701 nt, Artificial Sequence
  derived and/or modified CDS sequence (wt) from hemagglutinin__InfluenzaA__ABM22092
augaagacuaucauugcuuugagcuacauucuaugucugguuuucgcucaaaaacuucccggaaaugacaacagcacggcaacgcugugccuugggcaccaugcaguaccaaacggaacgauagugaaaacaaucacaaaugaccaaauugaaguuacuaaugcuacugagcugguucagaguuccucaacaggugaaauaugcgacaguccucaucagauccuugauggagaaaacugcacacuaauagaugcucuauugggagacccucagugugauggcuuccaaaauaagaaaugggaccuuuuuguugaacgcagcaaagccuacagcaacuguuacccuuaugaugugccggaucaugccucccuuaggucacuaguugccucauccggcacacuggaguuuaacaaugaaagcuucgauugggcuggagucacucagaauggaacaagcucugcuugcaaaaggagaucuaauaaaaguuucuuuaguagauugaauugguugacccacuuaaaauacaaauacccagcauugaacgugacuaugccaaacaaugaaaaauuugacaaauuguacauuugggggguucaccacccgggcacggacagugaccaaaucagccuauaugcucaagcaucaggaagaaucacagucucuaccaaaagaagccaacaaacuguaaucccgaauaucggaucuagacccaggguaagggaugucuccagccgaauaagcaucuauuggacaauaguaaaaccgggagacauacuuuugauuaacagcacagggaaucuaauugcuccucgggguuacuucaaaauacgaagugggaaaagcucaauaaugagaucagaugcacccauuggcaaaugcaauucugaaugcaucacuccaaauggaagcauucccaaugacaaaccauuucaaaauguaaacaggaucacauauggggccugucccagauauguuaagcaaaacacucugaaauuggcaacagggaugcgaaauguaccagagaaacaaacuagaggcauauuuggcgcaaucgcggguuucauagaaaaugguugggagggaaugguggacgguugguacgguuucaggcaucaaaauucugagggcacaggacaagcagcagaucucaaaagcacucaagcagcaaucaaccaaaucaaugggaaacugaauagguuaaucgggaaaacaaacgagaaauuccaucagauugaaaaagaauucucagaaguagaagggagaauucaggaccucgagaaauauguugaggacacuaaaauagaucucuggucauacaacgcggagcuucuuguugcccuggagaaccaacauacaauugaucuaacugacucagaaaugaauaaacuguuugaaagaacaaagaagcaacugagggaaaaugcugaggauaugggcaaugguuguuucaaaauauaccacaaaugugacaaugccugcauagggucaaucagaaauggaacuuaugaccaugauguguacagagaugaagcauuaaacaaccgguuccagaucaaagguguugagcugaagucaggauauaaagauuggauccuauggauuuccuuugccauaucauguuuuuugcuuuguguugcuuuguugggguucaucaugugggccugccaaaaaggcaacauuaggugcaacauuugcauuuga

SEQ ID NO: 33510 - RNA, 1701 nt, Artificial Sequence
  derived and/or modified CDS sequence (wt) from hemagglutinin__InfluenzaA__ABM22103
augaagacuaucauugcuuugagcuacauucuaugucugguuuucgcucaaaaacuucccggaaaugacaacagcacggcaacgcugugccuugggcaccaugcaguaccaaacggaacgauagugaaaacaaucacaaaugaccaaauugaaguuacuaaugcuacugagcugguucagaguuccucaacagguggaauaugcgacaguccucaucagauccuugauggagaaaacugcacacuaauagaugcucuauugggagacccucagugugauggcuuccaaaauaagaaaugggaccuuuuuguugaacgcagcaaagccuacagcaacuguuacccuuaugaugugccggaucaugccucccuuaggucacuaguugccucauccggcacacuggaguuuaacaaugaaagcuucgauuggacuggagucacucagaauggaacaagcucugcuugcaaaaggagaucuaauaaaaguuucuuuaguagauugaauugguugacccacuuaaaauacaaauacccagcauugaacgugacuaugccaaacaaugaaaaauuugacaaauuguacauuugggggguucaccacccggguacggacagugaccaaaucagccuauaugcucaagcaucaggaagaaucacagucucuaccaaaagaagccaacaaacuguaaucccgaauaucggaucuagacccaggguaagggaugucuccagccgaauaagcaucuauuggacaauaguaaaaccgggagacauacuuuugauuaacagcacagggaaucuaauugcuccucgggguuacuucaaaauacgaaaugggaaaagcucaauaaugagaucagaugcacccauuggcaaaugcaauucugaaugcaucacaccaaauggaagcauucccaaugacaaaccauuucaaaauguaaacaggaucacauauggggccugucccagauauguuaagcaaaacacucugaaauuggcaacagggaugcgaaauguaccagagaaacaaacuagaggcauauuuggcgcaaucgcggguuucauagaaaaugguugggagggaaugguggacgguugguacgguuucaggcaucaaaauucugagggcacaggacaagcagcagaucucaaaagcacucaagcagcaaucaaccaaaucaaugggaaacugaauagguuaaucgggaaaacaaacgagaaauuccaucagauugaaaaagaauucucagaaguagaagggagaauucaggaccucgagaaauauguugaggacacuaaaauagaucucuggucauacaacgcggagcuucuuguugcccuggagaaccaacauacaauugaucuaacugacucagaaaugaacaaacuguuugaaagaacaaagaagcaacugagggaaaaugcugaggauaugggcaaugguuguuucaaaauauaccacaaaugugacaaugccugcauagggucaaucagaaauggaacuuaugaccaugauguguacagagaugaagcauuaaacaaccgguuccagaucaaagguguugagcugaagucaggauauaaagauuggauccuauggauuuccuuugccauaucauguuuuuugcuuuguguugcuuuguugggguucaucaugugggccugccaaaaaggcaacauuaggugcaacauuugcauuuga

SEQ ID NO: 33511 - RNA, 1701 nt, Artificial Sequence; identical to SEQ ID NO: 32532
  derived and/or modified CDS sequence (wt) from hemagglutinin__InfluenzaA__ABM22114

SEQ ID NO: 33512 - RNA, 1701 nt, Artificial Sequence; identical to SEQ ID NO: 33467
  derived and/or modified CDS sequence (wt) from hemagglutinin__InfluenzaA__ABM22125

SEQ ID NO: 33513 - RNA, 1701 nt, Artificial Sequence
  derived and/or modified CDS sequence (wt) from hemagglutinin__InfluenzaA__ABM22136
augaagacuaucauugcuuugagcuacauucuaugucugguuuucgcucaaaaacuucccggaaaugacaacagcacggcaacgcugugccuugggcaccaugcaguaccaaacggaacgauagugaaaacaaucacgaaugaccaaauugaaguuacuaaugcuacugagcugguucagaguuccucaacagguggaauaugugacaguccucaucagauccuugauggagaaaacugcacacuaauagaugcucuauugggagacccucagugugauggcuuccaaaauaagaaaugggaccuuuuuguugaacgcagcaaagccuacagcaacuguuacccuuaugaugugccggauuaugccucccuuaggucacuaguugccucauccggcacacuggaguuuaacaaugaaagcuucaauuggacuggagucacucaaaauggaacaagcucugcuugcaaaaggagaucuaauaacaguuucuuuaguagauugaauugguugacccacuuaaaauucaaauacccagcauugaacgugacuaugccaaacaaugaaaaauuugacaaauuguacauuugggggguucaccacccggguacggacaaugaccaaaucuuccuguaugcccaagcaucaggaagaaucacagucucuaccaaaagaagccaacaaacuguaaucccgaauaucggaucuagacccagaguaaggaauauccccagcagaauaagcaucuauuggacaauaguaaaaccgggagacauacuuuugauuaacagcacagggaaucuaauugcuccuagggguuacuucaaaauacgaagugggaaaagcucaauaaugagaucagaugcacccauuggcaaaugcaauucugaaugcaucacuccaaauggaaguauucccaaugacaaaccauuucaaaauguaaacaggaucacauauggggccugucccagauauguuaagcaaaacacucugaaauuggcaauagggaugcgaaauguaccagagaaacaaacuagaggcauauuuggcgcaauugcggguuucauagaaaaugguugggagggaaugguggaugguugguacgguuucaggcaucaaaauucugagggaauaggacaagcagcagaucucaaaagcacucaagcagcaaucaaucaaaucaaugggaagcugaauagguugaucgggaaaaccaacgagaaauuccaucagauugaaaaagaauucucagaaguagaagggagaauucaggaccucgagaaauauguugaggacacuaaaauagaucucuggucauacaacgcggagcuucuuguugcccuggagaaccaacauacaauugaucuaacugacucagaaaugaacaaacuguuugaaagaacaaagaagcaacugagggaaaaugcugaggauaugggcaaugguuguuucaaaauauaccacaaaugugacaaugccugcauaggaucaaucagaaauggaacuuaugaccaugauguauacagagaugaagcauuaaacaaccgguuccagaucaaaggcguugagcugaagucaggauacaaagauuggauccuauggauuuccuuugccauaucauguuuuuugcuuuguguugcuuuguugggguucaucaugugggccugccaaaaaggcaacauuaggugcaacauuugcauuuga

SEQ ID NO: 33514 - RNA, 1701 nt, Artificial Sequence
  derived and/or modified CDS sequence (wt) from hemagglutinin__InfluenzaA__ABM22147
augaagacuaucauugcuuugagcuacauucuaugucugguuuucgcucaaaaacuucccggaaaugacaacagcacggcaacgcugugccuugggcaccaugcaguaccaaacggaacgauagugaaaacaaucacgaaugaccaaauugaaguuacuaaugcuacugagcugguucagaguuccucaacagguggaauaugcgacaguccucaucaaauccuugauggagaaaacugcacacuaauagaugcucuauugggagacccucagugugauggcuuccaaaauaagaaaugggaccuuuuuguugaacgcagcaaagccuacagcaacuguuacccuuaugaugugccggauuaugccucccuuaggucacuaauugccucauccggcacacuggaguuuaacaaugaaagcuucaauuggacuggagucacucaaaauggaacaagcucugcuugcaaaaggagaucuaauagcaguuucuuuaguagauugaauugguugacccacuuaaaauucaaauacccagcauugaacgugacuaugccaaacaaugaagaauuugacaaauuguacauuugggggguucaccacccggguacauacaaugaccaaaucagccuauaugcucaagcaucaggaagaaucacagucucuaccaaaagaagccaacaaacuguaaucccgaauaucgggucuagacccaggguaagggauauccccagcagaauaagcaucuauuggacaauaguaaaaccgggagacauacuuuugauuaacagcacagggaaucuaauugcuccucgggguuacuucaaaauacgaagugggaaaagcucaauaaugagaucagaugcacccauuggcaaaugcaauucugaaugcaucacuccaaauggaagcauucccaaugacaaaccauuucaaaauguaaacaggaucacauauggggccugucccagauauguuaagcaaaacacucugaaauuggcaacagggaugcgaaauguaccagagaaacaaaccagaggcauauuuggcgcaaucgcggguuucauagaaaaugguugggagggaaugguggaugguugguacgguuucaggcaucaaaauucugagggaauaggacaagcagcagaucucaaaagcacucaagcagcaaucgaccaaaucaaugggaagcugaauagguugaucgggaaaaccaacgagaaauuccaucagauugaaaaagaauucucagaaguagaagggagaauucaggaccucgagaaauauguugaggacacuaaaauagaucucuggucauacaacgcggagcuucuuguugcccuggagaaccaacauacaauugaucuaacugacucagaaaugaacaaacuguuugaaagaacaaagaagcaacugagggaaaaugcugaggauaugggcaaugguuguuucaaaauauaccacaaaugugacaaugccugcauagggucaaucagaaauggaacuuaugaccaugauguauacagagaugaagcauuaaacaaccgguuccagaucaaagguguugagcugaagucaggauacaaagauuggauccuauggauuuccuuugccauaucauguuuuuugcuuuguguugcuuuguugggguucaucaugugggccugccaaaaaggcaacauuaggugcaacauuugcauuuga

SEQ ID NO: 33515 - RNA, 1701 nt, Artificial Sequence; identical to SEQ ID NO: 32933
  derived and/or modified CDS sequence (wt) from hemagglutinin__InfluenzaA__ABM22158

SEQ ID NO: 33516 - RNA, 1701 nt, Artificial Sequence
  derived and/or modified CDS sequence (wt) from hemagglutinin__InfluenzaA__ABM22169
augaaagcaaaacuacugguccuguuaugugcacuuucagcuacagaugcagacacaauauguauaggcuaccaugcgaacaacucaaccgacacuguugacacaguacucgaaaagaacgugacagugacacacucugucaaccuacuugaggacaaucacaacggaaaacuaugcaaacuaaaaggaauagccccacuacaauuggggaaaugcagcauugccggauggaucuuaggaaacccagaaugcgaaucacuguuuucuaagaaaucaugguccuacauugcagaaacaccaaacuccgagaauggaacauguuacccaggguauuucgccgacuaugaggaacugagggaacaauugaguucaguaucaucauucgagagauucgaaauauuccccaaggaaaguucauggcccaaacacaacguaaccaaaggaguaacggcaucaugcucccauaaggggaaaagcaguuuuuacagaaauuugcuauggcugacggagaaaaauggcucguacccaaaucugagcaaguccuaugugaacaacaaagagaaagaaguccuuguacuaugggguguucaucacccgucuaacauagaggaccaaaagaccaucuaucguaaagaaaaugcuuaugucucuguagugucuucacauuauaacaggagauucaccccagaaauagcaaaaagacccaaaguaagaaaucaagaagggagaauuaacuacuacuggacucugcuggaacccggggacacaauaauauuugaggcaaauggaaaucuaauagcgccaugguaugcuuucgcauugaguagaggcuuugggucaggaaucaucaccucaaacgcaucgauggaugaaugugacgcgaagugucaaacaccccagggagcuauaaacaguagucuuccuuuucagaauguacacccagucacaauaggagagugcccaaaguacgucaggaguacaaaauuaaggaugguuacaggacuaaggaacaucccauccauucaauccagagguuuguuuggagccauugccgguuucauugaagggggauggacuggaaugauugauggaugguaugguuaucaucaucagaaugaacagggaucuggcuaugcugcggaucaaaaaagcacacaaaaugccauuaaugggauuacaaacaaggugaacucuauaaucgagaaaaugaacacucaauucacagcuguggguaaagaauucaacaaacuagaaaaaaggauggaaaacuuaaauaaaaaaguugaugauggguuucuggacauuuggacauauaaugcagaauuguugguucuacuggaaaaugaaaggacuuuggauuuccaugacucaaaugugaagaaccuguaugagaaaguaaaaagccaauuaaagaauaaugccaaagaaauaggaaacggguguuuugaauucuaccacaaguguaacaaugaaugcauggaaaguguaaaaaaugggacuuaugacuauccaaaauauucagaagaaucaaaguuaaacagggaaaaaauugauggagugaaauuggaaucaaugggagucuaucagauucuggcgaucuacucaacugucgccaguucacuggugcuuuuggucucccugggggcaaucagcuucuggauguguucuaaugggucuuugcagugcagaauaugcaucuga

SEQ ID NO: 33517 - RNA, 1701 nt, Artificial Sequence
  derived and/or modified CDS sequence (wt) from hemagglutinin__InfluenzaA__ABM22180
augaaagcaaaacuacugguccuguuaugugcacuuucagcuacagaugcagacacaauauguauaggcuaccaugcgaacaacucaaccgacacuguugacacaguacucgaaaagaacgugacagugacacacucugucaaccuacuugaggacaaucacaacggaaaacuaugcaaacuaaaaggaauagccccacuacaauuggggaaaugcagcauugccggauggaucuuaggaaacccagaaugcgaaucacuguuuucuaagaaaucaugguccuacauugcagaaacaccaaacuccgagaauggaacauguuacccaggguauuucgccgacuaugaggaacugagggaacaauugaguucaguaucaucauucgagagauucgaaauauuccccaaggaaaguucauggcccaaacacaacguaaccaaaggaguaacggcaucaugcucccauaaggggaaaagcaguuuuuacagaaauuugcuauggcugacggagaaaaauggcucguacccaaaucugagcaaguccuaugugaacaacaaagagaaagaaguccuuguacuaugggguguucaucacccguccaacauagaggaccaaaagaccaucuaucguaaagaaaaugcuuaugucucuguagugucuucacauuauaacaggagauucaccccagaaauagcaaaaagacccaaaguaagaaaucaagaagggagaauuaacuacuacuggacucugcuggaacccggggacacaauaauauuugaggcaaauggaaaucuaauagcgccaugguaugcuuucgcauugaguagaggcuuugggucaggaaucaucaccucaaacgcaucgauggaugaaugugacgcgaagugucagacaccccagggagcuauaaacaguagucuuccuuuucagaauguacacccagucacaauaggagagugcccaaaguacgucaggaguacaaaauuaaggaugguuacaggacuaaggaacaucccauccauucaauccagagguuuguuuggagccauugccgguuucauugaagggggauggacuggaaugauugauggaugguaugguuaucaucaucagaaugaacagggaucuggcuaugcugcggaucaaaaaagcacacaaaaugccauuaacgggauuacaaacaaggugaacucuauaaucgagaaaaugaacacucaauucacagcuguggguaaagaauucaacaaacuagaaaaaaggauggaaaacuuaaauaaaaaaguugaugauggauuucuggacauuuggacauauaaugcagaauuguugguucuacuggaaaaugaaaggacuuuggauuuccaugacucaaaugugaagaaccuguaugagaaaguaaaaagccaauuaaagaauaaugccaaagaaauaggaaacggguguuuugaauucuaccacaaguguaacaaugaaugcauggaaaguguaaaaaaugggacuuaugacuauccaaaauauucagaagaaucaaaguuaaacagggaaaaaauugauggagugaaauuggaaucaaugggagucuaucagauucuggcgaucuacucaacugucgccaguucacuggugcuuuuggucucccugggggcaaucagcuucuggauguguucuaaugggucuuugcagugcagaauaugcaucuga

SEQ ID NO: 33518 - RNA, 1701 nt, Artificial Sequence
  derived and/or modified CDS sequence (wt) from hemagglutinin__InfluenzaA__ABM22191
augaaagcaaaacuacugguccuguuaugugcacuuucagcuacagaugcagacacaauauguauaggcuaccaugcgaacaacucaaccgacacuguugacacaguacucgaaaagaacgugacagugacacacucugucaaccuacuugaggacaaucacaacggaaaacuaugcaaacuaaaaggaauagccccacuacaauuggggaaaugcagcauugccggauggaucuuaggaaacccagaaugcgaaucacuguuuucuaagaaaucaugguccuacauugcagaaacaccaaacuccgagaauggaacauguuacccaggguauuucgccgacuaugaggaacugagggaacaauugaguucaguaucaucauucgagagauucgaaauauuccccaaggaaaguucauggcccaaacacaacguaaccaaaggaguaacggcaucaugcucccauaaggggaaaagcaguuuuuacagaaauuugcuauggcugacggagaaaaauggcucguacccaaaucugagcaaguccuaugugaacaacaaagagaaagaaguccuuguacuaugggguguucaucacccgucuaacauagaggaccaaaagaccaucuaucguaaagaaaaugcuuaugucucuguagugucuucacauuauaacaggagauucaccccagaaauagcaaaaagacccaaaguaagaaaucaagaagggagaauuaacuacuacuggacucugcuggaacccggggacacaauaauauuugaggcaaauggaaaucuaauagcgccaugguaugcuuucgcacugaguagaggcuuugggucaggaaucaucaccucaaacgcaucgauggaugaaugugacgcgaagugucaaacaccccagggagcuauaaacaguagucuuccuuuucagaauguacacccagucacaauaggagagugcccaaaguacgucaggaguacaaaauuaaggaugguuacaggacuaaggaacaucccauccauucaauccagagguuuguuuggagccauugccgguuucauugaagggggauggacuggaaugauugauggaugguaugguuaucaucaucagaaugaacagggaucuggcuaugcugcggaucaaaaaagcacacaaaaugccauuaacgggauuacaaacaaggugaacucuauaaucgagaaaaugaacacucaauucacagcuguggguaaagaauucaacaaacuagaaaaaaggauggaaaacuuaaauaaaaaaguugaugauggauuucuggacauuuggacauauaaugcagaauuguugguucuacuggaaaaugaaaggacuuuggauuuccaugacucaaaugugaagaaccuguaugagaaaguaaaaagccaauuaaagaauaaugccaaagaaauaggaaacggguguuuugaauucuaccacaaguguaacaaugaaugcauggaaaguguaaaaaaugggacuuaugacuauccaaaauauucagaagaaucaaaguuaaacagggaaaaaauugauggagugaaauuggaaucaaugggagucuaucagauucuggcgaucuacucaacugucgccaguucacuggugcuuuuggucucccugggggcaaucagcuucuggauguguucuaaugggucuuugcagugcagaauaugcaucuga

SEQ ID NO: 33519 - RNA, 1701 nt, Artificial Sequence
  derived and/or modified CDS sequence (wt) from hemagglutinin__InfluenzaA__ABM22202
augaaagcaaaacuacugguccuguuaugugcacuuucagcuacagaugcagacacaauauguauaggcuaccaugcgaacaacucaaccgacacuguugacacaguacucgaaaagaacgugacagugacacacucugucaaccuacuugaggacaaucacaacggaaaacuaugcaaacuaaaaggaauagccccacuacaauuggggaaaugcagcauugccggauggaucuuaggaaacccagaaugcgaaucacuguuuucuaagaaaucaugguccuacauugcagaaacaccaaacuccgagaauggaacauguuacccaggguauuucgccgacuaugaggaacugagggaacaauugaguucaguaucaucauucgagagauucgaaauauuccccaaggaaaguucauggcccaaacacaacguaaccaaaggaguaacggcaucaugcucccauaaggggaaaagcaguuuuuacagaaauuugcuauggcugacggagaaaaauggcucguacccaaaucugagcaaguccuaugugaacaacaaagagaaagaaguccuuguacuaugggguguucaucacccgucuaacauagaggaccaaaagaccaucuaucguaaagaaaaugcuuauguaucuguagugucuucacauuauaacaggagauucaccccagaaauagcaaaaagacccaaaguaagaaaucaagaagggagaauuaauuacuacuggacucugcuggaacccggggacacaauaauauuugaggcaaauggaaaucuaauagcgccaugguaugcuuucgcauugaguagaggcuuugggucaggaaucaucaccucaaacgcaucgauggaugaaugugacgcgaagugucaaacaccccagggagcuauaaacaguagucuuccuuuucagaauguacacccagucacaauaggagagugcccaaaguacgucaggaguacaaaauuaaggaugguuacaggacuaaggaacaucccauccauucaauccagagguuuguuuggagccauugccgguuucauugaagggggauggacuggaaugauugauggaugguaugguuaucaucaucagaaugaacagggaucuggcuaugcugcggaucaaaaaagcacacaaaaugccauuaacgggauuacaaacaaggugaacucuauaaucgagaaaaugaacacucaauucacagcuguggguaaagaauucaacaaacuagaaaaaaggauggaaaacuuaaauaaaaaaguugaugauggauuucuggacauuuggacauauaaugcagaauuguugguucuacuggaaaaugaaaggacuuuggauuuccaugacucaaaugugaagaaccuguaugagaaaguaaaaagccaauuaaagaauaaugccaaagaaauaggaaacggguguuuugaauucuaccacaaguguaacaaugaaugcauggaaaguguaaaaaaugggacuuaugacuauccaaaauauucagaagaaucaaaguuaaacagggaaaaaauugauggagugaaauuggaaucaaugggagucuaucagauucuggcgaucuacucaacugucgccaguucacuggugcuuuuggucucccugggggcaaucagcuucuggauguguucuaaugggucuuugcagugcagaauaugcaucuga

SEQ ID NO: 33520 - RNA, 1701 nt, Artificial Sequence
  derived and/or modified CDS sequence (wt) from hemagglutinin__InfluenzaA__ABM22213
augaaagcaaaacuacugguccuguuaugugcacuuucagcuacagaugcagacacaauauguauaggcuaccaugcgaacaacucaaccgacacuguugacacaguacucgaaaagaacgugacagugacacacucugucaaccuacuugaggacaaucacaacggaaaacuaugcaaacuaaaaggaauagccccacuacaauuggggaaaugcagcauugccggauggaucuuaggaaacccagaaugcgaaucacuguuuucuaagaaaucaugguccuacauugcagaaacaccaaacuccgagaauggaacauguuacccaggguauuucgccgacuaugaggaacugagggaacaauugaguucaguaucaucauucgagagauucgaaauauuccccaaggaaaguucauggcccaaacacaacguaaccaaaggaguaacggcaucaugcucccauaaggggaaaagcaguuuuuacagaaauuugcuauggcugacggagaaaaauggcucguacccaaaucugagcaaguccuaugugaacaacaaagagaaagaaguccuuguacuaugggguguucaucacccguccaacauagaggaccaaaagaccaucuaucguaaagaaaaugcuuaugucucuguagugucuucacauuauaacaggagauucaccccagaaauagcaaaaagacccaaaguaagaaaucaagaagggagaauuaacuacuacuggacucugcuggaacccggggacacaauaauauuugaggcaaauggaaaucuaauagcgccaugguaugcuuucgcauugaguagaggcuuugggucaggaaucaucaccucaaacgcaucgauggaugaaugugacgcgaagugucaaacaccccagggagcuauaaacaguagucuuccuuuucagaauguacacccagucacaauaggagagugcccaaaguacgucaggaguacaaaauuaaggaugguuacaggacuaaggaacaucccauccauucaauccagagguuuguuuggagccauugccgguuucauugaagggggauggacuggaaugauugauggaugguaugguuaucaucaucagaaugaacagggaucuggcuaugcugcggaucaaaaaagcacacaaaaugccauuaacgggauuacaaacaaggugaacucuauaaucgagaaaaugaacacucaauucacagcuguggguaaagaauucaacaaacuagaaaaaaggauggaaaacuuaaauaaaaaaguugaugauggauuucuggacauuuggacauauaaugcagaauuguugguucuacuggaaaaugaaaggacuuuggauuuccaugacucaaaugugaagaaccuguaugagaaaguaaaaagccaauuaaagaauaaugccaaagaaauaggaaacggguguuuugaauucuaccacaaguguaacaaugaaugcauggaaaguguaaaaaaugggacuuaugacuauccaaaauauucagaagaaucaaaguuaaacagggaaaaaauugauggagugaaauuggaaucaaugggagucuaucagauucuggcgaucuacucaacugucgccaguucacuggugcuuuuggucucccugggggcaaucagcuucuggauguguucuaaugggucuuugcagugcagaauaugcaucuga

SEQ ID NO: 33521 - RNA, 1701 nt, Artificial Sequence
  derived and/or modified CDS sequence (wt) from hemagglutinin__InfluenzaA__ABM22224
augaaagcaaaacuacugguccuguuaugugcacuuucagcuacagacgcagacacaauauguauaggcuaccaugcgaacaacucaaccgacacuguugacacagugcucgaaaagaacgugacagugacacacucugucaaccuacuugaggacaaucacaacggaaaacuaugcaaacuaaaaggaauagccccacuacaauuggggaaaugcagcauugccggauggaucuuaggaaacccagaaugcgaaucacuguuuucuaagaaaucaugguccuacauugcagaaacaccaaacuccgagaauggaacauguuacccaggguauuucgccgacuaugaggaacugagggaacaauugaguucaguaucaucauucgagagauucgaaauauuccccaaggaaaguucauggcccaaacacaacguaaccaaaggaguaacggcaucaugcucccauaaggggaaaagcaguuuuuacagaaauuugcuauggcugacggagaaaaauggcucguacccaaaucugagcaaguccuaugugaacaacaaagagaaagaaguccuuguacuaugggguguucaucacccgucuaacauagaggaccaaaagaccaucuaucguaaagaaaaugcuuaugucucuguagugucuucacauuauaacaggagauucaccccagaaauagcaaaaagacccaaaguaagaaaucaagaagggagaauuaacuacuacuggacucugcuggaacccggggacacaauaauauuugaggcaaauggaaaucuaauagcgccaugguaugcuuucgcauugaguagaggcuuugggucaggaaucaucaccucaaacgcaucgauggaugaaugugacgcgaagugucaaacaccccagggagcuauaaacaguagucuuccuuuucagaauguacacccagucacaauaggagagugcccaaaguacgucaggaguacaaaauuaaggaugguuacaggacuaaggaacaucccauccauucaauccagagguuuguuuggagccauugccgguuucauugaagggggauggacuggaaugauugauggaugguaugguuaucaucaucagaaugaacagggaucuggcuaugcugcggaucaaaaaagcacacaaaaugccauuaacgggauuacaaacaaggugaacucuauaaucgagaaaaugaacacucaauucacagcuguggguaaagaauucaacaaacuagaaaaaaggauggaaaacuuaaauaaaaaaguugaugauggauuucuggacauuuggacauauaaugcagaauuguugguucuacuggaaaaugaaaggacuuuggauuuccaugacucaaaugugaagaaccuguaugagaaaguaaaaagccaauuaaagaauaaugccaaagaaauaggaaacggguguuuugaauucuaccacaaguguaacaaugaaugcauggaaaguguaaaaaaugggacuuaugacuauccaaaauauucagaagaaucaaaguuaaacagggaaaaaauugauggagugaaauuggaaucaaugggagucuaucagauucuggcgaucuacucaacugucgccaguucacuggugcuuuuggucucccugggggcaaucagcuucuggauguguucuaaugggucuuugcagugcagaauaugcaucuga

SEQ ID NO: 33522 - RNA, 1701 nt, Artificial Sequence
  derived and/or modified CDS sequence (wt) from hemagglutinin__InfluenzaA__ABM22235
augaaagcaaaacuacugguccuguuaugugcacuuucagcuacagaugcagacacaauauguauaggcuaccaugcgaacaacucaaccgacacuguugacacaguacucgaaaagaacgugacagugacacacucugucaaccuacuugaggacaaucacaacggaaaacuaugcaaacuaaaaggaauagccccacuacaauuggggaagugcagcauugccggauggaucuuaggaaacccagaaugcgaaucacuguuuucuaagaaaucaugguccuacauugcagaaacaccaaacuccgagaauggaacauguuacccaggguauuucgccgacuaugaggaacugagggaacaauugaguucaguaucaucauucgagagauucgaaauauuccccaaggaaaguucauggcccaaacacaacguaaccaaaggaguaacggcaucaugcucccauaaggggaaaagcaguuuuuacagaaauuugcuauggcugacggagaaaaauggcucguacccaaaucugagcaaguccuaugugaacaacaaagagaaagaaguccuuguacuaugggguguucaucacccgucuaacauagaggaccaaaagaccaucuaucguaaagaaaaugcuuaugucucuguagugucuucacauuauaacaggagauucaccccagaaauagcaaaaagacccaaaguaagaaaucaagaagggagaauuaacuacuacuggacucugcuggaacccggggacacaauaauauuugaggcaaauggaaaucuaauagcgccaugguaugcuuucgcauugaguagaggcuuugggucaggaaucaucaccucaaacgcaucgauggaugaaugugacgcgaagugucaaacaccccagggagcuauaaacaguagucuuccuuuucagaauguacacccagucacaauaggagagugcccaaaguacgucaggaguacaaaauuaaggaugguuacaggacuaaggaacauuccauccauucaauccagagguuuguuuggagccauugccgguuucauugaagggggauggacuggaaugauugauggaugguaugguuaucaucaucagaaugaacagggaucuggcuaugcugcggaucaaaaaagcacacaaaaugccauuaacgggauuacaaacaaggugaacucuauaaucgagaaaaugaacacucaauucacagcuguggguaaagaauucaacaaacuagaaaaaaggauggaaaacuuaaauaaaaaaguugaugauggauuucuggacauuuggacauauaaugcagaauuguugguucuacuggaaaaugaaaggacuuuggauuuccaugacucaaaugugaagaaccuguaugagaaaguaaaaagccaauuaaagaauaaugccaaagaaauaggaaacggguguuuugaauucuaccacaaguguaacaaugaaugcauggaaaguguaaaaaaugggacuuaugacuauccaaaauauucagaagaaucaaaguuaaacagggaaaaaauugauggagugaaauuggaaucaaugggagucuaucagauucuggcgaucuacucaacugucgccaguucacuggugcuuuuggucucccugggggcaaucagcuucuggauguguucuaaugggucuuugcagugcagaauaugcaucuga

SEQ ID NO: 33523 - RNA, 1701 nt, Artificial Sequence
  derived and/or modified CDS sequence (wt) from hemagglutinin__InfluenzaA__ABM22268
augaaaguaaaacuacuaguccuguugugugcauuuacagcuacauaugcagacacaauauguauaggcuaccaugcgaacaacucaaccgacacuguugacacaguacuugagaagaacgugacagugacacacucugucaaccuacuugaggacagucacaacggaaaacuaugccgacuaaaaggaacagccccacuacaauuggguaauugcagcguugccggauggaucuuaggaaacccagaaugcgaaucacuguuuucuaaggaaucaugguccuacauugcagaaacaccaaacccugagaauggaacauguuacccaggguauuucgccgacuaugaggaacugagggagcaauugagcucaguaucaucauucgagagauucgaaauauuccccaaggaaagcucauggcccaaccacaccguaaccaaaggagugacggcaucauguucccauaaugggaaaagcaguuuuuacaaaaauuugcuauggcugacggaaaagaauggcuuguacccaaaucugagcaaguccuauguaaacaacaaggagaaagaaguccuuguacuaugggguguucaucacccgucgaacauaggggaccaaagggccaucuaucauacagaaaaugcuuaugucucuguagugucuucacauuauagcagaagauucaccccagaaauagcaaaaagacccaaaguaagagaucaagaagggagaauuaacuacuacuggacucugcuggaacccggggacacaauaauauuugaggcaaauggaaaucuaauagcgccaugguacgcuuucgcacugaguagaggcuuugggucaggaaucaucaccucaaacgcaucaaugggugaaugugacgcuaagugucaaacaccccaaggagcuauaaacaguagucuuccuuuccagaauguacacccagucacaauaggagagugucccaaguaugucaggaguacaaaauuaaggaugguuacaggacuaagaaacaucccauccauucaaucuagagguuuguuuggagccauugccgguuucauugaagggggguggacuggaaugauagauggaugguaugguuaucaucaucagaaugaacaaggaucuggcuaugcugcagaccaaaaaagcacacaaaaugccauugaugggauuacaaacaaggugaauucuguaaucgagaaaaugaacacucaauucacagcuguaggcaaagaauucaacaaauuagagagaaggauggaaaacuuaaauaagaaaguugaugauggauuucuggacauuuggacauauaaugcagaguuguugguucuccuggaaaaugaaaggacuuuggauuuucaugacucaaaugugaagaaucuguaugagaaaguaaaaaaccaauugaagaauaaugccaaagaaaucgggaacggguguuuugaauucuaucacaaguguaacaaugaaugcauggaaagugugaaaaauggaacuuaugacuauccaaaauauuccgaagaaucaaaguuaaacagggaaaaaauugauggagugaaauuggaaucaaugggcgucuaucagauucuggcgaucuacucaacugucgccaguucacuggugcuuuuggucucccugggggcaaucaguuucuggauguguucuaaugggucuuugcaguguagaauaugcaucuga

SEQ ID NO: 33524 - RNA, 1701 nt, Artificial Sequence
  derived and/or modified CDS sequence (wt) from hemagglutinin__InfluenzaA__ABM22279
augaaagcaaaacuacuaguccuguugugugcauuuacagcuacauaugcagacacaauauguauaggcuaccaugcgaacaacucaaccgacacuguugacacaguacuugagaagaacgugacagugacacacucugucaaccuacuugaggacagacacaacggaaaacuaugccgacuaaaaggaacagccccacuacaauuggguaauugcagcguugccggauggaucuuaggaaacccagaaugcgaaucacuguuuucuaaggaaucaugguccuacauugcagaaacaccaaacccugagaauggaacauguuacccaggguauuucgccgacuaugaggaacugagggagcaauugagcucaguaucaucauucgagagauucgaaauauuccccaaggaaagcucauggcccaaccacacaguaaccaaaggagugacggcaucaugcucccauaaugggaaaagcaguuuuuacaaaaauuugcuauggcugacggaaaagaauggcuuguacccaaaucugagcaaguccuauguaaacaacaaggagaaagaaguccuuguacuaugggguguucaucacccgucuaacauaggggaccaaagggccaucuaucauacagaaaaugcuuaugucucuguggugucuucacauuauagcagaagauucaccccagaaauagcaaaaagacccaaaguaagagaucaagaagggagaauuaacuacuacuggacucugcuggaacccggggacacaauaauauuugaggcaaauggaaaucuaauagcgccaugguacgcuuucgcauugaguagaggcuuugggucaggaaucaucaccucaaacgcaucaaugggugacugugacgcuaagugucaaacaccccaaggagcuauaaacaguagucuuccuuuccagaauguacacccagucacaauaggagggugucccaaguaugucaggaguacaaaauuaaggaugguuacaggacuaagaaacaucccauccauucaaucuagagguuuguuuggagccauugccgguuucauugaagggggguggacuggaaugauagauggaugguaugguuaucaucaucagaaugaacaaggaucuggcuaugcugcagacaaaaaaagcacacaaaaugccauugaugggauuacaaacaaggugaauucuguaaucgagaaaaugaacacucaauucacagcuguaggcaaagaauucaacaaauuagagagaaggauggaaaacuuaaauaagaaaguugaugauggauuucuggacauuuggacauauaaugcagaguuguugguucuccuggaaaaugaaaggacuuuggauuaucaugacucaaaugugaagaaucuguaugagaaaguaaaaaaccaauugaagaauaaugccaaagaaaucgggaacggguguuuugaauucuaucacaaguguaacaaugaaugcauggaaagugugaaaaauggaacuuaugacuauccaaaauauuccgaagaaucaaaguuaaaaagggaaaaaauugauggagugaaauuggaaucaaugggagucuaucagauucuggcgaucuacucaacugucgccaguucacuggugcuuuuggucucccugggggcaaucaguuucuggauguguucuaaugggucuuugcaguguagaauaugcaucuga

SEQ ID NO: 33525 - RNA, 1701 nt, Artificial Sequence
  derived and/or modified CDS sequence (wt) from hemagglutinin__InfluenzaA__ABM22290
augaaagcaaaacuacuaguccuguugugugcauuuacagcuacauaugcagacacaauauguauaggcuaccaugcgaacaacucaaccgacacuguugacacaguacuugagaagaacgugacagugacacacucugucaaccuacuugagaacagucacaacggaaaacuaugccgacuaaaaggaacagccccacuacaauuggguaauugcagcguugccggauggaucuuaggaaacccagaaugcgaaucacuguuuucuaaggaaucaugguccuacauugcagaaacaccaaacccugagaauggaacauguuacccaggguauuucgccgacuaugaggaacugagggagcaauugagcucaguaucaucauucgagagauucgaaauauuccccaaagaaagcucauggcccaaccacaccguaaccaaaggagugacggcaucaugcucccauaaugggaaaagcaguuuuuacaaaaauuugcuauggcugacggaaaagaauggcuuguacccaaaucugagcaaguccuauguaaacaacaaggagaaagaaguccuuguacuaugggguguucaucacccgucuaacauaggggaccaaagggccaucuaucauacagaaaaugcuuaugucucuguagugucuucacauuauagcagaagauucaccccagaaauagcaaaaagacccaaaguaagagaucaagaagggagaauuaacuacuacuggacucugcuggaacccggggacacaauaauauuugaggcaaauggaaaucuaauagcgccaugguacgcuuucgcacugaguagaggcuuugggucaggaaucaucaccucaaacgcaucaaugggugaaugugacgcuaagugucaaacaccccaaggagcuauaaacaguagucuuccuuuccagaauguacacccagucacaauaggagagugucccaaguaugucaggaguacaaaauuaaggaugguuacaggacuaagaaacauuccauccauucaaucuagagguuuguuuggagccauugccgguuucauugaagggggguggacuggaaugauagauggaugguaugguuaucaucaucagaaugaacaaggaucuggcuaugcugcagaccaaaaaagcacacaaaaugccauugaugggauuacaaacaaggugaauucuguaaucgagaaaaugaacacucaauucacagcuguaggcaaagaauucaacaaauuagagagaaggauggaaaacuuaaauaagaaaguugaugauggauuucuggacauuuggacauauaaugcagaguuguugguucuccuggaaaaugaaaggacuuuggauuuucaugacucaaaugugaagaaucuguaugagaaaguaaaaaaccaauugaagaauaaugccaaagaaaucgggaacggguguuuugaauucuaucacaaguguaacaaugaaugcauggaaagcgugaaaaauggaacuuaugacuauccaaaauauuccgaagaaucaaaguuaaacagggaaaaaauugauggagugaaauuggaaucaaugggagucuaucagauucuggcgaucuacucaacugucgccaguucacuggugcuuuuggucucccugggggcaaucaguuucuggauguguucuaaugggucuuugcaguguagaauaugcaucuga

SEQ ID NO: 33526 - RNA, 1701 nt, Artificial Sequence; identical to SEQ ID NO: 32270
  derived and/or modified CDS sequence (wt) from hemagglutinin__InfluenzaA__ABM22301

SEQ ID NO: 33527 - RNA, 1701 nt, Artificial Sequence; identical to SEQ ID NO: 32270
  derived and/or modified CDS sequence (wt) from hemagglutinin__InfluenzaA__ABM22312

SEQ ID NO: 33528 - RNA, 1701 nt, Artificial Sequence; identical to SEQ ID NO: 32270
  derived and/or modified CDS sequence (wt) from hemagglutinin__InfluenzaA__ABM22323

SEQ ID NO: 33529 - RNA, 1701 nt, Artificial Sequence; identical to SEQ ID NO: 32270
  derived and/or modified CDS sequence (wt) from hemagglutinin__InfluenzaA__ABM22334

SEQ ID NO: 33530 - RNA, 1701 nt, Artificial Sequence; identical to SEQ ID NO: 32271
  derived and/or modified CDS sequence (wt) from hemagglutinin__InfluenzaA__ABM22345

SEQ ID NO: 33531 - RNA, 1701 nt, Artificial Sequence; identical to SEQ ID NO: 32271
  derived and/or modified CDS sequence (wt) from hemagglutinin__InfluenzaA__ABM22356

SEQ ID NO: 33532 - RNA, 1701 nt, Artificial Sequence; identical to SEQ ID NO: 32291
  derived and/or modified CDS sequence (wt) from hemagglutinin__InfluenzaA__ABM22367

SEQ ID NO: 33533 - RNA, 1698 nt, Artificial Sequence; identical to SEQ ID NO: 32854
  derived and/or modified CDS sequence (wt) from hemagglutinin__InfluenzaA__ABM66864

SEQ ID NO: 33534 - RNA, 1701 nt, Artificial Sequence
  derived and/or modified CDS sequence (wt) from hemagglutinin__InfluenzaA__ABM66886
augaaagcaaaacuacugguccuguuaugugcacuuucagcuacagaugcagacacaauauguauaggcuaccaugcgaacaacucaaccgacacuguugacacaguacucgaaaagaacgugacagugacacacucugucaaccuacuugaggacaaucacaacggaaaacuaugcaaacuaaaaggaauagccccacuacaauuggggaaaugcagcauugccggauggaucuuaggaaacccagaaugcgaaucacuguuuucuaagaaaucaugguccuacauugcagaaacaccaaacuccgagaauggaacauguuacccaggguauuucgccgacuaugaggaacugagggaacaauugaguucaguaucaucauucgagagauucgaaauauuccccaaggaaaguucauggcccaaacacaacguaaccaaaggaguaacggcaucaugcucccauaaggggaaaagcaguuuuuacagaaauuugcuauggcugacggagaaaaauggcucguacccaaaucugagcaaguccuaugugaacaacaaagagaaagaaguccuuguacuaugggguguucaucacccgucuaacauagaggaccaaaagaccaucuaucguaaagaaaaugcuuaugucucuguagugucuucacauuauaacaggagauucaccccagaaauagcaaaaagacccaaaguaagaaaucaagaagggagaauuaacuacuacuggacucugcuggaacccggggacacaauaauauuugaggcaaauggaaaucuaauagcgccaugguaugcuuucgcauugaguagaggcuuugggucaggaaucaucaccucaaacgcaucgauggaugaaugugacgcgaagugucaaacaccccagggagcuauaaacaguagucuuccuuuucagaauguacacccagucacaauaggagagugcccaaaguacgucaggaguacaaaauuaaggaugguuacaggacuaaggaacaucccauccauucaauccagagguuuguuuggagccauugccgguuucauugaagggggauggacuggaaugauugauggaugguaugguuaucaucaucagaaugaacagggaucuggcuaugcugcggaucaaaaaagcacacaaaaugccauuaacgggauuacaaacaaggugaacucuauaaucgagaaaaugaacacucaauucacagcuguggguaaagaguucaacaaacuagaaaaaaggauggaaaacuuaaauaaaaaaguugaugauggauuucuggacauuuggacauauaaugcagaauuguugguucuacuggaaaaugaaaggacuuuggauuuccaugacucaaaugugaagaaccuguaugagaaaguaaaaagccaauuaaagaauaaugccaaagaaauaggaaacggguguuuugaauucuaccacaaguguaacaaugaaugcauggaaaguguaaaaaaugggacuuaugacuauccaaaauauucagaagaaucaaaguuaaacagggaaaaaauugauggagugaaauuggaaucaaugggagucuaucagauucuggcgaucuacucaacugucgccaguucacuggugcuuuuggucucccugggggcaaucagcuucuggauguguucuaaugggucuuugcagugcagaauaugcaucuga

SEQ ID NO: 33535 - RNA, 1701 nt, Artificial Sequence
  derived and/or modified CDS sequence (wt) from hemagglutinin__InfluenzaA__ABM66897
augaaagcaaaacuacugguccuguuaugugcacuuucagcuacagacgcagacacaauauguauaggcuaccaugcgaacaacucaaccgacacuguugacacagugcucgaaaagaacgugacagugacacacucugucaaccuacuugaggacaaucacaacggaaaacuaugcaaacuaaaaggaauagccccacuacaauuggggaaaugcagcauugccggauggaucuuaggaaacccagaaugcgaaucacuguuuucuaagaaaucaugguccuacauugcagaaacaccaaacuccgagaauggaacauguuacccaggguauuucgccgacuaugaggaacugagggaacaauugagcucaguaucaucauucgagagauucgaaauauuccccaaggaaaguucauggcccaaacacaacguaaccaaaggaguaacggcaucaugcucccauaaggggaaaagcaguuuuuacagaaauuugcuauggcugacggagaaaaauggcucguacccaaaucugagcaaguccuaugugaacaacaaagagaaagaaguccuuguacuaugggguguucaucacccgucuaacauagaggaccaaaagaccaucuaucguaaagaaaaugcuuaugucucuguagugucuucacauuauaacaggagauucaccccagaaauagcaaaaagacccaaaguaagaaaucaagaagggagaauuaacuacuacuggacucugcuggaacccggggacacaauaauauuugaggcaaauggaaaucuaauagcgccaugguaugcuuucgcauugaguagaggcuuugggucaggaaucaucaccucaaacgcaucgauggaugaaugugacgcgaagugucaaacaccccagggagcuauaaacaguagucuuccuuuucagaauguacacccagucacaauaggagagugcccaaaguacgucaggaguacaaaauuaaggaugguuacaggacuaaggaacaucccauccauucaauccagagguuuguuuggagccauugccgguuucauugaagggggauggacuggaaugauugauggaugguaugguuaucaucaucagaaugaacagggaucuggcuaugcugcggaucaaaaaagcacacaaaaugccauuaacgggauuacaaacaaggugaacucuauaaucgagaaaaugaacacucaauucacagcuguggguaaagaauucaacaaacuagaaaaaaggauggaaaacuuaaauaaaaaaguugaugauggauuucuggacauuuggacauauaaugcagaauuguugguucuacuggaaaaugaaaggacuuuggauuuccaugacucaaaugugaagaaccuguaugagaaaguaaaaagccaauuaaagaauaaugccaaagaaauaggaaacggguguuuugaauucuaccacaaguguaacaaugaaugcauggaaaguguaaaaaaugggacuuaugacuauccaaaauauucagaagaaucaaaguuaaacagggaaaaaauugauggagugaaauuggaaucaaugggagucuaucagauucuggcgaucuacucaacugucgccaguucacuggugcuuuuggucucccugggggcaaucagcuucuggauguguucuaaugggucuuugcagugcagaauaugcaucuga

SEQ ID NO: 33536 - RNA, 1701 nt, Artificial Sequence; identical to SEQ ID NO: 32933
  derived and/or modified CDS sequence (wt) from hemagglutinin__InfluenzaA__ABM66908

SEQ ID NO: 33537 - RNA, 1701 nt, Artificial Sequence; identical to SEQ ID NO: 32271
  derived and/or modified CDS sequence (wt) from hemagglutinin__InfluenzaA__ABM66919

SEQ ID NO: 33538 - RNA, 1701 nt, Artificial Sequence; identical to SEQ ID NO: 32271
  derived and/or modified CDS sequence (wt) from hemagglutinin__InfluenzaA__ABM66930

SEQ ID NO: 33539 - RNA, 1701 nt, Artificial Sequence; identical to SEQ ID NO: 32271
  derived and/or modified CDS sequence (wt) from hemagglutinin__InfluenzaA__ABM66941

SEQ ID NO: 33540 - RNA, 1701 nt, Artificial Sequence
  derived and/or modified CDS sequence (wt) from hemagglutinin__InfluenzaA__ABM66952
augaagacuaucauugcuuugagcuacauucuaugucugguuuucgcucaaaaacuucccggaaaugacaacagcacggcaacgcugugccuugggcaccaugcaguaccaaacggaacgauagugaaaacaaucacgaaugaccaaauugaaguuacuaaugcuacugagcugguucagaguuccucaacagguggaauaugcgacaguccucaucagauccuugauggagaaaacugcacacuaauagaugcucuauugggagacccucagugugauggcuuccaaaauaagaaaugggaccuuuuuguugaacgcagcaaagccuacagcaacuguuacccuuaugaugugccggauuaugccucccuuaggucacuaguugccucauccggcacacuggaguuuaacaaugaaagcuucaauuggacuggagucacucaaaauggaacaagcucugcuugcaaaaggagaucuaauaacaguuucuuuaguagauugaauugguugacccacuuaaaauucaaauacccagcauugaacgugacuaugccaaacaaugaaaaauuugacaaauuguacauuugggggguucaccacccagguacggacaaugaccaaauuagccuauaugcucaagcuucaggaagaaucacagucucuaccaaaagaagccaacaaacuguaaucccgaauaucggaucuagacccaggguaagggauauccccagcagaauaagcaucuauuggacaauaguaaaaccgggagacauacuuuugauuaacagcacagggaaucuaauugcuccucgggguuacuucaaaauacgaagugggaaaagcucaauaaugagaucagaugcacccauuggcaaaugcaauucugaaugcaucacuccaaauggaagcauucccaaugacaaaccauuucaaaauguaaacaggaucacauauggggccugucccagauauguuaagcaaaacacucugaaauuggcaacagggaugcgaaauguaccagagaaacaaacuagaggcauauuuggcgcaaucgcggguuucauagaaaaugguugggagggaaugguggaugguugguacgguuucaggcaucaaaauucugagggaauaggacaagcagcagaucucaaaagcacucaagcagcaaucaaccaaaucaaugggaagcugaauagguugaucgggaaaaccaacgagaaauuccaucagauugaaaaagaauucucagaaguagaagggagaauucaggaccucgagaaauauguugaggacacuaaaauagaucucuggucauacaacgcggagcuucuuguugcccuggagaaccaacauacaauugaucuaacugacucagaaaugaacaaacuguuugaaagaacaaagaagcaacugagggaaaaugcugaggauaugggcaaugguuguuucaaaauauaccacaaaugugacaaugccugcauagggucaaucagaaauggaacuuaugaccaugauguauacagagaugaagcauuaaacaaccgguuccagaucaaagguguugagcugaagucaggauacaaagauuggauccuauggauuuccuuugccauaucauguuuuuugcuuuguguuguuuuguugggguucaucaugugggccugccaaaaaggcaacauuaggugcaacauuugcauuuga

SEQ ID NO: 33541 - RNA, 1701 nt, Artificial Sequence; identical to SEQ ID NO: 33540
  derived and/or modified CDS sequence (wt) from hemagglutinin__InfluenzaA__ABM66963

SEQ ID NO: 33542 - RNA, 1701 nt, Artificial Sequence; identical to SEQ ID NO: 33540
  derived and/or modified CDS sequence (wt) from hemagglutinin__InfluenzaA__ABM66974

SEQ ID NO: 33543 - RNA, 1701 nt, Artificial Sequence; identical to SEQ ID NO: 33540
  derived and/or modified CDS sequence (wt) from hemagglutinin__InfluenzaA__ABM66985

SEQ ID NO: 33544 - RNA, 1701 nt, Artificial Sequence; identical to SEQ ID NO: 32291
  derived and/or modified CDS sequence (wt) from hemagglutinin__InfluenzaA__ABM66996

SEQ ID NO: 33545 - RNA, 1701 nt, Artificial Sequence; identical to SEQ ID NO: 32291
  derived and/or modified CDS sequence (wt) from hemagglutinin__InfluenzaA__ABM67007

SEQ ID NO: 33546 - RNA, 1701 nt, Artificial Sequence; identical to SEQ ID NO: 32291
  derived and/or modified CDS sequence (wt) from hemagglutinin__InfluenzaA__ABM67018

SEQ ID NO: 33547 - RNA, 1701 nt, Artificial Sequence
  derived and/or modified CDS sequence (wt) from hemagglutinin__InfluenzaA__ABM67029
augaagacuaucauugcuuugagcuacauuauaugucugguuuucgcucaaaaacuucccggaaaugacaacagcacggcaacgcugugccuugggcaccaugcaguaccaaacggaacgauagugaaaacaaucacgaaugaccaaauugaaguuacuaaugcuacugaguugguucagaguuccucaacaggugaaauaugcgacaguccucaucagauccuugauggagaaaacugcacacuaauagaugcucuauugggagacccucagugugauggcuuccaaaauaagaaaugggaccuuuuuguugaacgcagcaaagccuacagcaacuguuacccuuaugaugugccggauuaugccucccuuaggucacuaguugccucauccggcacacuggaguuuaacaaugaaagcuucaauuggacuggagucacucaaaauggaacaagcucugcuugcaaaaggagaucuaauaacaguuucuuuaguagauugaauugguugacccacuuaaaauucaaauacccagcauugaacgugacuaugccaaacaaugaaaaauuugacaaauuguacauuugggggguucaccacccggguacggacaaugaccaaaucuuccuguaugcucaagcaucaggaagaaucacagucucuaccaaaagaagccaacaaacuguaaucccgaauaucggaucuagacccagaguaagggauauccccagcagaauaagcaucuauuggacaauaguaaaaccgggugacauacuuuugauuaacagcacagggaaucuaauugcuccuagggguuacuucagaauacgaagugggaaaagcucaauaaugagaucagaugcacccauuggcaaaugcaauucugaaugcaucacuccaaauggaagcauucccaaugacaaaccauuucaaaauguaaacaggaucacauauggggccugucccagauauguuaagcaaaacacucugaaauuggcaacagggaugcgaaauguaccagagaaacaaacuagaggcauauuuggcgcaaucgcggguuucauagaaaaugguugggagggaaugguggaugguugguacgguuucaggcaucaaaauucugagggaauaggacaagcagcagaucucaaaagcacucaagcagcaaucaaucaaaucaaugggaagcugaauagguugaucgggaaaaccaacgagaaauuccaucagauugaaaaagaauucucagaaguagaggggagaauucaggaccucgagaaauauguugaggacacuaaaauagaucucuggucauacaacgcggagcuucuuguugcccuggagaaccaacauacaauugaucuaacugacucagaaaugaacaaacuguuugaaagaacaaagaagcaacugagggaaaaugcugaggauaugggcaaugguuguuucaaaauauaccacaaaugugacaaugccugcauaggaucaaucagaaauggaacuuaugaccaugauguauacagagaugaagcauuaaacaaccgguuccagaucaaaggcguugagcugaagucaggauacaaagauuggauccuauggauuuccuuugccauaucauguuuuuugcuuuguguugcuuuauugggguucaucaugugggccugccaaaaaggcaacauuaggugcaacauuugcauuuga

SEQ ID NO: 33548 - RNA, 1698 nt, Artificial Sequence
  derived and/or modified CDS sequence (wt) from hemagglutinin__InfluenzaA__ABM67051
augaaaguaaaacuacugguucuguuauguacauuuacagcuacauaugcagacacaauauguauaggcuaccaugccaacaacucaaccgacacuguugacacaguacuugagaagaaugugacagugacacacucugucaaccuacuugaggacagucacaauggaaaacuaugucuacuaaaaggaauagccccacuacaauuggguaauugcagcguugccggauggaucuuaggaaacccagaaugcgaauuacugauuuccaaggaaucaugguccuacauuguagaaacaccaaauccugagaauggaacauguuacccaggguauuucgccgacuaugaggaacugagggagcaauugaguucaguaucuucauuugagagguucgaaauauuccccaaagagagcucauggcccaaccacaccguaaccggaguaucagcaucaugcucccauaacgggaaaagcaguuuuuacagaaauuugcuauggcugacggggaagaaugguuuguacccaaaccugagcaaguccuaugcaaacaacaaagagaaagaaguccuuguacuaugggguguucaccacccgccuaacauaggggaccaaagggcccucuaucauacagaaaaugcuuaugucucuguagugucuucacauuauagcagaagauucaccccagaaauagccaaaagacccaaggugagagaucaggaaggaagaaucaacuacuacuggacucugcuggaacccggggauacaauaauauuugaggcaaauggaaaucuaauagcgccaagguaugcuuucgcacugaguagaggcuuuggaucaggaaucaucaccucaaaugcaccaauggaugaaugugaugcgaagugucaaacaccucagggagcuauaaacagcagucuuccuuuccagaauguacacccagucacaauaggagaguguccaaaguaugucaggagugcaaaauuaaggaugguuacaggacuaaggaacaucccauccauucaauccagagguuuguuuggagccauugccgguuucauugaagggggguggacuggaaugguggaugguugguaugguuaucaucaucagaaugagcaaggaucuggguaugcugcagaucaaaaaagcacacaaaaugccauuaacgggauuacaaacaaggugaauucuguaauugagaaaaugaacacucaauucacagcugugggcaaagaauucaacaaauuggaaagaaggauggaaaacuuaaauaaaaaaguugaugauggguuucuagacauuuggacauauaaugcagaauuguugguucuacuggaaaaugaaaggacuuuggauuuccaugacuccaacgugaagaaucuguaugagaaaguaaaaagccaauuaaagaauaaugccaaagaaauaggaaacggguguuuugaauucuaucacaaguguaacgaugaaugcauggagagugugaaaaauggaacuuaugacuauccaaaauauuccgaagaaucaaaguuaaacagggagaaaauugauggagugaaauuggaaucaaugggagucuaucagauucuggcgaucuacucaacagucgccaguucccugguucuuuuggucucccugggggcaaucagcuucuggauguguuccaaugggucuuugcaguguagaauaugcaucuaa

SEQ ID NO: 33549 - RNA, 1707 nt, Artificial Sequence
  derived and/or modified CDS sequence (wt) from hemagglutinin__InfluenzaA__ABM90467
auggagaaaauagugcuucuucuuucaauagucagucuuguuaaaagugaucagauuugcauugguuaccaugcaaacaauucaacagagcagguugacacaaucauggaaaagaacguuacuguuacacaugcccaagacauacuggaaaagacacacaacgggaagcucugcgaucuagauggagugaagccucuaauuuuaagagauuguaguguagcuggauggcuccucgggaacccaaugugugacgaauucaucaacguaccggaauggucuuacauaguggagaaggccaauccaaccaaugaccucuguuacccagggaguuucaacgacuaugaagaacugaaacaccuauugagcagaauaaaccauuuugagaaaauucagaucauccccaaaaguucuugguccgaucaugaagccucaucaggagugagcucagcauguccauaccugggaagucccuccuuuuuuagaaaugugguauggcuuaucaaaaagaacaguacauacccaacaauaaagaaaagcuacaauaauaccaaccaagaagaucuuuugguacuguggggaauucaccauccuaauaaugaggcagagcagacaaggcuauaucaaaacccaaccaccuauauuuccauugggacaucaacacuaaaccagagauugguaccaaaaauagcuacuagauccaaaguaaacgggcaaaguggaaggauggaguuuuucuggacaauuuuaaaaccaaaugaugcaaucaacuucgagaguaauggaaauuucauugcuccagaauaugcauacaaaauugucaagaaaggggacucagcaauuaugaaaagugaauuggaauaugguaacugcaacaccaagugucaaacuccaaugggggcgauaaacucuaguaugccauuccacaacauacacccucucaccaucggggaaugccccaaauaugugaaaucaaacagauuaguccuugcaacagggcucagaaauagcccucaaagagagagcagaagaaaaaagagaggucuauuuggagcuauagcagguuuuauagagggaggauggcagggaaugguagaugguugguauggguaccaccauagcaaugagcaggggaguggguacgcugcagacaaagaaucuacucaaaaggcaauagauggagucaccaauaaggucaacucaauuauugacaaaaugaacacucaguuugaggccguuggaagggaauuuaauaacuuagaaaggagaauagagaauuuaaacaagaagauggaagacggguuucuagauguuuggacuuauaaugccgaacuucugguucucauggaaaaugagagaacucuagacuuucaugacucaaauguuaagaaccucuaugacaagguccgacuacagcuuagggauaaugcaaaggagcuggguaacgguuguuucgaguucuaucacaaaugugauaaugaauguauggaaaguauaaggaacggaacguacaacuauccgcaguauucagaagaagcaagauuaaaaagagaggaaauaagugggguaaaguuggaaucaauaggaacuuaccaaauacugucaauuuacucaacaguggcgaguucccuagcacuggcaaucaugauagcuggucuaucuuuauggaugugcuccaauggaucguuacaaugcagaauuugcauuuaa

SEQ ID NO: 33550 - RNA, 1707 nt, Artificial Sequence
  derived and/or modified CDS sequence (wt) from hemagglutinin__InfluenzaA__ABM90511
auggagaaaauagugcuucuucuuucaauagucagucuuguuaaaagugaucagauuugcauugguuaccaugcaaacaauucaacagagcagguugacacaaucauagaaaaaaacguuacuguuacacaugcccaagacauacuggaaaagacacacaacgggaagcucugcgaucuagauggagugaagccucuaauuuuaaaagauuguaguguagcuggauggcuccucgggaacccaaugugugacgaauucaucaacguaccggaauggucuuacauaguggaaaaggccaauccaaccaaugaccucuguuacccagggaguuucaacgacuaugaagaacugaaacaccuauugagcagaauaaaccauuuugagaaaauucagaucauccccaaaaguucuugguccgaucaugaagccucaucaggagugagcucagcauguccauaccugggaagucccuccuuuuuuagaaaugugguauggcuuaucaaaaagaacaguacauacccaacaauaaagaaaagcuacaauaauaccaaccaagaagaucuuuugguacuguggggaauucaccauccuaauaaugaggaagagcagacaaggcuauaucaaaacccaaccaccuauauuuccauugggacaucaacacuaaaccagagauugguaccaaaaauagcuacuagauccaaaguaaacgggcaaagugggaggauggaguucuucuggacaauuuuaaaaccaaaugaugcaaucaauuucgagagcaauggaaauuucauugcuccagaauaugcauacaaaauugucaagaaaggggacucagcaauuaugaagagugaauuggaauauaguaacugcaacaccaagugucaaacuccaaugggggcgauaaacucuaguaugccauuccacaacauacacccucucaccaucggggaaugccccaaauaugugaaaucaagcagauuaguccuugcaacagggcucagaaauagcccucaaagagagagcagaagaaaaaagagaggucuauuuggagcuauagcagguuuuauagagggaggauggcagggaaugguagaugguugguauggguaccaccauagcaaugagcaggggaguggguacgcugcagacaaagaaucuacucaaaaggcaauagauggagucaccaauaaggucaacucaauuauugacaaaaugaacacucaguuugaggccguuggaagggaauuuaauaacuuagaaaggagaauagagaauuuaaacaagaagauggaagacggguuucuagauguuuggacuuauaaugccgaacuucugguucucauggaaaaugagagaacucuagacuuucaugacucaaauguuaagaaccucuaugacaagguccgacuacagcuuagggauaaugcaaaggagcuggguaacgguuguuucgaguucuaucacaaaugugauaaugaauguauggaaaguauaagaaacggaacguacaacuauccgcaguauucagaagaagcaagauuaaaaagagaggaaauaagugggguaaaguuggaaucaauaggaacuuaccaaauacugucaauuuacucaacaguggcgaguucccuagcacuggcaaucaugauagcuggucuaucuuuauggaugugcuccaauggaucguuacaaugcagaauuugcauuuaa

SEQ ID NO: 33551 - RNA, 1707 nt, Artificial Sequence
  derived and/or modified CDS sequence (wt) from hemagglutinin__InfluenzaA__ABM90533
auggagaaaauagugcuucuucuuucaauagucagucuuguuaaaagugaucagauuugcauugguuaccaugcaaacaauucaacagagcagguugacacaaucauggaaaaaaacguuacuguuacacaugcccaagacauacuggaaaagacacacaacgggaagcucugcgaucuagauggagugaagccucuaauuuuaaaagauuguaguguagcuggauggcuccucgggaacccaaugugugacgaauucaucaacguaccggaauggucuuacauaguggaaaaggccaauccaaccaaugaccucuguuacccagggaguuucaacgacuaugaagaacugaaacaccuauugagcagaauaaaccauuuugagaaaauucagaucauccccaaaaguucuugguccgaucaugaagccucaucaggagugagcucagcauguccauaccugggaagucccuccuuuuuuagaaaugugguauggcuuaucaaaaagaacaguacauacccaacaauaaagaaaagcuacaauaauaccaaccaagaagaucuuuugguacuguggggaauucaccauccuaauaaugaggaagagcagacaaggcuauaucaaaacccaaccaccuauauuuccauugggacaucaacacuaaaccagagauugguaccaaaaauagcuacuagauccaaaguaaacgggcaaagugggaggauggaguucuucuggacaauuuuaaaaccaaaugaugcaaucaauuucgagagcaauggaaauuucauugcuccagaauaugcauacaaaauugucaagaaaggggacucagcaauuaugaagagugaauuggaauauaguaacugcaacaccaagugucaaacuccaaugggggcgauaaacucuaguaugccauuccacaacauacacccucucaccaucggggaaugccccaaauaugugaaaucaagcagauuaguccuugcaacagggcucagaaauagcccucaaagagagagcagaagaaaaaagagaggucuauuuggagcuauagcagguuuuauagagggaggauggcagggaaugguagaugguugguauggguaccaccauagcaaugagcaggggaguggguacgcugcagacaaagaaucuacucaaaaggcaauagauggagucaccaauaaggucaacucaauuauugacaaaaugaacacucaguuugaggccguuggaagggaauuuaauaacuuagaaaggagaauagagaauuuaaacaagaagauggaagacggguuucuagauguuuggacuuauaaugccgaacuucugguucucauggaaaaugagagaacucuagacuuucaugacucaaauguuaagaaccucuaugacaagguccgacuacagcuuagggauaaugcaaaggagcuggguaacgguuguuucgaguucuaucacaaaugugauaaugaauguauggaaaguauaagaaacggaacguacaacuauccgcaguauucagaagaagcaagauuaaaaagagaggaaauaagugggguaaaguuggaaucaauaggaacuuaccaaauacugucaauuuacucaacaguggcgaguucccuagcacuggcaaucaugauagcuggucuaucuuuauggaugugcuccaauggaucguuacaaugcagaauuugcauuuaa

SEQ ID NO: 33552 - RNA, 1707 nt, Artificial Sequence; identical to SEQ ID NO: 33551
  derived and/or modified CDS sequence (wt) from hemagglutinin__InfluenzaA__ABM90544

SEQ ID NO: 33553 - RNA, 1701 nt, Artificial Sequence
  derived and/or modified CDS sequence (wt) from hemagglutinin__InfluenzaA__ABN50900
augaaagcaaaacugcugguccuguuaugugcacuuucagcuacagaugcagacacaauauguauaggcuaccaugcgaacaacucaaccgauacuguugacacaguacucgaaaagaacgugacagugacacacucugucaaccuacuugaggacagucacaacggaaaacuaugcagacuaaaaggaauagccccacuacaauuggggaaaugcagcauugccggguggaucuuaggaaacccagaaugugaaucacuguuuucuaagaaaucaugguccuacauugcagaaacaccaaacuccgagaaugggacauguuacccaggguauuucgccgacuaugaggaacugagggagcaauugaguucaguaucaucauucgagagauucgaaauauuccccaaggaaaguucauggcccaaacacaacguaaccagaggaguaacggcaucaugcucccauaaggggaaaagcaguuuuuacagaaauuugcuauggcugacggagaaaaauggcucguacccaaaucugagcaaguccuaugugaacaacaaagagaaagaaguccuuguacuaugggguguucaucacccgucuaacauagaggaccaaaagaccaucuaucguaaagaaaaugcuuaugucucuguagugucuucacauuauaacagaagauucaccccagaaauagcaaaacgacccaaaguaagaggucaagaagggagaauuaacuacuacuggacucugcuggaacccggggacacaauaauauuugaggcaaauggaaaucuaauagcgccaugguaugcuuucgcacugaguagaggcuuugggucaggaaucaucaccucaaacgcaucaauggaugaaugugacgcgaagugucaaacaccccagggagcuauaaacaguagucuuccuuuccagaauguacacccagucacaauaggagagugcccaaaauacgucaggaguacaaaauuaaggauggucacaggacuaaggaacauuccauccauucaauccagagguuuguuuggagccauugccgguuucauugaagggggauggacuggaaugauagauggaugguaugguuaucaucaucagaaugaacagggauccggcuaugcugcagaucaaaaaagcacacaaaaugccauuaacgggauuacaaacaaggugaacucuguuaucgagaaaaugaacacucaauucacagcuguagguaaagaauucaacaaauuagaaaaaaggauggaaaacuuaaauaaaaaaguugaugauggguuucuggacauuuggacauauaaugcagaauuguugguucuacuggaaaaugaaaggacuuuggauuuucaugacucaaaugugaagaaccuguaugagaagguaaaaagccaauuaaagaauaaugccaaagaaauaggaaacggguguuuugaauucuaccacaaguguaacaaugaaugcauggagaguguaaaaaauggaacuuaugacuauccaaaauauucagaggaaucaaaguuaaacagggaaaaaauugauggagugaaauuggaaucaaugggagucuaucagauucuggcgaucuacucaacugucgccaguucacuggugcuuuuggucucccugggggcaaucagcuucuggauguguucuaaugggucuuugcagugcagaauaugcaucuga

SEQ ID NO: 33554 - RNA, 1701 nt, Artificial Sequence; identical to SEQ ID NO: 32933
  derived and/or modified CDS sequence (wt) from hemagglutinin__InfluenzaA__ABN50917

SEQ ID NO: 33555 - RNA, 1701 nt, Artificial Sequence
  derived and/or modified CDS sequence (wt) from hemagglutinin__InfluenzaA__ABN50928
augaaagcaaaacuacuaauccuguuaugugcauuuacagcuacagaugcagacacaauauguauaggcuaccaugcgaacaacucaaccgacacuguugacacaguacuugaaaagaacgugacagugacacacucugucaaccuacuugaggacagucacaacggaaaacuaugucgacuaaaaggaauagccccacuacaauuggguaauugcagcauugccggauggauuuuaggaaacccagaaugcgaaucacuguuuucuaagaaaucaugguccuacauugcagaaacaccaaacuccgagaauggaacauguuacccaggguauuucgccgacuaugaggaacugagagagcaauugaguucaguaucaucauucgagagauucgaaauauuccccaaagaaagcucauggcccaaccacaccguaaccaaaggaguaacggcaucaugcucccauaaggggaaaagcaguuuuuacagaaauuugcuauggcugacggagaagaauggcucguacccaaaucugagcaaguccuaugugaacaacaaagagaaagaaguccuuguacuaugggguguucaucacccgucuaacauaggggaccaaagggccaucuaucauacagaaaaugcuuaugucucuguagugucuucacauuauaacaggagauucaccccagaaauagcaaaaagacccaaaguaagaggucaagaaggaagaauuaacuacuacuggacucugcuggaacccggggacacaauaauauuugaggcaaauggaaaucuaauagcgccaugguaugcuuucgcacugaguagaggcuuugggucaggaaucaucaccucaaacgcaucaauggaugaaugugacgcgaagugucaaacaccccagggagcuauaaacaguagucuuccuuuccagaauguacacccagucacaauaggagagugcccaaaguaugucaggaguacaaaauuaagaaugguuacaggacuaaggaacaucccauccauucaauccagagguuuguuuggagccauugccgguuucauugaagggggguggacuggaaugauagauggaugguaugguuaucaucaucagaaugaacaaggaucuggcuaugcugcggaucaaaaaagcacacaaaaugccauuaacgggauuacaaacaaggugaauucuguaaucgagaaaaugaacacucaauucacagcugugggcaaagaauucaacaaauuagaaagaaggauggaaaacuuaaauaaaaaaguugaugauggauuucuggacauuuggacauauaaugcagaauuguugguucuacuggaaaaugaaaggacuuuggauuuucaugacucaaaugugaagaaucuguaugagaaaguaaaaagccaauuaaagaacaaugccaaagaaauaggaaacggguguuuugaauucuaccacaaguguaacaaugaaugcauggaaagugugaaaaauggaacuuaugacuauccaaaauauuccgaggaaucaaaguuaaacagggaaaaaauugauggagugaaauuggaaucaaugggagucuaucagauucuggcgaucuacucaacugucgccaguucacuggugcuuuuggucucccugggggcaaucagcuucuggauguguucuaaugggucuuugcaguguagaauaugcaucuga

SEQ ID NO: 33556 - RNA, 1701 nt, Artificial Sequence
  derived and/or modified CDS sequence (wt) from hemagglutinin__InfluenzaA__ABN50940
augaaagcaaaacuacuaguccuguuaugugcauucacagcuacagaugcagacacaauauguauaggcuaccaugcgaacaacucaaccgacacuguugacacaguacuugaaaagaacgugacagugacacacucugucaaccuacuugaggacagucacaacggaaaacuaugucgacuaaaaggaauagccccacuacaauuggguaauugcaguauugccggauggauuuuaggaaacccagaaugcgaaucacuguuuucuaagaaaucaugguccuacauugcagaaacaccaaacuccgagaauggaacauguuacccaggguauuucucugacuaugaggaacugagggagcaauugaguucaguaucaucauucgagagauucgaaauauuccccaaagaaagcucauggcccaaccacaccguaaccaaaggaguaacggcaucaugcucccauaaggggaaaagcaguuuuuacagaaauuugcuauggcugacggagaagaauggcucguacccaaaucugagcaaguccuaugugaacaacaaagagaaagaaguccuuguacuaugggguguucaucacccgucuaacauaggggaccaaagggccaucuaucauacagaaaaugcuuaugucucuguagugucuucacauuauaacaggagauucaccccagaaauagcaaaaagacccaaaguaagagaucaagaaggaagaauuaacuacuacuggacucugcuggaacccgaggacacaauaauauuugaggcaaauggaaaucuaauagcgccaugguaugcuuuugcacugaguagaggcuuugggucaggaaucaucaccucaaacgcaucaauggaugaaugugacgcgaagugucaaacaccccagggagcuauaaacaguagucuuccuuuccagaauguacacccagucacaauaggagagugcccaaaguaugucaggaguacaaaauuaagaaugguuacaggacuaaggaacaucccauccauucaauccagagguuuguuuggagccauugccgguuucauugaagggggguggacuggaaugauagauggaugguaugguuaucaucaucagaaugaacaaggaucuggcuaugcugcggaucaaaaaagcacacaaaaugccauuaacgggauuacaaacaaggugaauucuguaaucgagaaaaugaacacucaauucacagcugugggcaaagaauucaacaaauuagaaagaaggauggaaaacuuaaauaaaaaaguugaugauggguuucuggacauuuggacauauaaugcagaauuguugguucuacuggaaaaugaaaggacuuuggauuuucaugacucaaaugugaagaaucuguaugagaaaguaaaaagccaauuaaagaacaaugccaaagaaauaggaaacggguguuuugaauucuaccacaaguguaacaaugaaugcauggaaagugugaaaaauggaacuuaugacuauccaaaauauuccgaggaaucaaaguuaaacagggaaaaaauugauggagugaaauuggaaucaaugggagucuaucagauucuggcgaucuacucaacugucgccaguucacuggugcuuuuggucucccugggggcaaucagcuucuggauguguucuaaugggucuuugcaguguagaauaugcaucuga

SEQ ID NO: 33557 - RNA, 1701 nt, Artificial Sequence
  derived and/or modified CDS sequence (wt) from hemagglutinin__InfluenzaA__ABN50951
augaaaguaaaacuacuaguccuguugugugcauuuacagcuacauaugcagacacaauauguauaggcuaccaugcgaacaacucaaccgacacuguugacacaguacuugagaagaacgugacagugacacacucugucaaccuacuugaggacagucacaacggaaaacuaugccgacuaaaaggaacagccccacuacaauuggguaauugcagcguugccggauggaucuuaggaaacccagaaugcgaaucacuguuuucuaaggagucaugguccuacauugcagaaacaccaaacccugagaauggaacauguuacccaggguauuucgccgacuaugaggaacugagggagcaauugagcucaguaucaucauucgagagauucgaaauauuccccaaggaaagcucauggcccaaccacaccguaaccaaaggagugacggcaucaugcucccauaaugggaaaagcaguuuuuacaaaaauuugcuauggcugacggaaaagaauggcuuguacccaaaucugagcaaguccuauguaaacaacaaggagaaagaaguccuuguacuaugggguguucaucacccgucuaacauaggggaccaaagggccaucuaucauacagaaaaugcuuaugucucuguagugucuucacauuauagcagaagauucaccccagaaauagcaaaaagacccaaaguaagagaucaagaagggagaauuaacuacuacuggacucugcuggaacccggggacacaauaauauuugaggcaaauggaaaucuaauagcgccaugguacgcuuucgcacugaguagaggcuuugggucaggaaucaucaccucaaacgcaucaaugggugaaugugacgcuaagugucaaacaccccaaggagcuauaaacaguagucuuccuuuccagaauguacacccagucacaauaggagagugucccaaguaugucaggaguacaaaauuaaggaugguuacaggacuaagaaacaucccauccauucaaucuagagguuuguuuggagccauugccgguuucauugaagggggguggacuggaaugauagauggaugguaugguuaucaucaucagaaugaacaaggaucuggcuaugcugcagaccaaaaaagcacacaaaaugccauugaugggauuacaaacaaggugaauucuguaaucgagaaaaugaacacucaauucacagcuguaggcaaagaauucaacaaauuagagagaaggauggaaaacuuaaauaagaaaguugaugauggauuucuggacauuuggacauauaaugcagaguuguugguucuccuggaaaaugaaaggacuuuggauuuucaugacucaaaugugaagaaucuguaugagaaaguaaaaaaccaauugaagaauaaugccaaagaaaucgggaacggguguuuugaauucuaucacaaguguaacaaugaaugcauggaaagugugaaaaauggaacuuaugacuauccaaaauauuccgaagaaucaaaguuaaacagggaaaaaauugauggagugaaauuggaaucaaugggcgucuaucagauucuggcgaucuacucaacugucgccaguucacuggugcuuuuggucucccugggggcaaucaguuucuggauguguucuaaugggucuuugcaguguagaauaugcaucuga

SEQ ID NO: 33558 - RNA, 1701 nt, Artificial Sequence
  derived and/or modified CDS sequence (wt) from hemagglutinin__InfluenzaA__ABN50962
augaaagcaaaacuacuaguccuguugugugcauuuacagcuacauaugcagacacaauauguauaggcuaccaugcgaacaacucaaccgacacuguugacacaguacuugagaagaacgugacagugacacacucugucaaccuacuugaggacagucacaacggaaaacuaugccgacuaaaaggaacagccccacuacaauuggguaauugcagcguugccggauggaucuuaggaaacccagaaugcgaaucacuguuuucuaaggaaucaugguccuacauugcagaaacaccaaacccugagaauggaacauguuacccaggguauuucgccgacuaugaggaacugagggagcaauugagcucaguaucaucauucgagagauucgaaauauuccccaaggaaagcucauggcccaaccacacaguaaccaaaggagugacggcaucaugcucccauaaugggaaaagcaguuuuuacaaaaauuugcuauggcugacggaaaagaauggcuuguacccaaaucugagcaaguccuauguaaacaacaaggagaaagaaguccuuguacuaugggguguucaucacccgucuaacauaggggaccaaagggccaucuaucauacagaaaaugcuuaugucucuguggugucuucacauuauagcagaagauucaccccagaaauagcaaaaagacccaaaguaagagaucaagaagggagaauuaacuacuacuggacucugcuggaacccggggacacaauaauauuugaggcaaauggaaaucuaauagcgccaugguacgcuuucgcauugaguagaggcuuugggucaggaaucaucaccucaaacgcaucaaugggugaaugugacgcuaagugucaaacaccccaaggagcuauaaacaguagucuuccuuuccagaauguacacccagucacaauaggagagugucccaaguaugucaggaguacaaaauuaaggaugguuacaggacuaagaaacaucccauccauucaaucuagagguuuguuuggagccauugccgguuucauugaagggggguggacuggaaugauagauggaugguaugguuaucaucaucagaaugaacaaggaucuggauaugcugcagacaaaaaaagcacacaaaaugccauugaugggauuacaaacaaggugaauucuguaaucgagaaaaugaacacucaauucacagcuguaggcaaagaauucaacaaauuagagagaaggauggaaaacuuaaauaagaaaguugaugauggauuucuggacauuuggacauauaaugcagaguuguugguucuccuggaaaaugaaaggacuuuggauuuucaugacucaaaugugaagaaucuguaugagaaaguaaaaaaccaauugaagaauaaugccaaagaaaucgggaacggguguuuugaauucuaucacaaguguaacaaugaaugcauggaaagugugaaaaauggaacuuaugacuauccaaaauauuccgaagaaucaaaguuaaaaagggaaaaaauugauggagugaaauuggaaucaaugggagucuaucagauucuggcgaucuacucaacugucgccaguucacuggugcuuuuggucucccugggggcaaucaguuucuggauguguucuaaugggucuuugcaguguagaauaugcaucuga

SEQ ID NO: 33559 - RNA, 1701 nt, Artificial Sequence
  derived and/or modified CDS sequence (wt) from hemagglutinin__InfluenzaA__ABN50973
augaaagcaaaacuacuaguccuguugugugcauuuacagcuacauaugcagacacaauauguauaggcuaccaugcgaacaacucaaccgacacuguugacacaguacuugagaagaacgugacagugacacacucugucaaccuacuugaggacagucacaacggaaaacuaugccgacuaaaaggaacagccccacuacaauuggguaauugcagcguugccggauggaucuuaggaaacccagaaugcgaaucacuguuuucuaaggaaucaugguccuacauugcagaaacaccaaacccugagaauggaacauguuacccaggguauuucgccgacuaugaggaacugagggagcaauugagcucaguaucaucauucgagagauucgaaauauuccccaaggaaagcucauggcccaaccacacaguaaccaaaggagugacggcaucaugcucccacaaugggaaaagcaguuuuuacaaaaauuugcuauggcugacggaaaagaauggcuuguacccaaaucugagcaaguccuauguaaacaacaaggagaaagaaguccuuguacuaugggguguucaucacccgucuaacauaggggaccaaagggccaucuaucauacagaaaaugcuuaugucucuguggugucuucacauuauagcagaagauucaccccagaaauagcaaaaagacccaaaguaagagaucaagaagggagaauuaacuacuacuggacucugcuggaacccggggacacaauaauauuugaggcaaauggaaaucuaauagcgccaugguacgcuuucgcauugaguagaggcuuugggucaggaaucaucaccucaaacgcaucaaugggugacugugacgcuaagugucaaacaccccaaggagcuauaaacaguagucuuccuuuccagaauguacacccagucacaauaggagagugucccaaguaugucaggaguacaaaauuaaggaugguuacaggacuaagaaacaucccauccauucaaucuagagguuuguuuggagccauugccgguuucauugaagggggguggacuggaaugauagauggaugguaugguuaucaucaucagaaugaacaaggaucuggcuaugcugcagacaaaaaaagcacacaaaaugccauugaugggauuacaaacaaggugaauucuguaaucgagaaaaugaacacucaauucacagcuguaggcaaagaauucaacaaauuagagagaaggauggaaaacuuaaauaagaaaguugaugauggauuucuggacauuuggacauauaaugcagaguuguugguucuccuggaaaaugaaaggacuuuggauuuucaugacucaaaugugaagaaucuguaugagaaaguaaaaaaccaauugaagaauaaugccaaagaaaucgggaacggguguuuugaauucuaucacaaguguaacaaugaaugcauggaaagugugaaaaauggaacuuaugacuauccaaaauauuccgaagaaucaaaguuaaaaagggaaaaaauugauggagugaaauuggaaucaaugggagucuaucagauucuggcgaucuacucaacugucgccaguucacuggugcuuuuggucucccugggggcaaucaguuucuggauguguucuaaugggucuuugcaguguagaauaugcaucuga

SEQ ID NO: 33560 - RNA, 1701 nt, Artificial Sequence; identical to SEQ ID NO: 32270
  derived and/or modified CDS sequence (wt) from hemagglutinin__InfluenzaA__ABN50984

SEQ ID NO: 33561 - RNA, 1701 nt, Artificial Sequence; identical to SEQ ID NO: 32271
  derived and/or modified CDS sequence (wt) from hemagglutinin__InfluenzaA__ABN50995

SEQ ID NO: 33562 - RNA, 1701 nt, Artificial Sequence
  derived and/or modified CDS sequence (wt) from hemagglutinin__InfluenzaA__ABN51043
augaagacuaucauugcuuugagcuacauucuaugucugguuuucgcucaaaaacuucccggaaaugacaacagcacggcaacgcugugccuugggcaccaugcaguaccaaacggaacgauagugaaaacaaucacgaaugaccaaauugaaguuacuaaugcuacugagcugguucagaguuccucaacaggugaaauaugcgacaguccucaucagauccuugauggagaaaacugcacacuaauagaugcucuauugggagacccucagugugauggcuuccaaaauaagaaaugggaccuuuuuguugaacgcagcaaagccuacagcaacuguuacccuuaugaugugccggauuaugccucccuuaggucacuaguugccucauccggcacacuggaguuuaacaaugaaagcuucaauuggacuggagucacucaaaauggaacaagcucugcuugcaaaaggagaucuaauaacaguuucuuuaguagacugaauugguugacccacuuaaaauucaaauacccagcauugaacgugacuaugccaaacaaugaaaaauuugacaaauuguacauuugggggguucaccacccggguacggacaaugaccaaaucuucuuguaugcucaagcaucaggaagaaucacagucucuaccaaaagaagccaacaaacuguaaucccgaauaucggauccagaccuagaguaagggauauccccagcagaauaagcaucuauuggacaauaguaaaaccgggagacauacuuuugauuaacagcacagggaaucuaauugcuccuagggguuacuucaaaauacgaagugggaaaagcucaauaaugagaucagaugcacccauuggcaaaugcaauucugaaugcaucacuccaaauggaagcauucccaaugacaaaccauuucaaaauguaaacagaaucacauauggggccugucccagauauguuaagcaaaacacucugaaauuggcaacagggaugagaaauguaccagagaaacaaacuagaggcauauuuggcgcaaucgcggguuucauagaaaaugguugggagggaaugguggaugguugguacgguuucaggcaucaaaauucugagggaauaggacaagcagcagaucucaaaagcacucaagcagcaaucaaucaaaucaaugggaagcugaauagguugaucgggaaaaccaacgagaaauuccaucagauugaaaaagaauucucagaaguagaagggagaauucaggaccucgagaaauauguugaggacacuaaaauagaucucuggucauacaacgcggagcuucuuguugcccuggagaaccaacauacaauugaucuaacugacucagaaaugaacaaacuguuugaaagaacaaagaagcaacugagggaaaaugcugaggauaugggcaaugguuguuucaaaauauaccacaaaugugacaaugccugcauaggaucaaucagaaauggaacuuaugaccaugauguauacagagaugaagcauuaaacaaccgguuccagaucaaaggcguugagcugaagucaggauacaaagauuggauccuauggauuuccuuugccauaucauguuuuuugcuuuguguuguuuuguugggguucaucaugugggccugccaaaaaggcaacauuaggugcaacauuugcauuuga

SEQ ID NO: 33563 - RNA, 1701 nt, Artificial Sequence
  derived and/or modified CDS sequence (wt) from hemagglutinin__InfluenzaA__ABN51054
augaagacuaucauugcuuugagcuacauucuaugucugguuuucgcucaaaaacuucccggaaaugacaacagcacggcaacgcugugccuugggcaccaugcaguaccaaacggaacgauagugagaacaaucacgaaugaccaaauugaaguuacuaaugcuacugagcugguucagaguuccucaacaggugaaauaugcgacagcccucaucagauccuugauggagaaaacugcacacuaauagaugcucuauugggagacccucagugugauggcuuccaaaauaagaaaugggaccuuuuuguugaacgcagcaaagccuacagcaacuguuacccuuaugaugugccggauuaugccucccuuaggucacuaguugccucauccggcacacuggaguuuaacaaugaaagcuucaauuggacuggagucacucaaaauggaacaagcucugcuugcaaaaggagaucuaauaacaguuucuuuaguagauugaauugguugacccacuuaaaauucaaauacccagcauugaacgugacuaugccaaacaaugaaaaauuugacaaauuguacauuugggggguucaccacccggguacggacaaugaccaaaucuuccuguaugcucaagcaucaggaagaaucacagucucuaccaaaaggagccaacaaacuguaaucccgaauaucggaucuagacccagaguaaggaauauccccagcagaauaagcaucuauuggacaauaguaaaaccgggagacauacuuuugauuaacagcacagggaaucuaauugcuccuagggguuacuucaaaauacgaagugggaaaagcucaauaaugagaucagaugcacccauuggcaaaugcaauucugaaugcaucacuccaaauggaagcauucccaaugacaaaccauuucaaaauguaaacaggaucacauauggggccugucccagauauguuaagcaaaacacucugaaauuggcaacagggaugcgaaauguaccagagaaacaaacuagaggcauauuuggcgcaaucgcggguuucauagaaaaugguugggagggaaugguggaugguugguacgguuucaggcaucaaaauucugagggaauaggacaagcagcagaucucaaaagcacucaagcagcaaucaaucaaaucaaugggaagcugaauagguugaucgggaaaaccaacgagaaauuccaucagauugaaaaagaauucucagaaguagaagggagaauucaggaccucgagaaauauguugaggacacuaaaauagaucucuggucauacaacgcggagcuucuuguugcccuggagaaccaacauacaauugaucuaacugacucagaaaugaacaaacuguuugaaagaacaaagaagcaacugagggaaaaugcugaggauaugggcaaugguuguuucaaaauauaccacaaaugugacaaugccugcauaggaucaaucagaaauggaacuuaugaccaugauguauacagagaugaagcauuaaacaaccgguuccagaucaaaggcguugagcugaagucaggauacaaagauuggauccuauggauuuccuuugccauaucauguuuuuugcuuuguguugcuuuguugggguucaucaugugggccugccaaaaaggcaacauuaggugcaacauuugcauuuga

SEQ ID NO: 33564 - RNA, 1701 nt, Artificial Sequence
  derived and/or modified CDS sequence (wt) from hemagglutinin__InfluenzaA__ABN51066
augaaagcaaaacuacuaguccuguugugugcauuuacagcuacauaugcagacacaauauguauaggcuaccaugcgaacaacucaaccgacacuguugacacaguacuugagaagaacgugacagugacacacucugucaaccuacuugaggacagucacaacggaaaacuaugccgacuaaaaggaacagccccacuacaauuggguaauugcagcguugccggauggaucuuaggaaacccagaaugcgaaucacuguuuucuaaggaaucaugguccuacauugcagaaacaccaaacccugagaauggaacauguuacccaggguauuucgccgacuaugaggaacugagggagcaauugagcucaguaucaucauucgagagauucgaaauauuccccaagaaaagcucauggcccaaccacacaguaaccaaaggagugacggcaucaugcucccauaaugggaaaagcaguuuuuacaaaaauuugcuauggcugacggaaaagaauggcuuguacccaaaucugagcaaguccuauguaaacaacaaggagaaagaaguccuuguacuaugggguguucaucacccgucuaacauaggggaccaaaggaccaucuaucauacagaaaaugcuuaugucucuguggugucuucacauuauagcagaagguucaccccagaaauagcaaaaagacccaaaguaagagaucaagaagggagaauuaacuacuacuggacucugcuggaacccggggacacaauaauauuugaggcaaauggaaaucuaauagcgccaugguaugcuuucgcauugaguagaggcuuugggucaggaaucaucaccucaaacgcaucaaugggugacugugacgcuaagugucaaacaccccaaggagcuauaaacaguagucuuccuuuccagaauguacacccagucacaauaggagagugucccaaguaugucaggaguacaaaauuaaggaugguuacaggacuaagaaacaucccauccauucaaucuagagguuuguuuggagccauugccgguuucauugaagggggguggacuggaaugauagauggaugguaugguuaucaucaucagaaugaacaaggaucuggcuaugcugcagacaaaaaaagcacacaaaaugccauugaugggauuacaaacaaggugaauucuguaaucgagaaaaugaacacucaauucacagcuguaggcaaagaauucaacaaauuagagagaaggauggaaaacuuaaauaagaaaguugaugauggauuucuggacauuuggacauauaaugcagaguuguugguucuccuggaaaaugaaaggacuuuggauuuucaugacucaaaugugaagaaucuguaugagaaaguaaaaaaccaauugaagaauaaugccaaagaaaucgggaacggguguuuugaauucuaucacaaguguaacaaugaaugcauagaaagugugaaaaauggaacuuaugacuauccaaaauauuccgaagaaucaaaguuaaaaagggaaaaaauugauggagugaaauuggaaucaaugggagucuaucagauucuggcgaucuacucaacugucgccaguucacuggugcuuuuggucucccugggggcaaucgguuucuggauguguucuaaugggucuuugcaguguagaauaugcaucuga

SEQ ID NO: 33565 - RNA, 1698 nt, Artificial Sequence
  derived and/or modified CDS sequence (wt) from hemagglutinin__InfluenzaA__ABN51077
augaaagcaaaacuacugguccuguuauguacauuuacagcuacauacgcagacacaauauguauaggcuaccaugccaacaacucaacagacacuguugacacaguacuugagaagaaugugacagugacacacucugucaaccuacuugaggacagucacaauggaaaacuaugucuacuaaaaggaauagccccacuacaauuggguaauugcagcguugccggauggaucuuaggaaacccagaaugcgaauuacugauuuccaaggaaucaugguccuacauuguagaaacaccaaaucccgagaauggaacauguuacccaggguauuucgccgacuaugaggaacugagggagcaauugaguucaguaucuucauuugagagauucgaaauauuccccaaaggaagcucauggcccaaccacaccguaaccggaguaucagcaucaugcucccauaaugggaaaagcaguuuuuacagaaauuugcuauggcugacggggaagaaugguuuguacccaaaccugagcauguccuauguaaacaacaaagagaaagaaguccuugugcuaugggguguucaucacccaccuaacauaggggaccaaagggcccucuaccauacagaaaaugcuuaugucucuguagugucuucacauuauagcagaagauucaccccagaaauagccaaaagacccaaaguaagagaucaggaaggaagaaucaacuacuacuggacucugcuggaacccggggacacaauaauauuugaggcaaauggaaaucuaauagcgccaugguaugcuuucgcacugaguagaggcuuuggaucagggaucaucaccucaaaugcaccaauggaugaaugugaugcgaagugucaaacaccucagggagcuauaaacaguagucuuccuuuccagaauguacacccaguuacaauaggagaguguccaaaguaugucaggagugcaaaauuaaggaugguuacaggacuaaggaacaucccauccauucaauccagagguuuguuuggagccauugccgguuucauugaagggggguggacuggaaugguagaugggugguaugguuaucaucaucagaaugagcaaggaucuggcuaugcugcagaucaaaaaagcacacaaaaugccauuaacgggauuacgaacaaggugaauucuguaauugagaaaaugaacacucaauucacagcugugggcaaagaauucaacaaauuagaaagaaggauggaaaacuuaaauaaaaaaguugaugauggguuucuagacauuuggacauauaaugcagaauuguugguucuacuggaaaaugaaaggacuuuggauuuccaugacuccaaugugaagaaucuguaugagaaaguaaaaagccaauuaaagaauaaugccaaagaaauaggaaacggguguuuugaauucuaucacaaguguaacaaugaaugcauggaaagugugaaaaauggaacuuaugacuauccaaaauauuccgaagaaucaaaguuaaacagggagaaaauugauggaguaaaauuggaaucaaugggagucuaucagauucuggcgaucuacucaacugucgccaguucccugguucuuuuggucucccugggggcaaucagcuucuggauguguuccaaugggucuuugcaguguagaauaugcaucuga

SEQ ID NO: 33566 - RNA, 1698 nt, Artificial Sequence
  derived and/or modified CDS sequence (wt) from hemagglutinin__InfluenzaA__ABN51088
augaaaguaaaacuacugguucuguuauguacauuuacagcuacauaugcagacacaauauguauaggcuaccaugccaacaacucaaccgacacuguugacacaguacuugagaagaaugugacagugacacacucugucaaccuacuugaggacagucacaauggaaaacuaugucuacuaaaaggaauagccccacuacaauuggguaauugcagcguugccggauggaucuuaggaaacccagaaugcgaauuacugauuuccaaggaaucaugguccuacauuguagaaacaccaaauccugagaauggaacauguuacccaggguauuucgccgacuaugaggaacugagggagcaauugaguucaguaucuucauuugagagguucgaaauauuccccaaagagagcucauggcccaaccauaccguaaccggaguaucagcaucaugcucccauaacgggaaaagcaguuuuuacagaaauuugcuauggcugacggggaagaaugguuuguacccaaaccugagcaaguccuaugcaaacaacaaagagaaagaaguccuuguacuaugggguguucaucacccgccuaacauaggggaccaaagggcccucuaucauacagaaaaugcuuaugucucuguagugucuucacauuauagcagaagauucaccccagaaauagccaaaagacccaaggugagagaucaggaaggaagaaucaacuacuacuggacucugcuggaacccggggauacaauaauauuugaggcaaauggaaaucuaauagcgccaagauaugcuuucgcacugaguagaggcuuuggaucaggaaucaucaccucaaaugcaccaauggaugaaugugaugcgaagugucaaacaccucagggagcuauaaacagcagucuuccuuuccagaauguacacccagucacaauaggagaguguccaaaguaugucaggagugcaaaauuaaggaugguuacaggacuaaggaacaucccauccauucaauccagagguuuguuuggagccauugccgguuucauugaggggggguggacuggaaugguagaugguugguaugguuaucaucaucagaaugagcaaggaucuggguaugcugcagaucaaaaaagcacacaaaaugccauuaacgggauuacaaacaaggugaauucuguaauugagaaaaugaacacucaauucacagcugugggcaaagaauucaacaaauuggaaagaaggauggaaaacuuaaauaaaaaaguugaugauggguuucuagacauuuggacauauaaugcagaauuguugguucuacuggaaaaugaaaggacuuuggauuuccaugacuccaacgugaagaaucuguaugagaaaguaaaaagccaauuaaagaauaaugccaaagaaauaggaaacggguguuuugaauucuaucacaaguguaacgaugaaugcauggagagugugaaaaauggaacuuaugacuauccaaaauauuccgaagaaucaaaguuaaacagggagaaaauugauggagugaaauuggaaucaaugggagucuaucagauucuggcgaucuacucaacagucgccaguucccugguucuuuuggucucccugggggcaaucagcuucuggauguguuccaaugggucuuugcaguguagaauaugcaucuaa

SEQ ID NO: 33567 - RNA, 1701 nt, Artificial Sequence
  derived and/or modified CDS sequence (wt) from hemagglutinin__InfluenzaA__ABN51099
augaagaccaucauugcuuugagcuacauuuucugucuggcucucggccaagaccuuccaggaaaugacaacagcacagcaacgcugugccugggacaucaugcggugccaaacggaacacuagugaaaacaauaacaaaugaucagauugaagugacuaaugcuacugagcuaguucagagcuccucaacggggaaaauaugcaacaauccucaucgaauccuugauggaauagacugcacacugauagaugcucuauugggggacccucauugugauguuuuucaaaaugagacaugggaccuuuucguugaacgcagcaaagcuuucagcaacuguuacccuuaugaugugccagauuaugccucccuuaggucacuaguugccucgucaggcacucuggaguuuaucacugaggguuucacuuggacuggggucacucagaaugggggaagcaaugcuugcaaaaggggaccugguagcgguuuuuucaguagacugaacugguugaccaaaucaggaagcacauauccagugcugaacgugacuaugccaaacaaugacaauuuugacaaacuauacauuugggggguucaccacccgagcacgaaccaagaacaaaccagccuguauguucaagcaucagggagagucacagucucuaccaggagaagccagcaaacuauaaucccgaauaucggguccagacccuggguaaggggucugucuaguagaauaagcaucuauuggacaauaguuaagccgggagacguacugguaauuaauaguaaugggaaccuaaucgcuccucgggguuauuucaaaaugcgcacugggaaaagcucaauaaugaggucagaugcaccuauugauaccuguauuucugaaugcaucacuccaaauggaagcauucccaaugacaagcccuuucaaaacguaaacaagaucacauauggagcaugccccaaguauguuaagcaaaacacccugaaguuggcaacagggaugcggaauguaccagagaaacaaacuagaggccuauucggugcaauagcagguuucauagaaaaugguugggagggaaugauagacgguugguacgguuucaggcaucaaaauucugagggcacaggacaagcagcagaucuuaaaagcacucaagcagccaucgaccaaaucaaugggaaauugaacagaguaaucgagaagaugaacgagaaauuccaucaaaucgaaaaggaauucucagaaguagaagggagaauucaggaccucgagaaauacguugaagacacuaaaauagaucucuggucuuacaaugcggaacuucuugucgcucuggagaaucaacauacaauugaccugacugacucggaaaugaacaagcuguuugaaaaaacaaggaggcaacugagggaaaaugcugaagacaugggcaaugguugcuucaaaauauaccacaaaugugacaacgcuugcauagagucaaucagaaaugggacuuaugaccaugauguauacagagacgaagcauuaaacaaccgguuucagaucaaagguguugaacugaagucuggauacaaagacuggauccuguggauuuccuuugccauaucaugcuuuuugcuuuguguuguuuugcugggguucaucaugugggccugccagagaggcaacauuaggugcaacauuugcauuuga

SEQ ID NO: 33568 - RNA, 1701 nt, Artificial Sequence
  derived and/or modified CDS sequence (wt) from hemagglutinin__InfluenzaA__ABN51110
augaagaccaucauugcuuugagcuacauuuucugucuggcucucggccaagaccuuccaggaaaugacaacagcacagcaacgcugugccugggacaucaugcggugccaaacggaacacuagugaaaacaaucacagaugaucagauugaagugacuaaugcuacugagcuaguucagagcuccucaacggggaaaauaugcaacaauccucaucgaauccuugauggaauaaacugcacacugauagaugcucuauugggggacccucauugugauguuuuucaagaugagacaugggaccuuuucguugaacgcagcaaagcuuucagcaacuguuacccuuaugaugugccagauuaugccucccuuaggucacuaguugccucgucaggcacucuggaguuuaucacugaggguuucacuuggacuggggucacucagaaugggggaagcaaugcuugcaaaaggggaccugguagcgguuuuuucaguagacugaacugguugaccaaaucaggaagcacauauccagugcugaacgugacuaugccaaacaaugacaauuuugacaaacuauacauuugggggguucaccacccgagcacgaaccaagaacaaaccagccuguauguucaagcaucagggagagucacagucucuaccaggagaagccagcaaacuauaaucccgaauaucggguccagacccuggguaaggggucugucuaguagaauaagcaucuauuggacaauaguuaagccgggagacguacugguaauuaauaguaaugggaaccuaaucgcuccucgggguuauuucaaaaugcgcacugggaaaagcucaauaaugaggucagaugcaccuauugauaccuguauuucugaaugcaucacuccaaauggaagcauucccaaugacaagcccuuucaaaacguaaacaagaucacauauggagcaugccccaaguauguuaagcaaaacacccugaaguuggcaacagggaugcggaauguaccagagaaacaaacuagaggccuauucggcgcaauagcagguuucauagaaaaugguugggagggaaugauagacgguugguacgguuucaggcaucaaaauucugagggcacaggacaagcagcagaucuuaaaagcacucaagcagccaucgaccaaaucaaugggaaauugaacaggguaaucgagaagacgaacgagaaauuccaucaaaucgaaaaggaauucucagaaguagaagggagaauucaggaccucgagaaauacguugaagacacuaaaauagaucucuggucuuacaaugcggagcuucuugucgcucuggagaaucaacauacaauugaccugacugacucggaaaugaacaagcuguuugaaaaaacaagaaggcaacugagggaaaaugcugaagacaugggcaaugguugcuucaaaauauaccacaaaugugacaacgcuugcauagagucaaucagaaaugggacuuaugaccaugauguauacagagacgaagcauuaaacaaccgguuucagaucaaagguguugaacugaagucuggauacaaagacuggauccuguggauuuccuuugccauaucaugcuuuuugcuuuguguuguuuugcugggguucaucaugugggccugccagagaggcaacauuaggugcaacauuugcauuuga

SEQ ID NO: 33569 - RNA, 1701 nt, Artificial Sequence
  derived and/or modified CDS sequence (wt) from hemagglutinin__InfluenzaA__ABN51121
augaagaccaucauugcuuugagcuacauuuucugucuggcucucggccaagaccuuccaggaaaugacaacagcacagcaacgcugugccugggacaucaugcggugccaaacggaacacuagugaaaacaaucacagaugaucagauugaagugacuaaugcuacugagcuaguucagagcuccucaacggggaaaauaugcaacaauccucaucgaauccuugauggaauaaacugcacacugauagaugcucuauugggggacccucauugugauguuuuucaagaugagacaugggaccuuuucguugaacgcagcaaagcuuucagcaacuguuacccuuaugaugugccagauuaugccucccuuaggucacuaguugccucgucaggcacucuggaguuuaucacugaggguuucacuuggacuggggucacucagaaugggggaagcaaugcuugcaaaaggggaccugguagcgguuuuuucaguagacugaacugguugaccaaaucaggaagcacauauccagugcugaacgugacuaugccaaacaaugacaauuuugacaaacuauacauuugggggguucaccacccgagcacgaaccaagaacaaaccagccuguauguucaagcaucagggagagucacagucucuaccagaagaagccagcaaacuauaaucccgaauaucggguccagacccuggguaaggggucugucuaguagaauaagcaucuauuggacaauaguuaagccgggagacguacugguaauuaauagcaaugggaaccuaaucgcuccucgggguuauuucaaaaugcgcacugggaaaagcucaauaaugaggucagaugcaccuauugauaccuguauuucugaaugcaucacuccaaauggaagcauucccaaugacaagcccuuucaaaacguaaacaagaucacauauggaacaugccccaaguauguuaagcaaaacacccugaaguuggcaacagggaugcggaauguaccagagaaacaaacuagaggccuauucggcgcaauagcaggcuucauagaaaaugguugggagggaaugauagacgguugguacgguuucaggcaucaaaauucugagggcacaggacaagcagcagaucuuaaaagcacucaagcagccaucgaccaaaucaaugggaaauugaacaggguaaucgagaagacgaacgagaaauuccaucaaaucgaaaaggaauucucagaaguagaagggagaauucaggaccucgagaaauacguugaagacacuaaaauagaucucuggucuuacaaugcggagcuucuugucgcucuggagaaucaacauacaauugaccugacugacuuggaaaugaacaagcuguuugaaaaaacaaggaggcaacugagggaaaaugcugaagacaugggcaaugguugcuucaaaauauaccacaaaugugacaacgcuugcauagagucaaucagaaaugggacuuaugaccaugauguauacagagacgaagcauuaaacaaccgguuucagaucaaagguguugaacugaagucuggauacaaagacuggauccuguggauuuccuuugccauaucaugcuuuuugcuuuguguuguuuugcugggguucaucaugugggccugccagagaggcaacauuaggugcaacauuugcauuuga

SEQ ID NO: 33570 - RNA, 1701 nt, Artificial Sequence
  derived and/or modified CDS sequence (wt) from hemagglutinin__InfluenzaA__ABN51132
augaagaccaucauugcuuugagcuacauuuucugucuggcucucggccaagaccuuccaggaaaugacaacagcacagcaacgcugugccugggacaucaugcggugccaaacggaacacuagugaaaacaaucacagaugaucagauugaagugacuaaugcuacugagcuaguucagagcuccucaacggggaaaauaugcaacaauccucaucgaauccuugauggaauaaacugcacacugauagaugcucuauugggggacccucauugugauguuuuucaagaugagacaugggaccuuuucguugaacgcagcaaagcuuucagcaacuguuacccuuaugaugugccagauuaugccucccuuaggucacuaguugccucgucaggcacucuggaguuuaucacugaggguuucacuuggacuggggucacucagaaugggggaagcaaugcuugcaaaaggggaccugguagcgguuuuuucaguagacugaacugguugaccaaaucaggaagcacauauccagugcugaacgugacuaugccaaacaaugacaauuuugacaaacuauacauuugggggguucaccacccgagcacgaaccaagaacaaaccagccuguauguucaagcaucagggagagucacagucucuaccaggagaagccagcaaacuauaaucccgaauaucggguccagacccuggguaaggggucugucuaguagaauaagcaucuauuggacaauaguuaagccgggagacguacugguaauuaauaguaaugggaaccuaaucgcuccucgggguuauuucaaaaugcgcacugggaaaagcucaauaaugaggucagaugcaucuauugauaccuguauuucugaaugcaucacuccaaauggaagcauucccaaugacaagcccuuucaaaacguaaacaagaucacauauggagcaugccccaaguauguuaagcaaaacacccugaaguuggcaacagggaugcggaauguaccagagaaacaaacuagaggccuauucggcgcaauagcagguuucauagaaaaugguugggagggaaugauagacgguugguacgguuucaggcaucaaaauucugagggcacaggacaagcagcagaucuuaaaagcacucaagcagccaucgaccaaaucaaugggaaauugaacaggguaaucgagaagacgaacgagaaauuccaucaaaucgaaaaggaauucucagaaguagaagggagaauucaggaccucgagaaauacguugaagacacuaaaauagaucucuggucuuacaaugcggagcuucuugucgcucuggagaaucaacauacaauugaccugacugacucggaaaugaacaagcuguuugaaaaaacaaggaggcaacugagggaaaaugcugaagacaugggcaaugguugcuucaaaauauaccacaaaugugacaacgcuugcauagagucaaucagaaaugggacuuaugaccaugauguauacagagacgaagcauuaaacaaccgguuucagaucaaagguguugaacugaagucuggauacaaagacuggauccuguggauuuccuuugccauaucaugcuuuuugcuuuguguuguuuugcugggguucaucaugugggccugccagagaggcaacauuaggugcaacauuugcauuuga

SEQ ID NO: 33571 - RNA, 1698 nt, Artificial Sequence
  derived and/or modified CDS sequence (wt) from hemagglutinin__InfluenzaA__ABN51143
augaaagcaaaacuacugguccuguuauguacauuuacagccacauacgcagacacaauauguauaggcuaccaugccaacaacucaaccgacacuguugacacaguacuugagaagaaugugacagugacacacucugucaaccuacuugaggacagucacaauggaaaacuaugucuacuaaaaggaauagccccacuacaauuggguaauugcagcguugccggauggaucuuaggaaacccagaaugcgaauuacugauuuccaaggaaucaugguccuacauuguagaaacaccaaaucccgagaauggaacauguuacccaggguauuucgccgacuaugaggaacugagggagcaauugaguucaguaucuucauuugagagauucgaaauauuccccaaaggaagcucauggcccaaccacaccgugaccggaguaucagcaucaugcucccauaaugggaaaagcaguuuuuacagaaauuuacuauggcugacggggaagaaugguuuguacccaaaccugagcauguccuauguaaacaacaaagagaaagaaguccuugugcuaugggguguucaucacccaccuaacauaggggaccaaagggcccucuaccauacagaaaaugcuuaugucucuguagugucuucacauuauagcagaagauucaccccagaaauagccaaaagacccaaaguaagagaucaggaaggaagaaucaacuacuacuggacucugcuggaacccggggacacaauaauauuugaggcaaauggaaaucuaauagcgccaugguaugcuuucgcacugaguagaggcuuuggaucaggaaucaucaccucaaaugcaccaaugggugaaugugaugcgaagugucaaacaccucagggagcuauaaacaguagucuuccuuuccagaauguacacccaguuacaauaggagaguguccaaaguaugucaggagugcaaaauuaaggaugguuacaggacuaaggaacaucccauccauucaauccagagguuuguuuggagccauugccgguuucauugaagggggguggacuggaaugguagaugggugguaugguuaucaucaucagaaugagcaaggaucuggcuaugcugcagaucaaaaaagcacacaaaaugccauuaacgggauuacaaacaaggugaauucuguaauugagaaaaugaacacucaauucacagcugugggcaaagaauucaacaaauuagaaagaaggauggaaaacuuaaauaaaaaaguugaugauggguuucuagacauuuggacuuauaaugcagaauuguugguucuacuggaaaaugaaaggacuuuggauuuccaugacuccaaugugaagaaucuguaugagaaaguaaaaagccaauuaaagaauaaugccaaagaaauaggaaacggguguuuugaauucuaucacaaguguaacaaugaaugcauggaaagugugaaaaauggaacuuaugacuauccaaaauauuccgaagaaucaaaguuaaacagggagaaaauugauggaguaaaauuggaaucaaugggagucuaucagauucuggcgaucuacucaacugucgccaguucccugguucuuuuggucucccugggggcaaucagcuucuggauguguuccaaugggucuuugcaguguagaauaugcaucuga

SEQ ID NO: 33572 - RNA, 1701 nt, Artificial Sequence
  derived and/or modified CDS sequence (wt) from hemagglutinin__InfluenzaA__ABN51154
augaagacuaucauugcuuugagcuacauuuuaugucugguuuucacucaaaaacuucccggaaaugacaacagcacggcaacgcugugccuggggcaccaugcagugccaaacggaacgcuagugaaaacaaucacgaaugaccaaauugaagugacuaaugcuacugagcugguucagaguuccucaacagguagaauaugcgacaguccucaccaaauccuugauggagaaaacugcacacuaauagaugcucuauugggagacccucauugugauggcuuccaaaauaaggaaugggaccuuuuuguugaacgcagcaaagccuacagcaacuguuacccuuaugaugugccggauuaugucucccuuaggucacuaguugccucaucaggcacgcuggaguuuaacaaugaaagcuucaauuggacuggagucgcucagaauggaacaagcucugcuugcaaaaggagaucugauaaaaguuucuuuaguagauugaauugguugcaccaauuaaaauacaaauauccagcacugaacgugacuaugccaaacaaugaaaaauuugacaaauuguacauuugggggguucaccacccggguacagacagugaccaaaucagccuauaugcucaagcaucagggagagucacagucucuaccaaaagaagccaacaaacuguaaucccgaauaucggaucuggacccuggguaaggggugucuccagcagaauaagcaucuauuggacaauaguaaaaccuggagacauacuuuugauuaacagcacagggaaucuaauugcuccucgggguuacuucaaaauacgaagugggaaaagcucaauaaugaggucagaugcacccauuggcaaaugcaauucugaaugcaucacuccaaauggaagcauucccaaugacaaaccauuucaaaauguaaacaggaucacauaugggcccugucccagauauguuaagcaaaacacucugaaauuggcaacagggaugcggaaugugccagagaaacaaacuagaggcauauucggugcaaucgcgggcuucauagaaaaugguugggagggaaugauggacgguugguacgguuucaggcaucaaaauucugagggcacagggcaagcagcagaucuuaaaagcacucaagcagcaaucaaccaaaucaacgggaaacugaauagguuaaucgagaaaacgaacgagaaauuccaucaaauugaaaaagaauucucagaaguagaagggagaauucaggaccucgagaaauauguugaggacacuaaaauagaucucuggucguacaaugcggagcuucuuguugcccuggagaaccaacauacaauugaucuaacugacucagaaaugaacaaacuguuugaaagaacaaagaagcaacugagggaaaaugcugaggauaugggcaaugguuguuuuaaaauauaccacaaaugugacaaugccugcauagggucaaucagaaauggaacuuaugaccaugauguauacagagacgaagcauugaacaaccgguuccagaucaaagguguugagcugaagucaggauacaaagauuggauccuauggauuuccuuugccauaucauguuuuuugcuuuguauuguuuugcugggguucaucaugugggccugccaaaaaggcaacauuaggugcaacauuugcauuuga

SEQ ID NO: 33573 - RNA, 1701 nt, Artificial Sequence
  derived and/or modified CDS sequence (wt) from hemagglutinin__InfluenzaA__ABN59390
augaagacuaucauugcuuugagcuacauuauaugucugguuuucgcucaaaaacuucccggaaaugacaacagcacggcaacgcugugccuugggcaccaugcaguaccaaacggaacgauagugaaaacaaucacgaaugaccaaauugaaguuacuaaugcuacugaguugguucagaguuccucaacaggugaaauaugcgacaguccucaucagauccuugauggagaaaacugcacacuaauagaugcucuauugggagacccucagugugauggcuuccaaaauaagaaaugggaccuuuuuguugaacgcagcaaagccuacagcaacuguuacccuuaugaugugccggauuaugccucccuuaggucacuaguugccucauccggcacacuggaguuuaacaaugaaagcuucaauuggacuggagucacucaaaauggaacaagcucugcuugcaaaaggagaucuaauaacaguuucuuuaguagauugaauugguugacccacuuaaaauucaaauacccagcauugaacgugacuaugccaaacaaugaaaaauuugacaaauuguacauuugggggguucaccacccggguacggacaaugaccaaaucuuccuguaugcucaagcaucaggaagaaucacagucucuaccaaaagaagccaacaaacuguaaucccgaauaucggaucuagacccagaguaaggaauauccccagcagaauaagcaucuauuggacaauaguaaaaccgggugacauacuuuugauuaacagcacagggaaucuaauugcuccuagggguuacuucagaauacgaagugggaaaagcucaauaaugagaucagaugcacccauuggcaaaugcaauucugaaugcaucacuccaaauggaagcauucccaaugacaaaccauuucaaaauguaaacaggaucacauauggggccugucccagauauguuaagcaaaacacucugaaauuggcaacagggaugcgaaauguaccagagaaacaaacuagaggcauauuuggcgcaaucgcggguuucauagaaaaugguugggagggaaugguggaugguugguacgguuucaggcaucaaaauucugagggaauaggacaagcagcagaucucaaaagcacucaagcagcaaucaaucaaaucaaugggaagcugaauagguugaucgggaaaaccaacgagaaauuccaucagauugaaaaagaauucucagaaguagaggggagaauucaggaccucgagaaauauguugaggacacuaaaauagaucucuggucauacaacgcggagcuucuuguugcccuggagaaccaacauacaauugaucuaacugacucagaaaugaacaaacuguuugaaagaacaaagaagcaacugagggaaaaugcugaggauaugggcaaugguuguuucaaaauauaccacaaaugugacaaugccugcauaggaucaaucagaaauggaacuuaugaccaugauguauacagagaugaagcauuaaacaaccgguuccagaucaaaggcguugagcugaagucaggauacaaagauuggauccuauggauuuccuuugccauaucauguuuuuugcuuuguguugcuuuauugggguucaucaugugggccugccaaaaaggcaacauuaggugcaacauuugcauuuga

SEQ ID NO: 33574 - RNA, 1701 nt, Artificial Sequence
  derived and/or modified CDS sequence (wt) from hemagglutinin__InfluenzaA__ABN59401
augaaagcaaaacuacugguccuguuaugugcacuuucagcuacagaugcagacacaauauguauaggcuaccaugcgaacaacucaaccgacacuguugacacaguacucgaaaagaacgugacagugacacacucugucaaccuacucgaggacagccacaacgggaaacuaugcagacuaaaaggaauagccccacuacaauuggggaaaugcaacauugccggauggaucuuaggaaacccagaaugcgaaucacuguuuucuaagaaaucaugguccuacauugcagaaacaccaaacucugagaauggaacauguuacccaggauauuucgccgacuaugaggaacugagggagcaauugagcucaguaucaucauucgagagauucgaaauauuccccaaggaaaggucauggcccaaacacaacauaaccagaggaguaacggcagcaugcucccauaaggggaaaagcaguuuuuacagaaauuugcuauggcugacggagaaaaauggcucguacccaaaucugaacaaguccuaugugaacaauaaagagaaagaaguccuuguacuaugggguguucaucacccgucuaacauagaggaccaaaagacccucuaucggaaagaaaaugcuuaugucucuguagugucuucaaauuauaacaggagauucaccccagaaauagcagaaagacccaaaguaagaggucaagcagggagaauuaacuacuacuggacucugcuggaacccggggacacaauaauauuugaggcaaauggaaaucuaauagcgccauggcaugcuuucgcacugaguagaggcuuugggucaggaaucaucaccucaaacgcaucgauggaugaaugugacacgaagugucaaacaccccagggagcuauaaacaguagucucccuuuccagaauauacacccagucacaauaggagagugcccaaaauacgucaggaguacaaaauugaggaugguuacaggacuaaggaacaucccauccauucaauccagaggucuguuuggggccauugccgguuucauugaagggggauggacuggaaugauagauggaugguaugguuaucaucaucagaaugaacagggaucuggcuaugcugcggaucaaaaaagcacacaaaaugccauuaacgggauuacaaacaaggugaacucuguuaucgagaaaaugaacacucaauucacagcuguggguaaagaauucaacaaauuagaaaaaaggauggaaaacuuaaauaaaaaaguugaugauggauuucuggacauuuggacauauaaugcagaauuguugguucuacuggaaaaugaaaggacuuuggauuuucaugacucaaaugugaagaaucuguaugagaaaguaaaaagccaauuaaagaauaaugccaaagaaauaggaaacggauguuuugaauucuaccacaaguguaacaaugaaugcauggaaaguguaaaaaauggaacuuaugauuauccaaaauauucagaggaaucaaaguuaaacagggaaaaaauugauggagugaaauuggaaucaaugggagucuaucagauucuggcgaucuacucaacugucgccaguucacuggugcuucuggucucccugggggcaaucagcuucuggauguguucuaaugggucuuugcagugcagaauaugcaucuga

SEQ ID NO: 33575 - RNA, 1698 nt, Artificial Sequence
  derived and/or modified CDS sequence (wt) from hemagglutinin__InfluenzaA__ABN59412
augaaggcaaaccuacugguccuguuaugugcacuugcagcugcagaugcagacacaauauguauaggcuaccaugcgaacaauucaaccgacacuguugacacaguacucgagaagaaugugacagugacacacucuguuaaccugcucgaagacagccacaacggaaaacuauguagauuaaaaggaauagccccacuacaauuggggaaauguaacaucgccggauggcucuugggaaacccagaaugcgacccacugcuuccagugagaucaugguccuacauuguagaaacaccaaacucugagaauggaauauguuauccaggagauuucaucgacuaugaggagcugagggagcaauugagcucagugucaucauucgaaagauucgaaauauuucccaaagaaagcucauggcccaaccacaacacaaacggaguaacggcagcaugcucccaugaggggaaaagcaguuuuuacagaaauuugcuauggcugacggagaaggagggcucauacccaaagcugaaaaauucuuaugugaacaaaaaagggaaagaaguccuuguacugugggguauucaucacccgccuaacaguaaggaacaacagaaucucuaucagaaugaaaaugcuuaugucucuguagugacuucaaauuauaacaggagauuuaccccggaaauagcagaaagacccaaaguaagagaucaagcugggaggaugaacuauuacuggaccuugcuaaaacccggagacacaauaauauuugaggcaaauggaaaucuaauagcaccaauguaugcuuucgcacugaguagaggcuuuggguccggcaucaucaccucaaacgcaucaaugcaugaguguaacacgaagugucaaacaccccugggagcuauaaacagcagucucccuuaccagaauauacacccagucacaauaggagagugcccaaaauacgucaggagugccaaauugaggaugguuacaggacuaaggaacauuccguccauucaauccagaggucuauuuggagccauugccgguuuuauugaagggggauggacuggaaugauagauggaugguaugguuaucaucaucagaaugaacagggaucaggcuaugcagcggaucaaaaaagcacacaaaaugccauuaacgggauuacaaacaaggugaacacuguuaucgagaaaaugaacauucaauucacagcuguggguaaagaauucaacaaauuagaaaaaaggauggaaaauuuaaauaaaaaaguugaugauggauuucuggacauuuggacauauaaugcagaauuguuaguucuacuggaaaaugaaaggacucuggaauuccaugacucaaaugugaagaaucuguaugagaaaguaaaaagccaauuaaagaauaaugccaaagaaaucggaaauggauguuuugaguucuaccacaagugugacaaugaaugcauggaaaguguaagaaaugggacuuaugauuaucccaaauauucagaagagucaaaguugaacagggaaaagguagauggagugaaauuggaaucaauggggaucuaucagauucuggcgaucuacucaacugucgccaguucacuggugcuuuuggucucccugggggcaaucaguuucuggauguguucuaauggaucuuugcagugcagaauaugcaucuga

SEQ ID NO: 33576 - RNA, 1701 nt, Artificial Sequence
  derived and/or modified CDS sequence (wt) from hemagglutinin__InfluenzaA__ABN59423
augaaagcaaaacuacugguccuguuaugugcacuuucagcuacagaugcagacacaauauguauaggcuaccaugcgaacaacucaaccgacacuguugacacagugcucgaaaagaacgugacagugacacacucugucaaccuacuugaggacagucacaacggaaaacuaugcagacuaaaaggaauagccccacuacaauuggggaaaugcagcauugccggauggaucuuaggaaacccagaaugcgaaucacuguuuucuaagaaaucaugguccuacauugcagaaacaccaaacuccgagaauggaacauguuacccaggauauuucgccgacuaugaggaacugagggagcaauugaguucaguaucaucauucgagagauucgaaauauuccccaaggaaagaucauggcccaaacacaacguaaccagaggaguaacggcaucaugcucccauaaggggaaaagcaguuuuuacagaaauuugcuauggcugacggagaaaaauggcucguacccaaaucugagcaaguccuaugugaacaacaaagagaaagaaguccuuguacuaugggguguucaucacccgucuaacauagagaaccaaaagaccaucuaucggaaagaaaaugcuuaugucucuguagugucuucaaauuauaacaggagauucaccccagaaauagcagaaagacccaaaguaagagaucaagaagggagaauuaacuacuacuggacucugcuggaacccggggacacaauaauauuugaggcaaauggaaaucuaauagcgccaugguaugcuuucgcacugaguagaggcuuugggucaggaaucaucaccucaaacgcaucgauggaugaaugugacacgaagugucaaacaccccagggagcuauaaacaguagucuuccuuuccagaauguacacccagucacaauaggagagugcccaaaauacgucaggaguacaaaauuaaggaugguuacaggacuaaggaacaucccauccauucaauccagaggucuguuuggagccauugccgguuucauugaagggggauggacuggaaugauagauggaugguaugguuaucaucaucagaaugaacagggaucuggcuaugcugcggaucaaaaaagcacacaaaaugccauuaacgggauuacaaacaaggugaacucuguuaucgagaaaaugaacacucaauucacagcuguggguaaagaauucaacaaauuagaaaaaaggauggaaaacuuaaauaaaaaaguugaugauggauuucuggacauuuggacauauaaugcagaauuguugguucuacuggaaaaugaaaggacuuuggauuuucaugacucaaaugugaagaaucuguaugagaaaguaaaaagccaauuaaagaauaaugccaaagaaauaggaaacggguguuuugaauucuaccacaaguguaacaaugaaugcauggaaaguguaaaaaauggaacuuaugacuauccaaaauauucagaggaaucaaaguuaaacagggaaaaaauugauggagugaaauuggaaucaaugggagucuaucagauucuggcgaucuacucaacugucgccaguucacuagugcuuuuggucucccugggggcaaucagcuucuggauguguucuaaugggucuuugcagugcagaauaugcaucuga

SEQ ID NO: 33577 - RNA, 1701 nt, Artificial Sequence
  derived and/or modified CDS sequence (wt) from hemagglutinin__InfluenzaA__ABO32656
augaagacuaucauugcuuugagcuacauuuuaugucugguuuucgcucaaaaacuucccguaaaugacaacagcacggcaacgcugugccugggacaccaugcagugccaaacggaacgcuagugaaaacaaucacgaaugaccacauugaagugacuaaugcuacugagcugguucagaguuccccaacagguagaauaugcgacaguccucaccaaauccuugauggagaaaacugcacacuaauagaugcucuauugggagacccucauugugauggcuuccaaaauaaggaaugggaccuuuuuguugaacgcagcacagccuacagcaacuguuacccuuaugaugugccggauuaugccucccuuaggucacuaguugccucauccggcacacuggaguuuaacaaugaaagcuucaauuggacuggagucgcucagaauggaacaagcucugcuugcaaaaggagaucuauuaaaaguuucuuuaguagauugaauugguugcaccaauuaaaauacaaauauccagcacugaacgugacuaugccaaacaaugaaaaauuugacaaauuguacauuugggggguucaucacccgaguacggacagugaccaaaucagccuauaugcucaagcaucagggagagucacagucucuaccaaaagaagccaacaaacuguaaucccgaauaucggaucuagacccuggguaaggggugucuccagcagaauaagcaucuauuggacaauaguaaaaccgggagacauacuuuugauuaacagcacagggaaucuaauugcuccucgggguuacuucaaaauacgaagugggaaaagcucaauaaugaggucaaaugcacccauuggcaaaugcaauucugaaugcaucacuccaaauggaagcauucccaaugacaaaccauuucaaaauguaaacaggaucacauauggggccugucccagauauguuaagcaaaacacucugaaauuggcaacagggaugcggaauguaccagagaaacaaacuagaggcauauucggcgcaauugcggguuucauagaaaaugguugggaaggaaugguggacgguugguacgguuucaggcaucaaaauucugagggcacaggacaagcagcagaucuuaaaagcacucaagcugcaaucaaccaaaucaacgggaaacugaauagguuaaucgagaaaacaaacgagaaauuccaucaaauugaaaaagaauucucagaaguagaagggagaauucaggaccucgagaaauauguugaggacacuaaaauagaucucuggucguacaacgcggagcuucuuguugcccuggagaaccaacauacaauugaucuaacugacucagaaaugaacaaacuguuugaaagaacaaggaagcaacugagggaaaaugcugaggauaugggcaaugguuguuucaaaauauaccacaaaugugacaaugccugcauagggucaaucagaaauggaacuuaugaccaugauguauacagagacgaagcauuaaacaaccgguuccagaucaaagguguugagcugaagucaggauacaaagauuggauccuauggauuuccuuugccauaucauguuuuuugcuuuguguuguuuugcugggguucaucaugugggccugccaaaaaggcaacauuaggugcaacauuugcauuuga

SEQ ID NO: 33578 - RNA, 1701 nt, Artificial Sequence
  derived and/or modified CDS sequence (wt) from hemagglutinin__InfluenzaA__ABO32667
augaagacuaucauugcuuugagcuacauuuuaugucugguuuucgcucaaaaacuucccggaaaugacaacagcacggcaacgcugugccuggggcaccaugcaguaccaaacggaacgcuagugaaaacaaucacgaaugaccaaauugaagugacuaaugcuacugagcugguucagaguuccucaacagguggaauaugcgacaguccccaccaaauccuugauggagaaaacugcacacuaauagaugcucuauugggagacccucauugugauggcuuccaaaauaaggaaugggaccuuuuuguugaacgcagcaaagccuacagcaacuguuacccuuaugaugugccggauuaugccucccuuaggucacuaguugccucauccggcacacuggaguuuaacaaugaaagcuucaauuggacuggagucgcucagaauggaacaagcucugcuugcaaaaggagaucuaauaaaaguuucuuuaguagauugaauugguugcaccaauuaaaauacaaauacccagcacugaacgugacuaugccaaacaaugaaaaauuugacaaauuguacauuugggggguucaccacccgaguacggacagugaccaaaucagccuauaugcucaagcaucagggagagucacagucucuaccaaaagaagccaacaaacuguaaucccgaauaucggaucuagacccuggguaagggaugucuccagcagaauaagcaucuauuggacaauaguaaaaccgggagacauacuuuugauuaacagcacagggaaucuaauugcuccucgggguuacuucaaaauacgaagugggaaaagcucaauaaugagaucagaugcacccauuggcaaaugcaauucugaaugcaucacuccaaauggaagcauucccaaugacaaaccauuucaaaauguaaacaggaucacauauggggccugucccagauauguuaagcaaaacacucugaaauuggcaacagggaugcggaauguaccagagaaacaaacuagaggcauauucggcgcaaucgcggguuucauagaaaaugguugggagggaaugguggacgguugguacgguuucaggcaucaaaauucugagggcacaggacaagcagcagaucuuaaaagcacucaagcagcaaucaaccaaaucaacgggaaacugaauagguuaaucgggaaaacgaacgagaaauuccaucagauugaaaaagaauucucagaaguagaagggagaauucaggaccucgagaaauauguugaggacacuaaaauagaucucuggucguacaacgcggagcuucuuguugcccuggagaaccaacauacaauugaucuaacugacucagaaaugaacaaacuguuugaaagaacaaagaagcaacugagggaaaaugcugaggauaugggcaaugguuguuucaaaauauaccacaaaugugacaaugccugcauagggucaaucagaaauggaacuuaugaccaugauguauacagagacgaagcauuaaacaaccgguuccagaucaaagguguugagcugaagucaggauacaaagauuggauccuauggauuuccuuugccauaucauguuuuuugcuuuguguuguuuugcugggguucaucaugugggccugccaaaaaggcaacauuaggugcaacauuugcauuuga

SEQ ID NO: 33579 - RNA, 1698 nt, Artificial Sequence
  derived and/or modified CDS sequence (wt) from hemagglutinin__InfluenzaA__ABO32678
augaaaguaaaacuacugguucuguuauguacauuuacagcuacauaugcagacacaauauguauaggcuaccaugccaacaacucaaccgacacuguugacacaguacuugagaagaaugugacagugacacacucugucaaccuacuugaggacagucacaauggaaaacuaugucuacuaaaaggaauagccccauuacaauuggguaauugcagcguugccggauggaucuuaggaaacccagaaugcgaauuacugauuuccaaggaaucaugguccuacauuguagaaacaccaaauccugagaauggaacauguuacccaggguauuucgccgacuaugaggaacugagggagcaauugaguucaguaucuucauuugagagguucgaaauauuccccaaagagagcucauggcccaaccacaccguaaccggaguaucagcaucaugcucccauaacgggaaaagcaguuuuuacagaaauuugcuauggcugacggggaagaaugguuuguacccaaaccugagcaagucuuaugcaaacaacaaagaaaaagaaguccuuguacuaugggguguucaucacccgccuaacauaggggaccaaagggcucucuaucauacagaaaaugcuuaugucucuguagugucuucacauuauagcagaagauucaccccagaaauagccaaaagacccaaggugagagaucaggaaggaagaaucaacuacuacuggacacugcuggaacccggggauacaauaauauuugaggcaaauggaaaucuaauagcgccaagguuugcuuucgcacugaguagaggcuuuggaucaggaaucaucaccucaaaugcaccaauggaugaaugugaugcaaagugucaaacaccucaaggagcuauaaacagcagucuuccuuuccagaauguacacccagucacaauaggggaguguccaaaguaugucaggagugcaaaauuaaggauggcuacaggacuaaggaacaucccauccauucaauccagagguuuguuuggagccauugccgguuucauugaagggggguggacuggaaugguagaugguugguaugguuaucaucaucagaaugagcaaggaucuggguaugcugcagaucaaaaaagcacacaaaaugccauuaacgggauuacaaacaaggugaauucuguaauugaaaaaaugaacacucaauucacagcugugggcaaagaauucagcaaauuggagagaaggauggaaaacuuacauaaaaaaguugaugauggguuucuagacauuuggacauauaaugcagaauuguugguucuacuggaaaaugaaaggacuuuggauuuccacgacuccaacgugaagaaucuguaugagaaagugaaaagccaauuaaagaauaaugccaaagaaauaggaaacggguguuuugaauucuaucacaaauguaacgaugaaugcauggagagugugaaaaauggaacuuaugacuauccaaaauauuccgaagaaucaaaguuaaacagggagaaaauugauggagugaaauuggaaucaaugggagucuaucagauucuggcgaucuacucaacagucgccaguucccugguucuuuuggucucccugggggcaaucagcuucuggauguguuccaaugggucuuugcaguguagaauaugcaucuaa

SEQ ID NO: 33580 - RNA, 1701 nt, Artificial Sequence
  derived and/or modified CDS sequence (wt) from hemagglutinin__InfluenzaA__ABO32692
augaagacuaucauugcuuugagcuacauucuaugucugguuuucgcucaaaaacuucccggaaaugacaacagcacggcaacgcugugccuugggcaccaugcaguaccaaacggaacgauagugaaaacaaucacgaaugaccaaauugaaguuacuaaugcuacugagcugguucagaguuccucaacagguggaauaugcgacaguccucaucagauccuugauggagaaaacugcacacuaauagaugcucuauugggagacccucagugugauggcuuccaaaauaagaaaugggaccuuuuuguugaacgcagcaaagccuacagcaacuguuacccuuaugaugugccggauuaugccucccuuaggucacuaguugccucauccggcacacuggaguuuaacaaugaaagcuucaauuggacuggagucacucaaaauggaacaagcucugcuugcaaaaggagaucuaauaacaguuucuuuaguagauugaauugguugacccacuuaaaauucaaauacccagcauugaacgugacuaugccaaacaaugaaaaauuugacaaauuguacauuugggggguucaccacccggguacggacaaugaccaaaucuuccuguaugcucaagcaucaggaagaaucacagucucuaccaaaagaagccaacaaacuguaaucccgaauaucggaucuagacccagaguaaggaauauccccagcagaauaagcaucuauuggacaauaguaaaaccgggagacauacuuuugauuaacagcacagggaaucuaauugcuccuagggguuacuucaaaauacgaagugggaaaagcucaauaaugagaucagaugcacccauuggcaaaugcaauucugaaugcaucacuccaaauggaagcauucccaaugacaaaccauuucaaaauguaaacaggaucacauauggggccugucccagauauguuaagcaaaacacucugaaauuggcaacagggaugcgaaauguaccagagaaacaaacuagaggcauauuuggcgcaaucgcggguuucauagaaaaugguugggagggaaugguggaugguugguacgguuucaggcaucaaaauucugagggaauaggacaagcagcagaucucaaaagcacucaagcagcaaucaaucaaaucaaugggaagcugaauagguugaucgggaaaaccaacgagaaauuccaucagauugaaaaagaauucucagaaguagaagggagaauucaggaccucgagaaauauguugaggacacuaaaauagaucucuggucauacaacgcggagcuucuuguugcccuggagaaccaacauacaauugaucuaacugacucagaaaugaacaaacuguuugaaagaacaaagaagcaacugagggaaaaugcugaggauaugggcaaugguuguuucaaaauauaccacaaaugugacaaugccugcauaggaucaaucagaaauggaacuuaugaccaugauguauacagagaugaagcauuaaacaaccgguuccagaucaaaggcguugagcugaagucaggauacaaagauuggauccuauggauuuccuuugccauaucauguuuuuugcuuuguguuguuuuguugggguucaucaugugggccugccaaaaaggcaacauuaggugcaacauuugcauuuga

SEQ ID NO: 33581 - RNA, 1701 nt, Artificial Sequence; identical to SEQ ID NO: 33445
  derived and/or modified CDS sequence (wt) from hemagglutinin__InfluenzaA__ABO32751

SEQ ID NO: 33582 - RNA, 1701 nt, Artificial Sequence; identical to SEQ ID NO: 33445
  derived and/or modified CDS sequence (wt) from hemagglutinin__InfluenzaA__ABO32762

SEQ ID NO: 33583 - RNA, 1701 nt, Artificial Sequence; identical to SEQ ID NO: 33467
  derived and/or modified CDS sequence (wt) from hemagglutinin__InfluenzaA__ABO32775

SEQ ID NO: 33584 - RNA, 1701 nt, Artificial Sequence; identical to SEQ ID NO: 32330
  derived and/or modified CDS sequence (wt) from hemagglutinin__InfluenzaA__ABO32790

SEQ ID NO: 33585 - RNA, 1701 nt, Artificial Sequence
  derived and/or modified CDS sequence (wt) from hemagglutinin__InfluenzaA__ABO32803
augaagacuaucauugcuuugagcuacauucuaugucugguuuucgcucaaaaacuucccggaaaugacaacagcacggcaacgcugugccuugggcaccaugcaguaccaaacggaacgauagugaaaacaaucacgaaugaccaaauugaaguuacuaaugcuacugagcugguucagaguuccucaacagguggaauaugcgacaguccucaucagauccuugauggagaaaacugcacacuaauagaugcucuauugggagacccucagugugauggcuuccaaaauaagaaaugggaccuuuuuguugaacgcagcaaagccuacagcaacuguuacccuuaugaugugccggauuaugucucccuuaggucacuaguugccucauccggcacacuggaguuuaacaaugaaagcuucaauuggacuggagucacucaaaauggaacaagcucugcuugcaaaaggagaucuaauaacaguuucuuuaguagauugaauugguugacccauuuaaaauucaaauacccagcauugaacgugacuaugccaaacaaugaaaaauuugacaaauuguacauuugggggguucaccacccggguacggacaaugaccaaaucagccuauaugcucaagcaucaggaagaaucacagucucuaccaaaagaagccaacaaacuguaaucccgaauaucggaucuagacccaggguaagggauauccccagcagaauaagcaucuauuggacaauaguaaaaccgggagacacacuuuugauuaacagcacagggaaucuaauugcuccucgggguuacuucaaaauacgaagugggaaaagcucaauaaugagaucagaugcacccauugacaaaugcaauucugaaugcaucacuccaaauggaagcauucccaaugacaaaccauuucaaaauguaaacaggaucacauauggggccugucccagauauguuaagcaaaacacucugaaauuggcaacagggaugcgaaauguaccagagaaacaaacuagaggcauauuuggcgcaaucgcggguuucauagaaaaugguugggagggaaugguggaugguugguacgguuucaggcaucaaaauucugagggaauaggacaagcagcagaucucaaaagcacucaagcagcaaucaaccaaaucaaugggaagcugaauagguugaucgggaaaaccaacgagaaauuccaucagauugaaaaagaauucucagaaguagaaggaagaauucaggaccucgagaaauauguugaggacacuaaaauagaucucuggucauacaacgcggagcuucuuguugcccuggagaaccaacauacaauugaucuaacugacucagaaaugaacaaacuguuugaaagaacaaagaagcaacugagggaaaaugcugaggauaugggcaaugguuguuucaaaauauaccacaaaugugacaaugccugcauagggucaaucagaaauggaacuuaugaccaugauguauacagagaugaagcauuaaacaaccgguuccagaucaaagguguugagcugaagucaggauacaaagauuggauccuauggauuuccuuugccauaucauguuuuuugcuuuguguugcuuuguugggauucaucaugugggccugccaaaaaggcaacauuaggugcaacauuugcauuuga

SEQ ID NO: 33586 - RNA, 1701 nt, Artificial Sequence; identical to SEQ ID NO: 32669
  derived and/or modified CDS sequence (wt) from hemagglutinin__InfluenzaA__ABO32816

SEQ ID NO: 33587 - RNA, 1701 nt, Artificial Sequence; identical to SEQ ID NO: 32291
  derived and/or modified CDS sequence (wt) from hemagglutinin__InfluenzaA__ABO32827

SEQ ID NO: 33588 - RNA, 1701 nt, Artificial Sequence
  derived and/or modified CDS sequence (wt) from hemagglutinin__InfluenzaA__ABO32838
augaagacuaucauugcuuugagcuacauucuaugucugguuuucgcucaaaaacuucccggaaaugacaacagcacggcaacgcugugccuugggcaccaugcaguaccaaacggaacgauagugaaaacaaucacgaaugaccaaauugaaguuacuaaugcuacugagcugguucagaguuccucaacagguggaauaugcgacaguccucaucagauccuugauggagaaaacugcacacuaauagaugcucuauugggagacccucagugugauggcuuccaaaauaagagaugggaccuuuuuguugaacgcagcaaagccuacagcaacuguuacccuuaugaugugccggauuaugccucccuuaggucacuaguugccucauccggcacacuggaguuuaacaaugaaagcuucaauuggacuggagucacucaaaauggaacaagcucugcuugcaaaaggagaucuaauaacaguuucuuuaguagauugaauugguugacccacuuaaaauucaaauacccagcauugaacgugacuaugccaaacaaugaaaaauuugacaaauuguacauuugggggguucaccacccggguacggacaaugaccaaaucuuccuguaugcucaagcaucaggaagaaucacagucucuaccaaaagaagccaacaaacuguaaucccgaauaucggaucuagacccagaguaaggaauauccccagcagaauaagcaucuauuggacaauaguaaaaccaggagacauacuuuugauuaacagcacagggaaucuaauugcuccuagggguuacuucaaaauacgaagugggaaaagcucaauaaugagaucagaugcacccauuggcaaaugcaauucugaaugcaucacuccaaauggaagcauucccaaugacaaaccauuucaaaauguaaacaggaucacauauggggccugucccagauauguuaagcaaaacacucugaaauuggcaacagggaugcgaaauguaccagagaaacaaacuagaggcauauuuggcgcaaucgcggguuucauagaaaaugguugggagggaaugguggaugguugguacgguuucaggcaucaaaauucugagggaauaggacaagcagcagaucucaaaagcacucaagcagcaaucaaucaaaucaaugggaagcugaauagguugaucgggaaaaccaacgagaaauuccaucagauugaaaaagaauucucagaaguagaagggagaauucaggaccucgagaaauauguugaggacacuaaaauagaucucuggucauacaacgcggagcuucuuguugcccuggagaaccaacauacaauugaucuaacugacucagaaaugaacaaacuguuugaaagaacaaagaagcaacugagggaaaaugcugaggauaugggcaaugguuguuucaaaauauaccacaaaugugacaaugccugcauaggaucaaucagaaauggaacuuaugaccaugauguauacagagaugaagcauuaaacaaccgguuccagaucaaaggcguugagcugaagucaggauacaaagauuggauccuauggauuuccuuugccauaucauguuuuuugcuuuguguugcuuuguugggguucaucaugugggccugccaaaaaggcaacauuaggugcaacauuugcauuuga

SEQ ID NO: 33589 - RNA, 1701 nt, Artificial Sequence; identical to SEQ ID NO: 33588
  derived and/or modified CDS sequence (wt) from hemagglutinin__InfluenzaA__ABO32849

SEQ ID NO: 33590 - RNA, 1701 nt, Artificial Sequence
  derived and/or modified CDS sequence (wt) from hemagglutinin__InfluenzaA__ABO32860
augaagacuaucauugcuuugagcuacauucuaugucugguuuucgcucaaaaacuucccggaaaugacaacagcacggcaacgcugugccuugggcaccaugcaguaccaaacggaacgauagugaaaacaaucacgaaugaccaaauugaaguuacuaaugcuacugagcugguucagaguuccucaacagguggaauaugcgacaguccucaucagauccuugauggagaaaacugcacacuaauagaugcucuauugggagacccucagugugauggcuuccaaaauaagagaugggaccuuuuuguugaacgcagcaaagccuacagcaacuguuacccuuaugaugugccggauuaugccucccuuaggucacuaguugccucauccggcacacuggaguuuaacaaugaaagcuucaauuggacuggagucacucaaaauggaacaagcucugcuugcaaaaggagaucuaauaacaguuucuuuaguagauugaauugguugacccacuuaaaauucaaauacccagcauugaacgugacuaugccaaacaaugaaaaauuugacaaauuguacauuugggggguucaccacccggguacggacaaugaccaaaucuuccuguaugcucaagcaucaggaagaaucacagucucuaccaaaagaagccaacaaacuguaaucccgaauaucggaucuagacccagaguaagggauauccccagcagaauaagcaucuauuggacaauaguaaaaccaggagacauacuuuugauuaacagcacagggaaucuaauugcuccuagggguuacuucaaaauacgaagugggaaaagcucaauaaugagaucagaugcacccauuggcaaaugcaauucugaaugcaucacuccaaauggaagcauucccaaugacaaaccauuucaaaauguaaacaggaucacauauggggccugucccagauauguuaagcaaaacacucugaaauuggcaacagggaugcgaaauguaccagagaaacaaacuagaggcauauuuggcgcaaucgcggguuucauagaaaaugguugggagggaaugguggaugguugguacgguuucaggcaucaaaauucugagggaauaggacaagcagcagaucucaaaagcacucaagcagcaaucaaucaaaucaaugggaagcugaauagguugaucgggaaaaccaacgagaaauuccaucagauugaaaaagaauucucagaaguagaagggagaauucaggaccucgagaaauauguugaggacacuaaaauagaucucuggucauacaacgcggagcuucuuguugcccuggagaaccaacauacaauugaucuaacugacucagaaaugaacaaacuguuugaaagaacaaagaagcaacugagggaaaaugcugaggauaugggcaaugguuguuucaaaauauaccacaaaugugacaaugccugcauaggaucaaucagaaauggaacuuaugaccaugauguauacagagaugaagcauuaaacaaccgguuccagaucaaaggcguugagcugaagucaggauacaaagauuggauccuauggauuuccuuugccauaucauguuuuuugcuuuguguugcuuuguugggguucaucaugugggccugccaaaaaggcaacauuaggugcaacauuugcauuuga

SEQ ID NO: 33591 - RNA, 1701 nt, Artificial Sequence; identical to SEQ ID NO: 33573
  derived and/or modified CDS sequence (wt) from hemagglutinin__InfluenzaA__ABO32871

SEQ ID NO: 33592 - RNA, 1701 nt, Artificial Sequence
  derived and/or modified CDS sequence (wt) from hemagglutinin__InfluenzaA__ABO32882
augaagacuaucauugcuuugagcuacauuauaugucugguuuucgcucaaaaacuucccggaaaugacaacagcacggcaacgcugugccuugggcaccaugcaguaccaaacggaacgauagugaaaacaaucacgaaugaccaaauugaaguuacuaaugcuacugaguugguucagaguuccucaacaggugaaauaugcgacaguccucaucagauccuugauggagaaaacugcacacuaauagaugcucuauugggagacccucagugugauggcuuccaaaauaagaaaugggaccuuuuuguugaacgcagcaaagccuacagcaacuguuacccuuaugaugugccggauuaugccucccuuaggucacuaguugccucauccggcacacuggaguuuaacaaugaaagcuucaauuggacuggagucacucaaaauggaacaagcucugcuugcaaaaggagaucuaauaacaguuucuuuaguagauugaauugguugacccacuuaaaauucaaauacccagcauugaacgugacuaugccaaacaaugaaaaauuugacaaauuguacauuugggggguucaccacccggguacggacaaugaccaaaucuucccguaugcucaagcaucaggaagaaucacagucucuaccaaaagaagccaacaaacuguaaucccgaauaucggaucuagacccagaguaaggaauauccccagcagaauaagcaucuauuggacaauaguaaaaccgggugacauacuuuugauuaacagcacagggaaucuaauugcuccuagggguuacuucagaauacgaagugggaaaagcucaauaaugagaucagaugcacccauuggcaaaugcaauucugaaugcaucacuccaaauggaagcauucccaaugacaaaccauuucaaaauguaaacaggaucacauauggggccugucccagauauguuaagcaaaacacucugaaauuggcaacagggaugcgaaauguaccagagaaacaaacuagaggcauauuuggcgcaaucgcggguuucauagaaaaugguugggagggaaugguggaugguugguacgguuucaggcaucaaaauucugagggaauaggacaagcagcagaucucaaaagcacucaagcagcaaucaaucaaaucaaugggaagcugaauagguugaucgggaaaaccaacgagaaauuccaucagauugaaaaagaauucucagaaguagaggggagaauucaggaccucgagaaauauguugaggacacuaaaauagaucucuggucauacaacgcggagcuucuuguugcccuggagaaccaacauacaauugaucuaacugacucagaaaugaacaaacuguuugaaagaacaaagaagcaacugagggaaaaugcugaggauaugggcaaugguuguuucaaaauauaccacaaaugugacaaugccugcauaggaucaaucagaaauggaacuuaugaccaugauguauacagagaugaagcauuaaacaaccgguuccagaucaaaggcguugagcugaagucaggauacaaagauuggauccuauggauuuccuuugccauaucauguuuuuugcuuuguguugcuuuauugggguucaucaugugggccugccaaaaaggcaacauuaggugcaacauuugcauuuga

SEQ ID NO: 33593 - RNA, 1701 nt, Artificial Sequence
  derived and/or modified CDS sequence (wt) from hemagglutinin__InfluenzaA__ABO32893
augaagacuaucauugcuuugagcuacauucuaugucugguuuucgcucaaaaacuucccggaaaugacaacagcacggcaacgcugugccuugggcaccaugcaguaccaaacggaacgauagugaaaacaaucacgaaugaccaaauugaaguuacuaaugcuacugagcugguucagaguuccucaacaggugaaauaugcgacaguccucaucagauccuugauggagaaaacugcacacuaauagaugcucuauugggagacccucagugugauggcuuccaaaauaagaaaugggaccuuuuuguugaacgcagcaaagccuacagcaacuguuacccuuaugaugugccggauuaugccucccuuaggucacuaguugccucauccggcacacuggaguuuaacaaugaaagcuucaauuggacuggagucacucaaaauggaacaagcucugcuugcaaaaggagaucuaauaacaguuucuuuaguagacugaauugguugacccacuuaaaauucaaauacccagcauugaacgugacuaugccaaacaaugaaaaauuugacaaauuguacauuugggggguucaccacccggguacggacaaugaccaaaucuucuuguaugcucaagcaucaggaagaaucacagucucuaccaaaagaagccaacaaacuguaaucccgaauaucggauccagaccuagaguaaggaauauccccagcagaauaagcaucuauuggacaauaguaaaaccgggagacauacuuuugauuaacagcacagggaaucuaauugcuccuagggguuacuucaaaauacgaagugggaaaagcucaauaaugagaucagaugcacccauuggcaaaugcaauucugaaugcaucacuccaaauggaagcauucccaaugacaaaccauuucaaaauguaaacagaaucacauauggggccugucccagauauguuaagcaaaacacucugaaauuggcaacagggaugagaaauguaccagagaaacaaacuagaggcauauuuggcgcaaucgcggguuucauagaaaaugguugggagggaaugguggaugguugguacgguuucaggcaucaaaauucugagggaauaggacaagcagcagaucucaaaagcacucaagcagcaaucaaucaaaucaaugggaagcugaauagguugaucgggaaaaccaacgagaaauuccaucagauugaaaaagaauucucagaaguagaagggagaauucaggaccucgagaaauauguugaggacacuaaaauagaucucuggucauacaacgcggagcuucuuguugcccuggagaaccaacauacaauugaucuaacugacucagaaaugaacaaacuguuugaaagaacaaagaagcaacugagggaaaaugcugaggauaugggcaaugguuguuucaaaauauaccacaaaugugacaaugccugcauaggaucaaucagaaauggaacuuaugaccaugauguauacagagaugaagcauuaaacaaccgguuccagaucaaaggcguugagcugaagucaggauacaaagauuggauccuauggauuuccuuugccauaucauguuuuuugcuuuguguuguuuuguugggguucaucaugugggccugccaaaaaggcaacauuaggugcaacauuugcauuuga

SEQ ID NO: 33594 - RNA, 1701 nt, Artificial Sequence; identical to SEQ ID NO: 33593
  derived and/or modified CDS sequence (wt) from hemagglutinin__InfluenzaA__ABO32904

SEQ ID NO: 33595 - RNA, 1701 nt, Artificial Sequence; identical to SEQ ID NO: 33563
  derived and/or modified CDS sequence (wt) from hemagglutinin__InfluenzaA__ABO32915

SEQ ID NO: 33596 - RNA, 1701 nt, Artificial Sequence; identical to SEQ ID NO: 33563
  derived and/or modified CDS sequence (wt) from hemagglutinin__InfluenzaA__ABO32926

SEQ ID NO: 33597 - RNA, 1701 nt, Artificial Sequence
  derived and/or modified CDS sequence (wt) from hemagglutinin__InfluenzaA__ABO32937
augaagacuaucauugcuuugagcuacauucuaugucugguuuucgcucaaaaacuucccggaaaugacaacagcacggcaacgcugugccuugggcaccaugcaguaccaaacggaacgauagugagaacaaucacgaaugaccaaauugaaguuacuaaugcuacugagcugguucagaguuccucaacaggugaaauaugcgacagcccucaucagauccuugauggagaaaacugcacacuaauagaugcucuauugggagacccucagugugauggcuuccaaaauaagaaaugggaccuuuuuguugaacgcagcaaagccuacagcaacuguuacccuuaugaugugccggauuaugccucccuuaggucacuaguugccucauccggcacacuggaguuuaacaaugaaagcuucaauuggacuggagucacucaaaauggaacaagcucuucuugcaaaaggagaucuaauaacaguuucuuuaguagauugaauugguugacccacuuaaaauucaaauacccagcauugaacgugacuaugccaaacaaugaaaaauuugacaaauuguacauuugggggguucaccacccggguacggacaaugaccaaaucuuccuguaugcucaagcaucaggaagaaucacagucucuaccaaaaggagccaacaaacuguaaucccgaauaucggaucuagacccagaguaaggaauauccccagcagaauaagcaucuauuggacaauaguaaaaccgggagacauacuuuugauuaacagcacagggaaucuaauugcuccuagggguuacuucaaaauacgaagugggaaaagcucaauaaugagaucagaugcacccauuggcaaaugcaauucugaaugcaucacuccaaauggaagcauucccaaugacaaaccauuucaaaauguaaacaggaucacauauggggccugucccagauauguuaagcaaaacacucugaaauuggcaacagggaugcgaaauguaccagagaaacaaacuagaggcauauuuggcgcaaucgcggguuucauagaaaaugguugggagggaaugguggaugguugguacgguuucaggcaucaaaauucugagggaauaggacaagcagcagaucucaaaagcacucaagcagcaaucaaucaaaucaaugggaagcugaauagguugaucgggaaaaccaacgagaaauuccaucagauugaaaaagaauucucagaaguagaagggagaauucaggaccucgagaaauauguugaggacacuaaaauagaucucuggucauacaacgcggagcuucuuguugcccuggagaaccaacauacaauugaucuaacugacucagaaaugaacaaacuguuugaaagaacaaagaagcaacugagggaaaaugcugaggauaugggcaaugguuguuucaaaauauaccacaaaugugacaaugccugcauaggaucaaucagaaauggaacuuaugaccaugauguauacagagaugaagcauuaaacaaccgguuccagaucaaaggcguugagcugaagucaggauacaaagauuggauccuauggauuuccuuugccauaucauguuuuuugcuuuguguugcuuuguugggguucaucaugugggccugccaaaaaggcaacauuaggugcaacauuugcauuuga

SEQ ID NO: 33598 - RNA, 1698 nt, Artificial Sequence
  derived and/or modified CDS sequence (wt) from hemagglutinin__InfluenzaA__ABO32948
augagagcaaaacuacugguccuguuauguacauuuacagcuacauacgcagacacaauauguauaggcuaccaugccaacaacucaaccgacacuguugacacaguacuugagaagaaugugacagugacacauucugucaaccuacuugaggacagucacaauggaaaacuaugucuacuaaaaggaauagccccacuacaauuggguaauugcagcguugccggauggaucuuaggaaacccagaaugcgaauuacugauuuccaaggaaucaugguccuacauuguagaaacaccaaauccugagaaugggacauguuacccaggauauuucgccgacuaugaggaacugagggagcaauugaguucaguaucuucauuugagagauucgaaauauuccccaaaggaagcucauggcccaaccacacuguaaccggaguaucagcaucaugcucccauaaugggaaaagcaguuuuuacagaaauuugcuauggcugacggggaagaaugguuuguacccaaaccugagcauguccuauguaaacaacaaagagaaagaaguccuugugcuaugggguguucaucacccaccuaacauaggggaccaaagggcccucuaccauacagaaaaugcuuaugucucuguagugucuucacauuauagcagaagauucaccccagaaauagccaaaagacccaaaguaagagaucaggaaggaagaaucaacuacuacuggacucugcuggaacccggggacacaauaauauuugaggcaaauggaaaucuaauagcgccaugguaugcuuucgcacugaguagaggcuuuggaucaggaaucaucaccucgaaugcaccaauggaugaaugugaugcgaagugucaaacaccucagggagcuauaaacaguagucuuccuuuccagaauguacacccaguuacaauaggagaguguccaaaguaugucaggagugcaaaauuaaggaugguuacaggacuaaggaacaucccauccauucaauccagagguuuguuuggagccauugccgguuucauugaagggggguggacuggaaugguagaugggugguaugguuaucaucaucagaaugagcaaggaucuggcuaugcugcagaccaaaaaagcacacaaaaugccauuaacgggauuacaaacaaggugaauucuguaauugagaaaaugaacacucaauucacagcugugggcaaagaauucaacaaauuagaaagaaggauggaaaacuuaaauaaaaaaguugaugauggguuucuagacauuuggacauauaaugcagaauuguugguucuacuggaaaaugaaaggacuuuggauuuccaugacuccaaugugaagaaucuguaugagaaaguaaaaagccaauuaaagaauaaugccaaagaaauaggaaacggguguuuugaauucuaucacaaguguaacaaugaaugcauggaaagugugaaaaauggaacuuaugacuauccaaaauauuccgaagaaucaaaguuaaacagggagaaaauugauggaguaaaauuggaaucaaugggagucuaucagauucuggcgaucuacucaacugucgccaguucccugguucuuuuggucucccugggggcaaucagcuucuggauguguuccaaugggucuuugcaguguagaauaugcaucuga

SEQ ID NO: 33599 - RNA, 1698 nt, Artificial Sequence
  derived and/or modified CDS sequence (wt) from hemagglutinin__InfluenzaA__ABO32959
augaaagcaaaacuacugguccuguuauguacauuuacagcuacauacgcagacacaauauguauaggcuaccaugccaacaacucaaccgacacuguugacacaguacuugagaagaaugugacagugacacacucugucaaccuacuugaggacagucacaauggaaaacuaugucuacuaaaaggaauagccccacuacaauuggguaauugcagcguugccggauggaucuuaggaaacccagaaugcgaauuacugauuuccaaggaaucaugguccuacauuguagaaacaccaaauccugagaauggaacauguuacccaggguauuucgcugacuaugaggaacugagggagcaauugaguucaguaucuucauuugagagauucgaaauauuccccaaagaaagcucauggcccaaccacaccguaaccggaguaucagcaucaugcucccauaaugggaaaagcaguuuuuacagaaauuugcuauggcugacggggaagaaugguuuguacccaaaccugagcagguccuauguaaacaacaaagagaaagaaguccuugugcuaugggguguucaucacccaccuaacauaggggaccaaagggcccucuaccauacagaaaaugcuuaugucucuguagugucuucacauuauagcagaagauucaccccagaaauagccaaaagacccaaaguaagagaucaggaaggaagaaucaacuacuacuggacucugcuggaacccggggacacauuaauauuugaggcaaauggaaaucuaauagcgccaugguaugcuuucgcacugaguagaggcuuuggaucaggaaucaucaccucaaaugcaccaauggaugaaugugaugcgaagugucaaacaccucagggagcuauaaacagcagucuuccuuuccagaauguacacccaguuacaauaggagaguguccaaaguaugucaggaguacaaaauuaaggaugguuacaggacuaaggaacaucccauccauucaauccagagguuuguuuggagccauugccgguuucauugaagggggguggacuggaaugguagaugggugguaugguuaucaucaucagaaugagcaaggaucuggcuaugcugcagaucaaaaaagcacacaaaaugccauuaacgggauuacaaacaaggugaauucuguaauugagaaaaugaacacucaauucacagcugugggcaaagaauucaacaaauuagaaagaaggauggaaaacuuaaauaaaaaaguugaugauggguuucuagacauuuggacauauaaugcagaauuguugguucuacuggaaaaugaaaggacuuuggauuuccaugacuccaaugugaagaaucuguaugagaaaguaaaaagccaauuaaagaauaaugccaaagaaauaggaaacggguguuuugaauucuaucacaaguguaacaaugaaugcauggaaagugugaaaaauggaacuuaugacuauccaaaauauuccgaagaaucaaaguuaaacagggagaaaauugauggaguaaaauuggaaucaaugggagucuaucagauucuggcgaucuacucaacugucgccaguucccugguucuuuuggucucccugggggcaaucagcuucuggauguguuccaaugggucuuugcaauguagaauaugcaucuga

SEQ ID NO: 33600 - RNA, 1698 nt, Artificial Sequence; identical to SEQ ID NO: 33396
  derived and/or modified CDS sequence (wt) from hemagglutinin__InfluenzaA__ABO32970

SEQ ID NO: 33601 - RNA, 1701 nt, Artificial Sequence
  derived and/or modified CDS sequence (wt) from hemagglutinin__InfluenzaA__ABO32981
augaaagcaaaacuacugguccuguuaugugcacuuucagcuacagaugcagacacaauauguauaggcuaccaugcgaacaacucaaccgacacuguugacacaguacucgaaaagaacgugacagugacacacucugucaaccuacuugaggacagucacaacggaaaacuaugcagacuaaaaggaauagccccacuacaauuggggaaaugcagcauugccggauggaucuuaggaaacccagaaugcgaaucacuguuuucuaagaaaucaugguccuacauugcagaaacaccaaacuccgagaauggaacauguuacccaggauauuucgccgacuaugaggaacugagggagcaauugaguucaguaucaucauucgagagauucgaaauauuccccaaggaaagaucauggcccaaacacaacguaaccagaggaguaacggcaucaugcucccauaaggggaaaagcaguuuuuacagaaauuugcuauggcugacggagaaaaauggcucguacccaaaucugagcaaguccuaugugaacaacaaagagaaagaaguccuuguccuaugggguguucaucacccgucuaacauaaaggaccaaaagaccaucuaucggaaagaaaaugcuuaugucucuguagugucuucaaauuauaacaggagauucaccccagaaauagcagaaagacccaaaguaagagaucaagcagggagaauuaacuacuacuggacucugcuggaacccggggacacaauaauauuugaggcaaauggaaaucuaauagcgccaugguaugcuuucgcacugaguagaggcuuugggucaggaaucaucaccucaaacgcaucgauggaugaaugugacacgaagugucaaacaccccagggagcuauaaacaguagucuuccuuuccagaauguacacccagucacaauaggagagugcccaaaauacgucaggaguacaaaauuaaggaugguuacaggacuaaggaacaucccauccauucaauccagaggucuguuuggagccauugccgguuucauugaagggggauggacuggaaugauagauggaugguaugguuaucaucaucagaaugaacagggaucuggcuaugcugcggaucaaaaaagcacacaaaaugccauuaacgggauuacaaacaaggugaacucuguuaucgagaaaaugaacacucaauucacagcuguggguaaagaauucaacaaauuagaaaaaaggauggaaaacuuaaauaaaaaaguugaugauggauuucuggacauuuggacauauaaugcagaauuguugguucuacuggaaaaugaaaggacuuuggauuuucaugacucaaaugugaagaaucuguaugagaaaguaaaaagccaauuaaagaauaaugccaaagaaauaggaaacggguguuuugaauucuaccacaaguguaacaaugaaugcauggaaaguguaaaaaauggaacuuaugacuauccaaaauauucagaggaaucaaaguuaaacagggaaaaaauugauggagugaaauuggaaucaaugggagucuaucagauucuggcgaucuacucaacugucgccaguucacuggugcuuuuggucucccugggggcaaucagcuucuggauguguucuaaugggucuuugcagugcagaauaugcaucuga

SEQ ID NO: 33602 - RNA, 1701 nt, Artificial Sequence
  derived and/or modified CDS sequence (wt) from hemagglutinin__InfluenzaA__ABO32992
augaaagcaaaacuacugguccuguuaugugcacuuucagcuacagaugcagacacaauauguauaggcuaccaugcgaacaacucaaccgacacuguugacacaguacucgaaaagaacgugacagugacacacucugucaaccuacuugaggacagucacaacggaaaacuaugcagacuaaaaggaauagccccacuacaauuggggaaaugcagcauugccggauggaucuuaggaaacccagaaugcgaaucacuguuuucuaagaaaucaugguccuacauugcagaaacaccaaacuccgagaauggaacauguuacccaggauauuucgccgacuaugaggaacugagggagcaauugaguucaguaucaucauucgagagauucgaaauauuccccaaggaaagaucauggcccaaacacgacguaaccagaggaguaacggcaucaugcucccauaaggggaaaagcaguuuuuacagaaauuugcuauggcugacggagaaaaauggcucguacccaaaucugagcaaguccuaugugaacaacaaagagaaagaaguccuuguacuaugggguguucaucacccgucuaacauagaggaccaaaagaccaucuaucggaaagaaaaugcuuaugucucuguagugucuucaaauuauaacaggagauucaccccagaaauaucagaaagacccaaaguaagagaucaaaaagggagaauuaacuacuacuggacucugcuggaacccggggacacaauaauauuugaggcaaauggaaaucuaauagcgccaugguaugcuuucgcacugaguagaggcuuugggucaggaaucaucaccucaaacgcaucgauggaugaaugugacacgaagugucaaacaccccagggagcuauaaacaguagucuuccuuuccagaauguacacccagucacaauaggagagugcccaaaauacgucaggaguacaaaauuaaggaugguuacaggacuaaggaacaucccauccauucaauccagaggucuguuuggagccauugccgguuucauugaagggggauggacuggaaugauagauggaugguaugguuaucaucaucagaaugaacagggaucuggcuaugcugcggaucaaaaaagcacacaaaaugccauuaacgggauuacaaacaaggugaacucuguuaucgagaaaaugaacacucaauucacagcuguggguaaagaauucaacaaauuagaaaaaaggauggaaaacuuaaauaaaaaaguugaugauggauuucuggacauuuggacauauaaugcagaauuguugguucuacuggaaaaugaaaggacuuuggauuuucaugacucaaaugugaagaaucuguaugagaaaguaaaaagccaauuaaagaauaaugccaaagaaauaggaaacggguguuuugaauucuaccacaaguguaacaaugaaugcauggaaaguguaaaaaauggaacuuaugacuauccaaaauauucagaggaaucaaaguuaaacagggaaaaaauugauggagugaaauuggaaucaaugggagucuaucagauucuggcgaucuacucaacugucgccaguucacuggugcuuuuggucucccugggggcaaucagcuucuggauguguucuaaugggucuuugcagugcagaauaugcaucuga

SEQ ID NO: 33603 - RNA, 1701 nt, Artificial Sequence
  derived and/or modified CDS sequence (wt) from hemagglutinin__InfluenzaA__ABO33006
augaaagcaaaaauacugguccuguuaugugcacuuucagcuacagaugcagacacaauauguauaggcuaccaugcgaacaacucaaccgacacuguugacacaguacucgaaaagaacgugacagugacacacucugucaaccuacuugaggacagucacaacggaaaacuaugcagacuaaaaggaauagccccacuacaauuggggaaaugcagcauugccggauggaucuuaggaaacccagaaugugaaucacuguuuucuaagaaaucuugguccuacauugcagaaacaccaaacuccgagaauggaacauguuacccaggauauuucgcugacuaugaggaacugagggagcaauugaguucagugucaucauucgagagauucgaaauauuccccaaggaaaggucauggcccaaacacaacguaaccaggggaguaacggcaucaugcucccauaaggggaaaagcaguuuuuacagaaauuugcuauggcugacggagaaaaauggcucguacccaaaucugagcaaguccuaugugaacaacaaagagaaagaaguccuuguacuaugggguguucaucacccgucuaacauagaggaccaaaagaccaucuaucggaaagaaaaugcuuaugucucuguagugucuucaaauuauaacaggagauucaccccagaaauaucaaaaagacccaaaguaagagaucaagaagggagaauuaacuacuacuggacucugcuggaacccggggacacaauaauauuugaggcaaauggaaaucuaauagcgccaugguaugcuuucgcacugaguagaggcuuugggucaggaaucaucaccucaaacgcaucgauggaugaaugugacacgaagugucaaacaccccagggagcuauaaacaguagucuuccuuuccagaauguacacccagucacaauaggagagugcccaaaauacgucaggaguacaaaauuaaggaugguuacaggacuaaggaacaucccaucuauucaauccagaggucuguuuggagccauugccgguuucauugaagggggauggacuggaaugauagauggaugguaugguuaucaucaucagaaugaacagggaucuggcuaugcugcggaucaaaaaagcacacaaaaugccauuaacgggauuacaaacaaggugaacucuguuaucgagaagaugaacacucaauucacagcuguggguaaagaauucaacaaauuagaaaaaaggauggaaaacuuaaauaaaaaaguugaugauggauuucuggacauuuggacauauaaugcagaauuguugguucuacuggaaaaugaaaggacuuuggauuuucaugacucaaaugugaagaaucuguaugagaaaguaaaaagccaauuaaagaauaaugccaaagaaauaggaaacggguguuuugaauucuaccacaaguguaacaaugaaugcauggaaaguguaaaaaauggaacuuaugacuauccaaaauauucagaggaaucaaaguuaaacagggaaaaaauugauggagugaaauuggaaucaaugggagucuaucagauucuggcgaucuacucaacugucgccaguucacuggugcuuuuggucucccuuggggcaaucagcuucuggauguguucuaaugggucuuugcagugcagaauaugcaucuga

SEQ ID NO: 33604 - RNA, 1701 nt, Artificial Sequence
  derived and/or modified CDS sequence (wt) from hemagglutinin__InfluenzaA__ABO33025
augaaagcaaaacuacugguccuguuaugugcacucucagcuacagaugcagacacaauauguauaggcuaccaugcgaacaacucaaccgacacuguugacacaguacucgaaaagaacgugacagugacacacucugucaaccuacuugaggacaaucacaacgggaaacuaugcaaacuaaaaggaauagcgccacuacaauuggggaaaugcagcauugccggauggaucuuaggaaacccagaaugcgaaucacuguuuucuaagaaaucaugguccuacauugcagaaacaccaaacuccgagaauggaacauguuacccaggguauuucgccgacuaugaagaacugagggaacaauugaguucaguaucaucauucgagagauucgaaauauuccccaaggaaaguucauggcccaaccacaacguaaccaaaggaguaacggcaucaugcucccauaaggggaaaagcaguuuuuacagaaauuugcuauggcugacggagaaaaauggcucguacccaaaucugagcaaguccuaugugaacaacaaagagaaagaaguccuuguacuaugggguguucaucacccgucuaacauaaaggaccaaaggaccaucuaucguaaagaaaaugcuuaugucucuguagugucuucacauuauaacaggagauucaccccagaaauagcaaaaagacccaaaguaagagaucaagaagggagaauuaacuacuacuggacucugcuggaacccggggacacaauaauauuugaggcaaauggaaaucuaauagcgccaugguaugcuuucgcacugaguagaggcuuugggucaggaaucaucaccucaaacgcaucgauggaugaaugugacgcgaagugucaaacaccccagggagcuauaaacaguagucuuccuuuucagaauguacacccagucacaauaggagagugcccaaaguacgucaggaguacaaaauuaaggaugguuacaggacuaaggaacaucccauccauucaauccagagguuuguuuggagccauugccgguuucauugaagggggauggacuggaaugauugauggaugguaugguuaucaucaucagaaugaacagggaucuggcuaugcugcggaucaaaaaagcacacaaagugccauuaacgggauuacaaacaaggugaacucuauaaucgagaaaaugaacacucaauucacagcuguggguaaagaauucaacaaacuagaaaaaaggauggaaaacuuaaauaaaaaaguugaugauggauuucuggacauuuggacauauaaugcagaauuguugguucuacuggaaaaugaaaggacuuuggauuuccaugacucaaaugugaagaaccuguaugagaaaguaaaaagccaauuaaagaauaaugccaaagaaauaggaaacggguguuuugaauucuaccacaaguguaacaaugaaugcauggaaaguguaaaaaauggaacuuaugacuauccaaaauauucagaggaaucaaaauuaaacagggaaaaaauugauggagugaaauuggaaucaaugggagucuaucagauucuggcgaucuacucaacugucgccaguucacuggugcuuuuggucucccugggggcaaucagcuucuggauguguucuaaugggucuuugcagugcagaauaugcaucuga

SEQ ID NO: 33605 - RNA, 1701 nt, Artificial Sequence
  derived and/or modified CDS sequence (wt) from hemagglutinin__InfluenzaA__ABO33036
augaagacuaucauugcuuugagcuacauuuuaugucugguuuucgcucaaaaacuucccggaaaugacaacagcacggcaacgcugugccugggacaccaugcagugccaaacggaacgcuagugaaaacaaucacgaaugaccaaauugaagugacuaaugcuacugagcugguucagaguuccucaacagguagaauaugcaacaguccucaccaaauccuugauggagaaaacugcacacuaauagaugcucuauugggagacccucauugugauggcuuccaaaauaaggaaugggaccuuuuuguugaacgcagaaaagccuacagcaacuguuacccuuaugaugugccggauuaugccucccuuaggucacuaguugccucaucuggcacacuggaguuuaacaaugaaagcuucaacuggacuggagucgcucagaauggaacaagcucugcuugcaaaaggagaucuauuaaaaguuucuuuaguagauugaauugguugcaccaauuaaaauacaaauauccagcacugaacgugacuaugccaaacaaugaaaaauuugacaaauuguacauuugggggguucaccacccgaguacggacagugaccaaaucagccuguaugcucaagcaucagggagagucacagucucuaccaaaagaagccaacaaacuguaaucccgaauaucggaucuagacccuggguaaggggugucuccagcagaauaagcaucuauuggacaauaguaaaaccgggagacauacuuuugauuaacagcacagggaaucuaauugcuccucgggguuacuucaaaauacgaagugggaaaagcucaauaaugaggucagaugcacccauuggcaaaugcaauucugaaugcaucacuccaaauggaagcauucccaaugacaaaccauuucaaaauguaaacaggaucacauauggggccugucccagauauguuaagcaaaacacucugaaauuggcaacagggaugcggaauguaccagagaaacaaacuagaggcauauucggcgcaaucgcggguuucauagaaaaugguugggagggaaugguggacgguugguacgguuucaggcaucaaaauucugagggcacaggacaagcagcagaucuuaaaagcacucaagcagcaaucaaccaaaucaacgggaaacugaauagguuaaucgagaaaacgaacgagaaauuccaucaaauugaaaaagaauucucagaaguagaagggagaauucaggaccucgagaaauauguugaggacacuaaaauagaucucuggucguacaacgcggagcuucuuguugcccuggagaaccaacauacaauugaucuaacugacucagaaaugaacaaacuguuugaaagaacaaagaagcaacugagggaaaaugcugaggauaugggcaaugguuguuucaaaauauaccacaaaugugacaaugccugcauagggucaaucagaaauggaacuuaugaccaugauguauacagagacgaagcauuaaacaaccgguuccagaucaaagguguugagcugaagucaggauacaaagauuggauccuauggauuuccuuugccauaucauguuuuuugcuuuguguuguuuugcugggguucaucaugugggccugccaaaaaggcaacauuaggugcaacauuugcauuuga

SEQ ID NO: 33606 - RNA, 1701 nt, Artificial Sequence; identical to SEQ ID NO: 33383
  derived and/or modified CDS sequence (wt) from hemagglutinin__InfluenzaA__ABO33047

SEQ ID NO: 33607 - RNA, 1701 nt, Artificial Sequence
  derived and/or modified CDS sequence (wt) from hemagglutinin__InfluenzaA__ABO33058
augaagacuaucauugcuuugagcuacauuuuaugucugguuuucgcucaaaaacuucccggaaaugacaacagcacggcaacgcugugccuggggcaucaugcagugccaaacggaacgcuagugaaaacaaucacgaaugaccaaauugaagugacuaaugcuacugagcugguucagaguuccucaacagguggaauaugcgacaguccucaccaaauccuugauggagaaaacugcacacuaauagaugcucuauugggagacccucauugugauggcuuccaaaauaaggaaugggaccuuuuuguugaacgcagcaaagccuacagcaacuguuacccuuaugaugugccggauuaugccucccuuaggucacuaguugccucauccggcacacuggaguuuaacaaugaaagcuucaauuggacuggagucgcucagaauggaacaagcucugcuugcaaaaggagaucuaauaaaaguuucuuuaguagauugaauugguugcaccaauuaaaauacaaauacccagcacugaacgugacuaugccaaacaaugaaaaauuugacaaauuguacauuugggggguucaccacccgaguacggacagugaccaaaucagccuauaugcucaagcaccagggagagucacagucucuaccaaaagaagccaacaaacuguaaucccgaauaucggaucuagacccuggguaaggggugucuccagcagaauaagcaucuauuggacaauaguaaaaccgggagacauacuuuugauuaacugcacagggaaucuaauugcuccucgggguuacuucaaaauacgaagugggaaaagcucaauaaugaggucagaugcauccauuggcaaaugcaauucugaaugcaucacuccaaauggaagcauucccaaugacaaaccauuucaaaauguaaacaggaucacauauggggccugucccagauauguuaagcaaaacacucugaaauuggcaacagggaugcggaauguaccagagaaacaaacuagaggcauauucggcgcaaucgcggguuucauagaaaaugguugggagggaaugguggacgguugguacgguuucaggcaucaaaauucugagggcacaggacaagcagcagaucucaaaagcacucaagcagcaaucaaccaaaucaacgggaaacugaauagguuaaucgagaaaacgaacgagaaauuccaucaaauugaaaaagaauucucagaaguggaagggagaauucaggaccucgagaaauauguugaggacacuaaaauagaucucuggucguacaacgcggagcuucuuguugcccuggagaaccagcauacaauugaucuaacugacucagaaaugaacaaacuguuugaaagaacaaagaagcaacugagggaaaaugcugaggauaugggcaaugguuguuucaaaauauaccacaaaugugacaaugccugcauagggucaaucagaaaugggacuuaugaccaugauguauacagagacgaagcauuaaacaaccgguuccagaucaaagguguugagcugaagucaggauacaaagauuggauccuauggauuuccuuugccauaucauguuuuuugcuuuguguugucuugcugggguucaucaugugggccugccaaaaaggcaacauuaggugcaacauuugcauuuga

SEQ ID NO: 33608 - RNA, 1701 nt, Artificial Sequence
  derived and/or modified CDS sequence (wt) from hemagglutinin__InfluenzaA__ABO33069
augaagacuaucauugcuuugagcuacauuuucugucugguuuucgcccaaaaccuucccggaaaugacaacagcacagcaacgcugugccugggacaucaugcagugccaaacggaacgcuagugaaaacaaucacgaaugaucagauugaagugacuaaugcuacugagcugguucagaguuccucaacagguagaauaugcgacaguccucaucgaauccuugauggaaaaaacugcacacugauagaugcucuauugggagacccucauugugauggcuuucaaaaugagaaaugggaccuuuuuguugaacgcagcaaagcuuucagcaacuguuacccuuaugaugugccagauuaugccucccuuaggucacuaguugccucgucaggcacccuggaguuuaucaaugaaggcuucaauuggacuggggucacucagaauggaggaagcuaugcuugcaaaaggggaccugauaacaguuucuucaguagacugaacugguuguacgaaucagaaagcaaauauccagugcugaacgugacuaugccaaacaaugacaauuuugacaaacuguacauuugggggguucaccacccgagcacggacaaagaacaaaccaaccuauauguucaagcaucagggagagucacagucucuaccaagaaaagccagcagacuauaaucccgaaugucgggucuagacccuggguaaggggucugucuaguagaauaaguaucuauuggacaauaguaaaaccgggagacauacuguuaauuaauaguaaugggaaccuaauugcuccucgggguuacuucaaaauacgcacugggaaaagcucaauaaugaggucagaugcaccuauuggcaccugcaguucugaaugcaucacuccaaauggaagcauucccaaugacaagcccuuucaaaacguaaacaagaucacauauggagcaugucccaaguauguuaagcaaaacacucugaaguuggcaacagggaugcggaauguaccagagaaacaaacuagaggcauauucggcgcaauagcagguuucauagaaaaugguugggagggaaugguagacgguugguacgguuucaggcaucaaaauucugagggcacaggacaagcagcagaucuuaaaagcacucaagcagccaucgaccaaaucaaugggaaacugaauaggguaaucgagaaaacgaacgagaaauuccaucaaaucgaaaaggaauucucagaaguagaagggagaauucaggaccucgagaaauacauugaagacacuaaaauagaucucuggucuuacaaugcggagcuucuugucgcuuuggagaaccaacauacaauugaucugacugacucgaaaaugaacaaacuguuugaaaaaacaaggaggcaacugagggaaaaugcugaggacaugggcaaugguugcuucaaaauauaccacaaaugugacaaugcuugcauagggucaaucagaaauggaacuuaugaccaugauguauacagagacgaagcauuaaacaaccgguuucagaucaaagguguugagcugaagucaggauacaaagacuggauccuguggauuuccuuugccauaucaugcuuuuugcuuuguguuguuuugcugggguucaucaugugggccugccagaaaggcaacauuaggugcaacauuugcauuuga

SEQ ID NO: 33609 - RNA, 1701 nt, Artificial Sequence
  derived and/or modified CDS sequence (wt) from hemagglutinin__InfluenzaA__ABO37988
augaaagcaaaacuacugguccuguuaugugcacuuucagcuacagaugcagacacaauauguauaggcuaccaugcgaacaacucaaccgacacuguugacacaguacucgaaaagaacgugacagugacacacucugucaaccuacuugaggacaaucacaacgggaaacuaugcaaacuaaaaggaauagccccacuacaauuggggaaaugcagcauugccggauggaucuuaggaaacccagaaugcgaaucacuguuuucuaagaaaucaugguccuacauugcagaaacaccaaacuccgagaauggaacauguuacccaggguauuucgccgacuaugaggaacugagggaacaauugaguucaguaucaucauucgagagauucgaaauauuccccaaggaaaguucauggcccaaacacaacguaaccaaaggaguaacggcaucaugcucccauaaggggaaaagcaguuuuuacagaaauuugcuauggcugacggagaaaaauggcucguacccaaaucugagcaaguccuaugugaacaacaaagagaaagaaguccuuguacuaugggguguucaucacccgucuaacauagaggaccaaaagaccaucuaucguaaagaaaaugcuuaugucucuguagugucuucacauuauaacaggagauucaccccagaaauagcaaaaagacccaaaguaagaaaucaagaagggagaauuaacuacuacuggacucugcuggaacccggggacacaauaauauuugaggcaaauggaaaucuaauagcgccaugguaugcuuucgcauugaguagaggcuuugggucaggaaucaucaccucaaacgcaucgauggaugaaugugacgcgaagugucaaacaccccagggagcuauaaacaguagucuuccuuuucagaauguacacccagucacaauaggagagugcccaaaguacgucaggaguacaaaauuaaggaugguuacaggacuaaggaacaucccauccauucaauccagagguuuguuuggagccauugccgguuucauugaagggggauggacuggaaugauugauggaugguaugguuaucaucaucagaaugaacagggaucuggcuaugcugcggaucaaaaaagcacacaaaaugccauuaacgggauuacaaacaaggugaacucuauaaucgagaaaaugaacacucaauucacagcuguggguaaagaauucaacaaacuagaaaaaaggauggaaaacuuaaauaaaaaaguugaugauggguuucuggacauuuggacauauaaugcagaauuguugguucuacuggaaaaugaaaggacuuuggauuuccaugacucaaaugugaagaaccuguaugagaaaguaaaaagccaauuaaagaauaaugccaaagaaauaggaaacggguguuuugaauucuaccacaaguguaacaaugaaugcauggaaaguguaaaaaaugggacuuaugacuauccaaaauauucagaagaaucaaaguuaaacagggaaaaaauugauggagugaaauuggaaucaaugggagucuaucagauucuggcgaucuacucaacugucgccaguucacuggugcuuuuggucucccugggggcaaucagcuucuggauguguucuaaugggucuuugcagugcagaauaugcaucuga

SEQ ID NO: 33610 - RNA, 1701 nt, Artificial Sequence
  derived and/or modified CDS sequence (wt) from hemagglutinin__InfluenzaA__ABO38010
augaaagcaaaacuacuaguccuguugugugcauuuacagcuacauaugcagacacaauauguauaggcuaccaugcgaacaacucaaccgacacuguugacacaguacuugagaagaacgugacagugacacacucugucaaccuacuugaggacagucacaacggaaaacuaugccgacuaaaaggaacagccccacuacaauuggguaauugcagcguugccggauggaucuuaggaaacccagaaugcgaaucacuuuuuucuaaggaaucaugguccuacauugcagaaacaccaaacccugagaauggaacauguuacccaggguauuucgccgacuaugaggaacugagggagcaauugagcucaguaucaucauucgagagauucgaaauauuccccaaggaaagcucauggcccaaccacacaguaaccaaaggagugacggcaucaugcucccauaaugggaaaagcaguuuuuacaaaaauuugcuauggcugacggaaaagaauggcuuguacccaaaucugagcaaguccuauguaaacaacaaggagaaagaaguccuuguacuaugggguguucaucacccgucuaacauaggggaccaaagggccaucuaucauacagaaaaugcuuaugucucuguggugucuucacauuauagcagaagauucaccccagaaauagcaaaaagacccaaaguaagagaucaagaagggagaauuaacuacuacuggacucugcuggaacccggggacacaauaauauuugaggcaaauggaaaucuaauagcgccaugguacgcuuucgcauugaguagaggcguugggucaggaaucaucaccucaaacgcaucaaugggugacugugacgcuaagugucaaacaccccaaggagcuauaaacaguagucuuccuuuccagaauguacacccagucacaauaggagagugucccaaguaugucaggaguacaaaauuaaggaugguuacaggacuaagaaacaucccauccauucaaucuagagguuuguuuggagccauugccgguuucauugaagggggguggacuggaaugauagauggaugguaugguuaucaucaucagaaugaacaaggaucuggcuaugcugcagacaaaaaaagcacacaaaaugccauugaugggauuacaaacaaggugaauucuguaaucgagaaaaugaacacucaauucacagcuguaggcaaagaauucaacaaauuagagagaaggauggaaaacuuaaauaagaaaguugaugauggauuucuggacauuuggacauauaaugcagaguuguugguucuccuggaaaaugaaaggacuuuggauuuucaugacucaaaugugaagaaucuguaugagaaaguaaaaaaccaauugaagaauaaugccaaagaaaucgggaacggguguuuugaauucuaucacaaguguaacaaugaaugcauggaaagugugaaaaauggaacuuaugacuauccaaaauauuccgaagaaucaaaguuaaaaagggaaaaaauugauggagugaaauuggaaucaaugggagucuaucagauucuggcgaucuacucaacugucgccaguucacuggugcuuuuggucucccugggggcaaucaguuucuggauguguucuaaugggucuuugcaguguagaauaugcaucuga

SEQ ID NO: 33611 - RNA, 1698 nt, Artificial Sequence
  derived and/or modified CDS sequence (wt) from hemagglutinin__InfluenzaA__ABO38021
augaaagcaaaacuacugguccuguuauguacauuuacagcuacauaugcagacacaauauguauaggcuaccaugccaacaacucaaccgacacuguugacacaguacuugagaagaaugugacagugacacacucugucaaccuacuugaggacagucacaauggaaaacuaugucuacuaaaaggaauagccccacuacaauuggguaauugcagcguugccggauggaucuuaggaaacccagaaugcgaauuacugauucccaaggaaucaugguccuacauuguagaaacaccaaauccugagaauggaacauguuacccaggguauuucgccgacuaugaggaacugagggagcaauugaguucaguaucuucauuugagagauucgaaauauuccccaaagaaagcucauggcccaaccacaccguaaccggaguaucagcaucaugcucccauaaugggaaaagcaguuuuuacagaaauuugcuauggcugacggggaagaaugguuuguacccaaaccugagcaaguccuaugcaaacaacaaagagaaagaaguccuuguacuaugggguguucaucacccgccuaacauaggggaccaaagggcccucuaucauacagaaaaugcuuaugucucuguagugucuucacauuauagcagaagauucaucccagaaauggccaaaagacccaaaguaagagaucaggaaggaagaaucaacuacuacuggacucugcuggaacccggagauacaauaauauuugaggcaaauggaaaucuaauagcgccaugguaugcuuucgcacugaguagaggcuuuggaucaggaaucaucaccucaaaugcaccaaugggugaaugugaugcgaagugucaaacaccucagggagcuauaaacagcagucuuccuuuccagaauguacacccagucacaauaggagaguguccaaaguaugucaggagugcaaaauuaaggaugguuacaggacuaaggaacaucccauccauucaauccagagguuuguuuggagccauugccgguuucauugaagggggguggacuggaaugguagaugggugguaugguuaucaucaucagaaugagcaaggaucuggcuaugcugcagaucaaaaaagcacacaaaaugccauuaacgggauuacaaacaaggugaauucuguaauugagaaaaugaacacucaauucacagcugugggcaaagaauucaacaaauuggaaagaaggauggaaaacuuaaauaaaaaaguugaugauggguuucuagacauuuggacauauaaugcagaauuguugguucuacuggaaaaugaaaggacuuuggauuuccaugacuccaaugugaagaaucuguaugagaaaguaaaaagccaauuaaagaauaaugccaaagaaauaggaaacggguguuuugaauucuaccacaagugcaacaaugaaugcauggagagugugaaaaauggaacuuaugacuauccaaaauauuccgaagaaucaaaguuaaacagggagaaaauugauggagugaaauuggaaucaaugggagucuaucagauucuggcgaucuacucaacugucgccaguucccugguucuuuuggucucccugggggcaaucagcuucuggauguguuccaaugggucuuugcaguguagaauaugcaucuga

SEQ ID NO: 33612 - RNA, 1698 nt, Artificial Sequence
  derived and/or modified CDS sequence (wt) from hemagglutinin__InfluenzaA__ABO38032
augaaaguaaaacuacugguccugcuauguacauuuacagcuacauaugcagacacaauauguauaggcuaccaugccaacaacucaaccgacacuguugacacagugcuugagaagaaugugacagugacacacucugucaaccuacuugaggacagucacaauggaaaacuaugucuacuaaaaggaauagccccacuacaauuggguaauugcagcguugccggauggaucuuaggaaacccagaaugcgaauuacugauuuccaaggaaucaugguccuacauuguagaaacaccagauccugagaauggaacauguuacccaggguauuucgccgacuaugaggaacugagggagcaauugaguucaguaucuucauuugagagauucgaaauauuccccaaagaaagcucauggcccaaccacaccguaaccggaguaucagcaucaugcucccauaaugggaaaagcaguuuuuacagaaauuugcuauggcugacggggaagaaugguuuguacccaaaccugagcaaguccuaugcaaacaacaaagagaaagaaguccuuguacuaugggguguucaucacccgccuaacauaggggaccaaagggcccucuaucauacagaaaaugcuuaugucucuguagugucuucacauuauagcagaagauucaccccagaaauagccaaaagacccaaaguaagagaucaggaaggaagaaucaacuacuacuggacucugcuggaacccggggauacaauaauauuugaggcaaauggaaaucuaauagcgccaagguaugcuuucgcacugaguagaggcuuuggaucaggaaucaucaccucaaaugcaccaauggaugaaugugaugcgaagugucaaacaccuaagggagcuauaaacagcagucuuccuuuccagaaugugcacccagucacaauaggagaguguccaaaguaugucaggagugcaaaauuaaggaugguuacaggacuaaggaacaucccauccauucaauccagagguuuguuuggagccauugccgguuucauugaagggggguggacuggaaugguagaugggugguaugguuaucaucaucagaaugagcaaggaucuggcuaugcugcagaucaaaaaagcacacaaaaugccauuaacgggauuacaaacaaggugaauucuguaauugagaaaaugaacacucaauucacagcugugggcaaagaauucaacaaauuggaaagaaggauggaaaacuuaaauaaaaaaguugaugauggguuccuagacauuuggacauauaaugcagaauuguugguucuacuggaaaaugaaaggacuuuggauuuccaugacuccaaugugaagaaucuguaugagaaaguaaaaagccaauuaaagaauaaugccaaagaaauaggaaacggguguuuugaauucuaucacaaguguaacaaugaaugcauggagagugugaaaaauggaacuuaugacuauccaaaauauuccgaagaaucaaaguuaaacagggagaaaauugauggagugaaauuggaaucaaugggaaucuaucagauucuggcgaucuacucaacugucgccaguuccuugguucuuuuggucucccugggggcaaucagcuucuggauguguuccaaugggucuuugcaguguagaauaugcaucuga

SEQ ID NO: 33613 - RNA, 1698 nt, Artificial Sequence
  derived and/or modified CDS sequence (wt) from hemagglutinin__InfluenzaA__ABO38043
augaaagcaaaacuacugguccuguuauguacauuuacagcuacauacgcagacacaauauguauaggcuaccaugccaacaacucaaccgacacuguugacacaguacuugagaagaaugugacagugacacacucugucaaccuacuugaggacagucacaauggaaaacuaugucuacuaaaaggaauagccccacuacaauuggguaauugcagcguugccggauggaucuuaggaaacccagaaugcgaauuacugauuuccaaggaaucaugguccuacauuguagaaacaccaaaucccgagaauggaacauguuacccaggguauuucgccgacuaugaggaacugagggagcaauugaguucaguaucuucauuugagagauucgaaauauuccccaaaggaagcucauggcccaaccacaccgugaccggaguaucagcaucaugcucccauaaugggaaaagcaguuuuuacagaaauuugcuauggcugacggggaagaaugguuuguacccaaaccugagcauguccuauguaaacaacaaagagaaagaaguccuugugcuaugggguguucaucacccaccuaacauaggggaccaaagggcccucuaccauacagaaaaugcuuaugucucuguagugucuucacauuauagcagaagauucaccccagaaauagccaaaagacccaaaguaagagaucaggaaggaagaaucaacuacuacuggacucugcuggaacccggggacacaauaauauuugaggcaaauggaaaucuaauagcgccaugguaugcuuucgcacugaguagaggcuuuggaucaggaaucaucaccucaaaugcaccaaugggugaaugugaugcgaagugucaaacaccucagggagcuauaaacaguagucuuccuuuccagaauguacacccaguuacaauaggagaguguccaaaguaugucaggagugcaaaauuaaggaugguuacaggacuaaggaacaucccauccauucaauccagagguuuguuuggagccauugccgguuucauugaagggggguggacuggaaugguagaugggugguaugguuaucaucaucagaaugagcaaggaucuggcuaugcugcagaucaaaaaagcacacaaaaugccaucaacgggauuacaaacaaggugaauucuguaauugagaaaaugaacacucaauucacagcugugggcaaagaauucaacaaauuagaaagaaggauggaaaacuuaaauaaaaaaguugaugauggguuucuagacauuuggacauauaaugcagaauuguugguucuacuggaaaaugaaaggacuuuggauuuccaugacuccaaugugaagaaucuguaugagaaaguaaaaagccaauuaaagaauaaugccaaagaaauaggaaacggguguuuugaauucuaucacaaguguaacaaugaaugcauggaaagugugaaaaauggaacuuaugacuauccaaaauauuccgaagaaucaaaguuaaacagggagaaaauugauggaguaaaauuggaaucaaugggagucuaucagauucuggcgaucuacucaacugucgccaguucccugguucuuuuggucucccugggggcaaucagcuucuggauguguuccaaugggucuuugcaguguagaauaugcaucuga

SEQ ID NO: 33614 - RNA, 1701 nt, Artificial Sequence
  derived and/or modified CDS sequence (wt) from hemagglutinin__InfluenzaA__ABO38054
augaaagcaagacuacugguccuguuaugugcacuugcagcuacagaugcagacacaauauguauaggcuaccaugcaaacaacucaaccgacacuguugacacaguacucgaaaagaaugugacagugacacacucugucaaccuacucgaagacagccacaacgggaaauuauguagauuaaaaggaauagccccacuacaauuggggaaauguaacauugccggauggaucuugggaaacccagaaugcgaaucacugcuuucagagagaucaugguccuacauuguagaaacaccaaacucugaaaauggaacauguuacccaggagauuucaucgacuaugaggaacugagggagcaauugagcucaguaucaucauucgaaagauucgaaauauucuccaaggaaagcucauggcccaaacacaacacaaccagaggaguaacggcagcaugcucccaugcgggaaaaaguaguuuuuacagaaauuugcuauggcugacggagaaggauggcucauacccgaaucugaacaauuccuaugugaacaagaaagggaaagaaguccuuguacuaugggguguucaucacccgucuaacauaaaggaucaacagacccucuaucagaaagaaaaugcuuaugucucuguagugucuucaaacuauaacaggagauucaccccggaaauagcagaaagacccaaaguaagaggucaagcagggaggaugaacuauuacuggaccuugcuaaaacccggagacacaauaauguuugaggcaaauggaaaucuaauagcgccaugguaugcuuucgcacuaaguagaggcuuugggucaggcaucaucaccucaaacgcaucgaugcaugagugugacacgaagugucaaacaccccagggagcuauaaacagcagucucccuuuccagaauauacacccagucacaauaggagagugcccaaaauacgucaggaguaccaaauugaggaugguuacaggacuaaggaacaucccauccauucaauccagaggucuauuuggagccauugccgguuucauugaagggggauggacuggaaugauagauggaugguaugguuaucaucaucagaaugaacagggaucaggcuaugcugcggaucaaaaaagcacacaaaaugccauuaacgggauuacaaacaaggugaacucuguuaucgagaaaaugaacacucaauucacagcuguggguaaagaauucaacaacuuagaaaaaaggauggaaaacuuaaacaaaaaaguugaugauggauuucuggacauuuggacauauaaugcagaauuguugguucuacuggaaaaugaaaggacucuggauuuccaugacucaaaugugaagaaucuguaugaaaaaguaaaaaaccaauuaaggaauaaugccaaagaaauaggaaacggauguuuugaguucuaccacaaguguaacaaugaaugcauggaaaguguaaaaaauggaacuuaugauuauccaaaauauucagaagaaucaaaguugaacagggaaaaaauagauggagugaaauuggaaucaaugggggucuaucagauucuggcgaucuacucaacugucgccaguucacuggugcuucuggucucccugggggcaaucagcuucuggauguguucuaaugggucuuugcagugcagaauaugcaucuga

SEQ ID NO: 33615 - RNA, 1701 nt, Artificial Sequence
  derived and/or modified CDS sequence (wt) from hemagglutinin__InfluenzaA__ABO38065
augaaagcaaaacuacugguccuguuaugugcacuuucagcuacagaugcagacacaauauguauaggcuaccaugcgaacaacucaaccgacacuguugacacaguacucgaaaagaacgugacagugacacacucugucaaccuacuugaggacagucacaacggaaaacuaugcagacuaaaaggaauagccccacuacaauuggggaaaugcagcauugccggauggaucuuaggaaacccagaaugcgaaucacuguuuucuaagaaaucaugguccuacauugcagaaacaccaaacuccgagaauggaacauguuacccaggauauuucgccgacuaugaggaacugagggagcaauugaguucaguaucaucauucgagagauucgaaauauuccccaaggaaagaucauggcccaaacacaacauaaccagaggaguaacggcaucaugcucccauaaggggaaaagcaguuuuuacagaaacuugcuauggcugacggagaaaaauggcucguacccaaaucugagcaaguccuaugugaacaacaaagagaaagaaguccuuguacuaugggguguucaucacccgucuaacauagaggaccaaaagaccaucuaucggaaagaaaaugcuuaugucucuguagugucuucaaauuauaacaggagauucaccccagaaauagcaaaaagacccaaaguaagaggucaagaagggagaauuaacuacuacuggacucugcuggaacccggggacacaauaauauuugaggcaaauggaaaucuaauagcgccaugguaugcuuucgcacugaguagaggcuuugggucaggaaucaucaccucaaacgcaucgauggaugaaugugacacgaagugucaaacaccccagggagcuauaaacaguagucuuccuuuccagaauguacacccagucacaauaggagagugcccaaaauacgucaggaguacaaaauuaaggaugguuacaggacuaaggaacaucccauccauucaauccagaggucuguuuggagccauugccgguuucauugaagggggauggacuggaaugauagauggaugguaugguuaucaucaucagaaugaacagggaucuggcuaugcugcggaucaaaaaagcacacaaaaugccauuaacgggauuacaaacaaggugaacucuguuaucgagaaaaugaacacucaauucacagcuguggguaaagaauucaacaaauuagaaaaaaggauggaaaacuuaaauaaaaaaguugaugauggauuucuggacauuuggacauauaaugcagaauuguugguucuacuggaaaaugaaaggacuuuggauuuucaugacucaaaugugaagaaucuguaugagaaaguaaaaagccaauuaaagaauaaugccaaagaaauaggaaacggguguuuugaauucuaccacaaguguaacaaugaaugcauggaaaguguaaaaaauggaacuuaugacuauccaaaauauucagaggaaucaaaguuaaacagggaaaaaauugauggagugaaauuggaaucaaugggagucuaucagauucuggcgaucuacucaacugucgccaguucacuggugcuuuuggucucccugggggcaaucagcuucuggaugugcucuaaugggucuuugcagugcagaauaugcaucuga

SEQ ID NO: 33616 - RNA, 1701 nt, Artificial Sequence
  derived and/or modified CDS sequence (wt) from hemagglutinin__InfluenzaA__ABO38076
augaagacuaucauugcuuugagcuacauucuaugucugguuuucgcucaaaaacuucccggaaaugacaacagcacggcaacgcugugccuugggcaccaugcaguaccaaacggaacgauagugaaaacaaucacgaaugaccaaauugaaguuacuaaugcuacugagcugguucagaguuccucaacagguggaauaugcgacaguccucaucagauccuugauggagaaaacugcacacuaauagaugcucuauugggagacccucagugugauggcuuucaaaauaagaaaugggaccuuuuuguugaacgcagcaaagccuacagcaacuguuacccuuaugaugugccggauuaugccucccuuaggucacuaguugccucauccggcacacuggaguuuaacaaugaaagcuucaauuggacuggagucacucaaaauggaacaagcucugcuugcaaaaggagaucuaauaacaguuucuuuaguagauugaauugguugacccauuuaaaauucaaauacccagcauugaacgugacuaugccaaacaaugaaaaauuugacaaauuguacauuugggggguucaccacccggguacggacaaugaccaaaucagccuauaugcucaagcaucaggaagaaucacagucucuaccaaaagaagccaacaaacuguaaucccgaauaucggaucuagacccaggguaagggauauccccagcagaauaagcaucuauuggacaauaguaaaaccgggagacauacuuuugauuaacagcacagggaaucuaauugcuccucgggguuacuucaaaauacgaagugggaaaagcucaauaaugagaucagaugcacccauuggcaaaugcaauucugaaugcaucacuccaaauggaagcauucccaaugacaaaccauuucaaaauguaaacaggaucacauauggggccugucccagauauguuaagcaaaacacucugaaauuggcaacaggaaugcgaaauguaccagagaaacaaacuagaggcauauuuggcgcaaucgcggguuucauagaaaaugguugggagggaaugguggaugguugguacgguuucaggcaucaaaauucugagggaauaggacaagcagcagaucucaaaagcacucaagcagcaaucaaccaaaucaaugggaagcugaauagguugaucgggaaaaccaacgagaaauuccaucagauugaaaaagaauucucagaaguagaagggagaauucaggaccucgagaaauauguugaggacacuaaaauagaucucuggucauacaacgcggagcuucuuguugcccuggagaaccaacauacaauugaucuaacugacucagaaaugaacaaacuguuugaaagaacaaagaagcaacugagggaaaaugcugaggauaugggcaaugguuguuucaaaauauaccacaaaugugacaaugccugcauagggucaaucagaaauggaacuuaugaccaugauguauacagagaugaagcacuaaacaaccgguuccagaucaaagguguugagcugaagucaggauacaaagauuggauccuauggauuuccuuugccauaucauguuuuuugcuuuguguugcuuuguugggguucaucaugugggccugccaaaaaggcaacauuaggugcaacauuugcauuuga

SEQ ID NO: 33617 - RNA, 1701 nt, Artificial Sequence
  derived and/or modified CDS sequence (wt) from hemagglutinin__InfluenzaA__ABO38087
augaagacuaucauugcuuugagcuacauuuuaugucugguuuucgcucaaaaacuucccguaaaugacaacagcacggcaacgcugugccugggacaccaugcagugccaaacggaacgcuagugaaaacaaucacgaaugaccacauugaagugacuaaugcuacugagcugguucagaguuccucaacggguagaauaugcgacaguccucaccaaauccuugauggagaaaacugcacacuaauagaugcucuauugggagacccucauugugauggcuuccaaaauaaggaaugggaccuuuuuguugaacgcagcacagccuacagcaacuguuacccuuaugaugugccggauuaugccucccuuaggucacuaguugccucauccggcacacuggaguuuaacaaugaaagcuucaauuggacuggagucgcucagaauggaacaagcucugcuugcaaaaggagaucuauuaaaaguuucuuuaguagauugaauugguugcaccaauuaaaauacaaauauccagcacugaacgugacuaugccaaacaaugaaaaauuugacaaauuguacauuugggggguucaccacccgaguacggacagugaccaaaucagccuauaugcucaagcaucagggagagucacagucucuaccaaaagaagccaacaaacuguaaucccgaauaucggaucuagacccuggguaaggggugucuccagcagaauaagcaucuauuggacaauaguaaaaccgggagacauacuuuugauuaacagcacagggaaucuaauugcuccucgggguuacuuuaaaauacgaaguggaaaaagcucaauaaugaggucaaaugcacccauuggcaaaugcaauucugaaugcaucacuccaaauggaagcauucccaaugacaaaccauuucaaaauguaaacaggaucacauauggggccugucccagauauguuaagcaaaacacucugaaauuggcaacagggaugcggaauguaccagagaaacaaacuagaggcauauucggcgcaaucgcggguuucauagaaaaugguugggaggggaugguggacgguugguacgguuucaggcaucaaaauucugagggcacaggacaagcagcagaucuuaaaagcacucaagcagcaaucaaccaaaucaacgggaaacugaauagguuaaucgagaaaacaaacgagaaauuccaucaaauugaaaaagaauucucagaaguagaagggagaauucaggaccucgagaaauauguugaggacacuaaaauagaucucuggucguacaacgcggagcuucuuguugcccuggagaaccaacauacaauugaucuaacugacucagaaaugaacaaacuguuugaaagaacaaggaagcaacugagggaaaaugcugaggaugugggcaaugguuguuucaaaauauaccacaaaugugacaaugccugcauagggucaaucagaaauggaacuuaugaccaugauguauacagagacgaagcauuaaacaaccgguuccagaucaaagguguugagcugaagucaggauacaaagauuggauccuauggauuuccuuugccauaucauguuuuuugcuuuguguuguuuugcugggguucaucaugugggccugccaaaaaggcaacauuaggugcaacauuugcauuuga

SEQ ID NO: 33618 - RNA, 1689 nt, Artificial Sequence
  derived and/or modified CDS sequence (wt) from hemagglutinin__InfluenzaA__ABO38098
auggccaucauuuaucucauucuccuguucacagcagugagaggggaccagauaugcauuggauaccaugccaauaauuccacagagaaggucgacacaauucuagagcggaacgucacugugacucaugccaaggacauucuugagaagacccauaacggaaaguuaugcaaacuaaacggaaucccuccacuugaacuaggggacuguagcauugccggauggcuccuuggaaauccagaaugugauaggcuucuaagugugccagaaugguccuauauaauggagaaagaaaacccgagagacgguuuguguuauccaggcagcuucaaugauuaugaagaauugaaacaucuccucagcagcgugaaacauuucgagaaaguaaagauucugcccaaagauagauggacacagcauacaacaacuggagguucacgggccugcgcggugucugguaauccaucauucuucaggaacauggucuggcugacaaagaaaggaucaaauuauccgguugccaaaggaucguacaacaauacaagcggagaacaaaugcuaauaauuuggggggugcaccaucccaaugaugagacagaacaaagaacauuguaccagaaugugggaaccuauguuuccguaggcacaucaacauugaacaaaaggucaaccccagacauagcaacaaggccuaaagugaauggacaaggagguagaauggaauucucuuggacccuauuggauaugugggacaccauaaauuuugagaguacugguaaucuaauugcaccagaguauggauucaaaauaucgaaaagagguaguucagggaucaugaaaacagaaggaacacuugggaacugugagaccaaaugccaaacuccuuugggagcaauaaauacaacauugccuuuucacaauguccacccacugacaauaggugagugccccaaauauguaaaaucggagaaguuggucuuagcaacaggacuaaggaauguuccccagauugaaucaagaggauuguuuggggcaauagcugguuuuauagaaggaggauggcaaggaaugguugaugguugguauggauaccaucacagcaaugaccagggaucaggguaugcagcggacaaagaauccacucaaaaggcauuugauggaaucaccaacaagguaaauucugugauugaaaagaugaacacccaauuugaagcuguugggaaagaauucaguaacuuagagagaagacuggagaacuugaacaaaaagauggaagacggguuucuagauguguggacauacaaugcugagcuucuaguucugauggaaaaugagaggacacuugacuuucaugauucuaaugucaagaaucuguaugauaaagucagaaugcagcugagagacaacgucaaagaacuaggaaauggauguuuugaauuuuaucacaaaugugaugaugaaugcaugaauagugugaaaaacgggacguaugauuaucccaaguaugaagaagagucuaaacuaaauagaaaugaaaucaaagggguaaaauugagcagcauggggguuuaucaaauccuugccauuuaugcuacaguagcagguucucugucacuggcaaucaugauggcugggaucucuuucuggaugugcuccaacgggucucugcagugcaggaucugcauauga

SEQ ID NO: 33619 - RNA, 1701 nt, Artificial Sequence
  derived and/or modified CDS sequence (wt) from hemagglutinin__InfluenzaA__ABO38230
augaagacuaucauugcuuugagcuacauuuucugucagguuuucgcccaaaaccuuccaggaaaugacaacagcacagcaacgcugugccugggacaucaugcagugccaaacggaacgcuagugaaaacaaucacgaaugaucagauugaagugacuaaugcuacugagcugguucagaguuccucaacagguagaauaugcgacaauccucaucgaauccuugauggaaaaaacugcacacugauagaugcucuauugggggacccucauugugauggcuuucaaaaugagaaaugggaccuuuuuguugaacgcagcaaagcuuucagcaacuguuacccuuaugaugugccagauuaugccucccuuaggucacuaguugccucgucaggcacccuggaguuuuucaaugaaggcuucaauuggacuggggucacucagaaugggggaagcuaugcuuguaaaaggggaccugauaacaguuucuucaguagacugaacugguuguacaaaucagaaagcacauauccagugcugaacgugacuaugccaaacaaugacaauuuugacaaacuguacauuuggggaguucaccacccgagcacggacaaagaacaaaccaaccuauauguucaagcaucagggagagucacagucuccaccaagagaagccagcaaacuauaaucccgagugucgggucuagacccuggguaaggggucugucuaguagaauaagcaucuauuggacaauagugaaaccgggagacguacuguuaauuaauaguaaugggaaccuaauugcuccucgggguuacuucaaaauacgcacugggaaaagcucaauaaugaggucagaugcacccauuggcaccugcaguucugaaugcaucacuccaaauggaagcauucccaaugacaagcccuuucaaaacguagacaagaucacauauggggcaugucccaaguauguuaagcaaaacacucugaaguuggcaacagggaugcggaauguaccagagaaacaaacuagaggcauauucggcgcaauagcagguuucauagaaaaugguugggagggaaugauagacgguugguacgguuucaggcaucaaaauucugagggcacaggacaagcagcagaucuuaaaagcacucaagcagccaucgaccaaaucaaugggaaacugaauaggguaaucgagaaaacaaacgagaaauuccaucaaaucgaaaaggaauucucagaaguagaagggagaauucaggaccucgagaaauacguugaagacacuaaaauagaucucuggucuuacaaugcggagcuucuugucgcucuggagaaccaacauacaauugaucugacugacucggaaaugaacaaacuguuugaaaaaacaaggaggcaacugagggaaaaugcugaggacaugggcaaugguugcuucaaaauauaccacaaaugugacaaugcuugcauagggucaaucagaaauggaacuuaugaccaugauguauacagagacgaagcauuaaacaaccgguuucagaucaaagguguugagcugaagucaggauacaaagacuggauccuguggauuuccuuugccauaucaugcuuuuugcuuuguguuguuuugcugggguucaucaugugggccugccaaaaaggcaacauuaggugcaacauuugcauuuga

SEQ ID NO: 33620 - RNA, 1701 nt, Artificial Sequence
  derived and/or modified CDS sequence (wt) from hemagglutinin__InfluenzaA__ABO38241
augaagacuaucauugcuuugagcuacauuuccugucugguuuucgcccaaaaacuucccggaaaugacaacagcacagcaacgcugugccugggacaucaugcaguaccaaacggaacgcuagugaaaacaaucacgaaugaucagauugaagugacuaaugcuacugagcugguccaaaguuccucaacagguagaauaugcgacaguccucaccgaauccuugauggaaaaaacugcacacugauagaugcucuauugggagacccucauugugauggcuuccaaaaugagaaaugggaucuuuuuguugaacgcagcaaagcuuucagcaacugcuacccuuaugaugugccggauuaugccucccuuaggucacuaguugccucaucaggcacccuggaguuuaucaaugaaggcuucaauuggacuggagucacucagagugggggaagcuauacuugcaaaaggggaucuguuaacaguuucuucaguagauugaauugguuguaugagucagaaagcaaauauccagcgcugaacgugacuaugccaaacaauggcaaauuugacaaauuguacauuugggggguucaccacccuagcacggacaaagaacaaaccaaccuauauguucgagcaucagggagagucacagucucuaccaagaggagccagcaaacuguaaucccgaauaucgggccuagacccuggguaaggggucugucuaguagaauaaguaucuauuggacaauaguaaaaccgggagacauacuguuaauuaauagcacugggaaccuaauugcuccccgggguuacuucaaaauacgcacugggaaaagcucaauaaugaggucagaugcaccuauuggcaccugcaguucuggaugcaucacuccaaauggaagcauucccaaugacaaacccuuucaaaaugugaacaagaucacauauggggcaugucccagguauguuaagcagaacacucugaaguuggcaacagggaugcggaauguaccugaaaaacaaacuagaggcauauucggcgcaauagcagguuucauagaaaaugguugggagggaaugguagacgguugguacgguuucaggcaucaaaauucugagggcacaggacaagcagcagaucuuaaaagcacucaagcagcaaucgaccaaaucaacgggaaacugaauagguuaaucgagaaaacgaacgagaaauuccaucaaaucgaaaaggaauucucagaaguagaagggagaauucaggaccucgagaaguauguugaagacacuaaaauagaucucuggucuuacaacgcggagcuucuuguugcccuggagaaccaacauacaauugauaugacugacucagaaaugaacaaacuguuugaaaaaacaaggaagcaacugagggaaaaugcugaggacaugggcaaugguugcuucaaaauauaccacaaaugugacaaugcuugcauagggucaaucagaaauggaacuuaugaccaugauguauacagagacgaagcauuaaacaaccgguuucagaucaaagguguugagcugaagucaggauacaaagacuggauccuauggauuuccuuugccauaucaugcuuuuugcucuguguuguuuugcugggguucauaaugugggccugccaaaaaggcaacauuaggugcaacauuugcauuuga

SEQ ID NO: 33621 - RNA, 1701 nt, Artificial Sequence
  derived and/or modified CDS sequence (wt) from hemagglutinin__InfluenzaA__ABO38252
augaagacuaucauugcuuugagcuacauucuaugucugguuuucgcucaaaaacuucccggaaaugacaacagcacggcaacgcugugccuugggcaccaugcaguaccaaacggaacgauagugaaaacaaucacgaaugaccaaauugaaguuacuaaugcuacugagcugguucagaguuccucaacagguggaauaugcgacaguccucaucagauccuugauggagaaaacugcacacuaauagaugcucuauugggagacccucagugugauggcuuccaaaauaagaaaugggaccuuuuuguugaacgcagcaaagccuacagcaacuguuacccuuaugaugugccggauuaugccucccuuaggucacuaguugccucauccggcacacuggaguuuaacaaugaaagcuucaauuggacuggagucacucaaaauggaacaagcucugcuugcaaaaggagaucuaauaacaguuucuuuaguagauugaauugguugacccauuuaaaauucaaauacccagcauugaacgugacuaugccaaacaaugaaaaauuugacaaauuguacauuugggggguucaccacccggguacgaacaaugaccaaaucagccuauaugcucaagcaucaggaagaaucacagucucuaccaaaagaagccaacaaacuguaaucccgaauaucggaucuagacccaggguaagggauauccccagcagaauaagcaucuauuggacaauaguaaaaccgggagacauacuuuugauuaacagcacagggaaucuaauugcuccucgggguuacuucaaaauacgaagugggaaaagcucaauaaugagaucagaugcacccauuggcaaaugcaauucugaaugcaucacuccaaauggaagcauucccaaugacaaaccauuucaaaauguaaacaggaucacauauggggccugucccagauauguuaagcaaaacacucugaaauuggcaacagggaugcgaaauguaccagagaaacaaacuagaggcauauuuggcgcaaucgcggguuucauagaaaaugguugggagggaaugguggaugguugguacgguuucaggcaucaaaauucugagggaauaggacaagcagcagaucucaaaagcacucaagcagcaaucaaccaaaucaaugggaagcugaauagguugaucgggaaaaccaacgagaaauuccaucagauugaaaaagaauucucagaaguagaagggagaauucaggaccucgagaaauauguugaggacacuaaaauagaucucuggucauacaacgcggagcuucuuguugcccuggagaaccaacauacaauugaucuaacugacucagaaaugaacaaacuguuugaaagaacaaagaagcaacugagggaaaaugcugaggauaugggcaaugguuguuucaaaauauaccacaaaugugacaaugccugcauagggucaaucagaaauggaacuuaugaccaugauguauacagagaugaagcauuaaacaaccgguuccagaucaaagguguugagcugaagucaggauacaaagauuggauccuauggauuuccuuugccauaucauguuuuuugcuuuguguugcuuuguugggguucaucaugugggccugucaaaaaggcaacauuaggugcaacauuugcauuuga

SEQ ID NO: 33622 - RNA, 1689 nt, Artificial Sequence
  derived and/or modified CDS sequence (wt) from hemagglutinin__InfluenzaA__ABO38296
auggucaucauuuaucucauucuccuguucacagcagugagaggggaccagauaugcauuggauaccaugccaauaauuccacagagaaggucgacacaauucuagagcggaacgucacugugacucaugccaaggacauucuugagaagacccauaacggaaaguuaugcaaacuaaacggaaucccuccacuugaacuaggggacuguagcauugccggauggcuccuuggaaauccagaaugugauaggcuucuaagugugccagaaugguccuauauaauggagaaagaaaacccgagagacgguuuguguuauccaggcagcuucaaugauuaugaagaauugaaacauuuccucagcagcgugaaacauuucgagaaaguaaagauucugcccaaagauagauggacacagcauacaacaacuggagguucacgggccugcgcggugucugguaauccaucauucuucaggaacauggucuggcugacaaagaaaggaucaaauuauccgguugccaaaggaucguacaacaauacaagcggagaacaaaugcuaauaauuuggggggugcaccaucccaaugaugagacagaacaaagaacauuguaccagaaugugggaaccuauguuuccguaggcacaucaacauugaacaaaaggucaaccccagacauagcaacaaggccuaaagugaauggacuaggagguagaauggaauucucuuggacccuauuggauaugugggacaccauaaauuuugagaguacugguaaucuaauugcaccagaguauggauucaaaauaucgaaaagagguaguucagggaucaugaaaacagaaggaacacuugggaacugugagaccaaaugccaaacuccuuugggagcaauaaauacaacauugccuuuucacaauguccacccacugacaauaggugagugccccaaauauguaaaaucggagaaguuggucuuagcaacaggacuaaggaauguuccccagauugaaucaagaggauuguuuggggcaauagcugguuuuauagaaggaggauggcaaggaaugguugaugguugguauggauaccaucacagcaaugaccagggaucaggguaugcagcagacaaagaauccacucaaaaggcauuugauggaaucaccaacaagguaaauucugugauugaaaagaugaacacccaauuugaagcuguugggaaagaauucaguaacuuagagagaagacuggaaaacuugaacaaaaagauggaagacggguuucuagauguguggacauacaaugcugagcuucuaguucugauggaaaaugagaggacacuugacuuucaugauucuaaugucaagaaucuguaugauaaagucagaaugcagcuaagagacaacgccaaagaacuaggaaauggauguuuugaauuuuaucacaaaugugaugaugaaugcaugaauagugugaaaaacgggacguauuauuaucccaaguaugaagaagagucuaaacuaaauagaaaugaaaucaaagggguaaaauugagcagcauggggguuuaucaaauccuugccauuuaugcuacaguagcagguucucugucacuggcaaucaugauggcugggaucucuuucuggaugugcuccaacgggucucugcagugcaggaucugcauauga

SEQ ID NO: 33623 - RNA, 1698 nt, Artificial Sequence
  derived and/or modified CDS sequence (wt) from hemagglutinin__InfluenzaA__ABO38318
augaaagcaaaacuacugguccuguuauguacauuuacagcuacauacgcagacacaauauguauaggcuaccaugccaacaacucaaccgacacuguugacacaguacuugagaagaaugugacagugacacacucugucaaccuacuugaggacagucacaauggaaaacuaugucuacuaaaaggaauagccccacuacaauuggguaauugcagcguugccggauggaucuuaggaaacccagaaugcgaauuacugauuuccaaggaaucaugguccuacauuguagaaacaccaaaucccgagaauggaacauguuacccaggguauuucgccgacuaugaggaacugagggagcaauugaguucaguaucuucauuugagagauucgaaauauuccccaaaggaagcucauggcccaaccacaccgugaccggaguaucagcaucaugcucccauaaugggaaaagcaguuuuuacagaaauuuacuauggcugacggggaagaaugguuuguacccaaaccugagcauguccuauguaaacaacaaagagaaagaaguccuugugcuaugggguguucaucacccaccuaacauagggaaccaaagggcccucuaccauacagaaaaugcuuaugucucuguagugucuucacauuauagcagaagauucaccccagaaauagccaaaagacccaaaguaagagaucaggaaggaagaaucaacuacuacuggacucugcuggaacccggggacacaauaauauuugaggcaaauggaaaucuaauagcgccaugguaugcuuucgcacugaguagaggcuuuggaucaggaaucaucaccucaaaugcaccaaugggugaaugugaugcgaagugucaaacaccucagggagcuauaaacaguagucuuccuuuccagaauguacacccaguuacaauaggagaguguccaaaguaugucaggagugcaaaauuaaggaugguuacaggacuaaggaacaucccauccauucaauccagagguuuguuuggagccauugccgguuucauugaagggggguggacuggaaugguagaugggugguaugguuaucaucaucagaaugagcaaggaucuggcuaugcugcagaucaaaaaagcacacaaaaugccauuaacgggauuacaaacaaggugaauucuguaauugagaaaaugaacacucaauucacagcugugggcaaagaauucaacaaauuagaaagaaggauggaaaacuuaaauaaaaaaguugaugauggguuucuagacauuuggacauauaaugcagaauuguugguucuacuggaaaaugaaaggacuuuggauuuccaugacuccaaugugaagaaucuguaugagaaaguaaaaagccaauuaaagaauaaugccaaagaaauaggaaacggguguuuugaauucuaucacaaguguaacaaugaaugcauggaaagugugaaaaauggaacuuaugacuauccaaaauauuccgaagaaucaaaguuaaacagggagaaaauugauggaguaaaauuggaaucaaugggagucuaucagauucuggcgaucuacucaacugucgccaguucccugguucuuuuggucucccugggggcaaucagcuucuggauguguuccaaugggucuuugcaguguagaauaugcaucuga

SEQ ID NO: 33624 - RNA, 1698 nt, Artificial Sequence; identical to SEQ ID NO: 32812
  derived and/or modified CDS sequence (wt) from hemagglutinin__InfluenzaA__ABO38329

SEQ ID NO: 33625 - RNA, 1701 nt, Artificial Sequence
  derived and/or modified CDS sequence (wt) from hemagglutinin__InfluenzaA__ABO38351
augaaggcaagacuacugguccuguuaugugcacuugcagcuacagaugcagacacaauauguauaggcuaccaugcgaacaauucaaccgacacuguugacacaguacucgagaagaaugugacagugacacacucuguuaaccugcucgaagacagccacaacgggaaauuauguagauuaaaaggaauagccccacuacaauuggggaaauguaacaucgccggauggcucuugggaaacccagaaugcgacccacugcuuccagcgagaucaugguccuacauuguagaaacaccaaacucugagaauggaauauguuauccaggagcuuucaucgacuaugaggaacugagggagcaauugagcucagugucaucauucgaaagauucgaaauauuucccaaagaaagcucauggcccaaccacaacacaaacauaggaguaacggcagcaugcucccaugcggggaaaagcaguuuuuacagaaauuugcuauggcugacgaagaaggggggcucauacccaaagcugaaaaauuccuaugugaacaaaaaagggaaagaaguccuuguacuaugggguauucaucacccgucuaacaguaaggaucaacagacucucuaucagaaugaaaaugcuuaugucucuguagugucuucaaauuauaacaggagauucaccccggaaauagcagaaagacccgaaguaagagaucaagcugggaggaugaacuauuacuggaccuugcuagaacccggagacacaauaauguuugaggcaaauggaaaucugguagcaccaugguaugcuuucgcacugaguagaggcuuuggguccggcaucaucaccucaaacgcaucaaugcaugaguguaacacgaagugucaaacaccccagggagcuauaaacagcagucucccuuuccagaauauacacccagucacaauaggagagugcccaaaauacgucaggagugccaaauugaggaugguuacaggacuaaggaacaucccguccauucaauccagaggucuauuuggagccauugccgguuuuauugaagggggauggacuggaaugauagauggaugguaugguuaucaucaucagaaugaacagggaucaggcuaugcagcggaucaaaaaagcacacaaaaugccauuaacgggauuacaaacaaggugaacucuguuaucgagaaaaugaacacucaauucacagcuguggguaaagaauucaacaacuuagaaaaaaggauggaaaauuuaaauaaaaaaguugaugauggauuucuggacauuuggacauauaaugcagaauuguuaguucuacuggaaaaugaaaggacucuggauuuccaugacucaaaugugaagaaucuguaugagaaaguaaaaagccaauuaaagaauaaugccaaagaaaucggaaauggauguuuugaguucuaccacaagugugacaaugaaugcauggaaaguguaagaaaugggacuuaugauuaucccaaauauucagaagagucaaaauugaacagggaaaagauagauggagugaaauuggaaucaaugggggucuaucagauucuggcgaucuacucaacugucgccaguucacuggugcuuuuggucucccugggggcaaucaguuucuggauguguucuaauggaucuuugcagugcagaauaugcaucuga

SEQ ID NO: 33626 - RNA, 1701 nt, Artificial Sequence
  derived and/or modified CDS sequence (wt) from hemagglutinin__InfluenzaA__ABO38362
augaaagcaaaacuacugguccuguuaugugcacuuucagcuacagaugcagacacaauauguauaggcuaccaugcgaacaacucaaccgacacuguugacacaguacucgaaaagaacgugacagugacacacucugucaaccuacuugaggacagucacaacggaaaacuaugcagacuaaaaggaauagccccacuacaauuggggaaaugcagcauugccggauggaucuuaggaaacccagaaugcgaaucacugguuucuaagaaaucaugguccuacauugcagaaacaccaaacuccgagaauggaacauguuacccaggguauuucgccgacuaugaggaacugagggagcaauugaguucaguaucaucauucgagagauucgaaauauuccccaaggaaaguucauggcccaaacacaacguaaccagaggaguaacggcaucaugcucccauaaggggaaaagcaguuuuuacagaaauuugcuauggcugacggagaaaaauggcucguacccaaaucugagcaaguccuaugugaacaacaaagagaaagaaguccuuguacuaugggguguucaucacccgucuaacauagagaaccaaaagaccaucuaucguaaagaaaaugcuuaugucucuguagugucuucacauuauaacaggagauucaccccagaaauagcaaaaagacccaaaguaagagaucaagaagggagaauuaacuacuacuggacucugcuggaacccggggacacaauaauauuugaggcaaauggaaaucuaauagcgccaugguaugcuuucgcacugaguagaggcuuugggucaggaaucaucaccucaaacgcaucaauagaugaaugugacgcgaagugucaaacaccccagggagcuauaaacaguagucuuccuuuccagaauguacacccagucacaauaggagagugcccaaaguacgucaggaguacaaaauuaaggaugguuacaggacuaaggaacaucccauccauucaauccagagguuuguuuggagccauugccgguuucauugaagggggauggacuggaaugauagauggaugguaugguuaucaucaucagaaugaacagggaucuggcuaugcugcggaucaaaaaagcacacaaaaugccauuaacgggauuacaaacaaggugaacucuguaaucgagaaaaugaacacucaauucacagcuguggguaaagaauucaacaaauuagaaaaaaggauggaaaacuuaaauaaaaaaguugaugauggauuucuggacauuuggacauauaaugcagaauuguugguucuacuggaaaaugaaaggacuuuggauuuucaugacucaaaugugaagaaccuguaugagaaaguaaaaagccaauuaaagaauaaugccaaagaaauaggaaacggguguuuugaauucuaccacaaguguaacaaugaaugcauggaaaguguaaaaaauggaacuuaugacuauccaaaauauucagaggaaucaaaguuaaacagggaaaaaauugauggagugaaauuggaaucaaugggagucuaucagauucuggcgaucuacucaacugucgccaguucacuggugcuuuuggucucccugggggcaaucagcuucuggauguguucuaaugggucuuugcagugcagaauaugcaucuga

SEQ ID NO: 33627 - RNA, 1698 nt, Artificial Sequence
  derived and/or modified CDS sequence (wt) from hemagglutinin__InfluenzaA__ABO38373
augaaagcaagacuacugguccuguuaugugcacuugcagcuacagaugcagacacaauauguauaggcuaccaugcaaacaacucaaccgacacuguugacacaguacucgaaaagaaugugacagugacacacucugucaaccuacucgaagacagccacaacgggaaauuauguagauuaaaaggaauagccccacuacaauuggggaaauguaacauugccggauggaucuugggaaacccagaaugcgaaucacugcuuucagagagaucaugguccuacauuguagaaacaccaaacucugaaaauggaacauguuacccaggagauuucaucgacuaugaggaacugagggagcaauugagcucaguaucaucauucgaaagauucgaaauauucuccaaggaaagcucauggcccaaacacacaaccggaggaguaacggcagcaugcucccaugcgggaaaaaguaguuuuuacagaaauuugcuauggcugacggagaaggauggcucauacccgaaucugaacaauuccuaugugaacaagaaagggaaagaaguccuuguacuaugggguguucaucacccgucuaacauaaaggaucaacagacccucuaucagaaagaaaaugcuuaugucucuguagugucuucaaacuauaacaggagauucaccccggaaauagcagaaagacccaaaguaagaggucaagcagggaggauaaacuauuacuggaccuugcuaaaacccggagacacaauaauguuugaggcaaauggaaaucuaauagcgccaugguaugcuuucgcacuaaguagaggcuuugggucaggcaucaucaccucaaacgcaucgaugcaugagugugacacgaagugucaaacaccccagggagcuauaaacagcagucucccuuuccagaauauacacccagucacaauaggagagugcccaaaauacgucaggaguaccaaauugaggaugguuacaggacuaaggaacaucccauccauucaauccagaggucuauuuggagccauugccgguuucauugaagggggauggacuggaaugauagauggaugguaugguuaucaucaucagaaugaacagggaucaggcuaugcugcggaucaaaaaagcacacaaaaugccauuaacgggauuacaaacaaggugaacucuguuaucgagaaaaugaacacucaauucacagcuguggguaaagaauucaacaacuuagaaaaaaggauggaaaacuuaaacaaaaaaguugaugauggauuucuggacauuuggacauauaaugcagaauuguugguucuacuggaaaaugaaaggacucuggauuuccaugacucaaaugugaagaaucuguaugaaaaaguaaaaaaccaauuaaggaauaaugccaaagaaauaggaaacggauguuuugaguucuaccacaaguguaacaaugaaugcauggaaaguguaaaaaauggaacuuaugauuauccaaaauauucagaagaaucaaaguugaacagggaaaaaauagauggagugaaauuggaaucaaugggggucuaucagauucuggcgaucuacucaacugccgccaguucccuggugcuucuagucucccugggggcaaucagcuucuggauguguucuaaugggucuuugcagugcagaauaugcaucuga

SEQ ID NO: 33628 - RNA, 1701 nt, Artificial Sequence
  derived and/or modified CDS sequence (wt) from hemagglutinin__InfluenzaA__ABO38384
augaaggcaagacuacugguccuguuaugugcacuugcagcugcagaugcagacacaauauguauaggcuaccaugcgaacaauucaaccgacacuguugacacaguacucgagaagaaugugacagugacacacucuguuaaccugcucgaagacagccacaacgggaaacuauguagauuaaaaggaauacccccacuacaauuggggaaauguaacaucgccggauggcucuugggaaacccagaaugcgacucacugcuuccagcgagaucaugguccuacauuguagaaacaccaaacucugagaauggagcauguuauccaggagauuucaucaacuaugaggaacugagggagcaauugagcucagugucaucauuugaaagauucgaaauauuucccaaggaaagcucauggcccaaacacaacacaaccaaaggaguaacggcggcaugcucccaugcgggaaaaagcaguuuuuacagaaauuugcuauggcugacgaagaaggaggacucauacccaaagcugaaaaauuccuaugugaacaagaaagggaaagaaguccuuguacuaugggguguucaucacccgucuagcaguaaggagcaacagacucucuaucagaaugaaaaugcuuaugucucuguagugucuucaaauuauaacaggagauucaccccggaaauagcagaaagacccaaaguaagagaucaaacugggaggaugaacuauuacuggaccuugcuagaacccggagacacaauaauauuugaggcaaauggaaaucuaauagcaccaugguaugcuuucgcacugaguagaggcuuuggguccggcaucaucaccucaaacgcaucaaugcaugaguguaacacgaagugucaaacaccccagggagcuauaaacagcagucucccuuuccagaauauacacccagucacaauaggagagugcccaaaauacgucaggagugccaaauugaggaugguuacaggacuaaggaacaucccauccauucaauccagaggucuauuuggagccauugccggguuuauugaagggggauggacuggaaugauagauggaugguaugguuaucaucaucagaaugaacagggaucaggcuaugcagcagaucaaaaaagcacacaaaaugccauuaacgggauuacaaacaaggugaacucuguuaucgagaaaaugaacacucaauucacagcuguggguaaagaauucaacaacuuagaaaaaaggauggaaaauuuaaauaaaaaaguugaugauggauuucuggacauuuggacauauaaugcagaauuauuaguucuacuggaaaaugaaaggacucuggauuuccaugacucaaaugugaagaaucuguaugagaaaguaaaaagccaauuaaagaauaaugccaaagaaaucggaaauggauguuuugaguucuaccacaagugugacaaugaaugcauggaaaguguaagaaaugggacuuaugauuaucccaaauauucagaagagucaaaguugaacagggaaaagauagauggagugaaauuggaaucaaugggggucuaucagauucuggcgaucuacucaacugucgccaguucacuggugcuuuuggucucccugggggcaaucaguuucuggauguguucuaauggaucuuugcagugcagaauaugcaucuga

SEQ ID NO: 33629 - RNA, 1701 nt, Artificial Sequence
  derived and/or modified CDS sequence (wt) from hemagglutinin__InfluenzaA__ABO38395
augaaagcaaaacuacuaguccuguuaugugcauuuacagcuacagaugcagacaccauauguauaggcuaccaugcgaacaacucaaccgacacuguugacacaguacuugaaaagaacgugacagugacacacucugucaaccuacuugaggacagucacaacggaaaacuaugucgacuaaaaggaauagccccacuacaauuggguaauugcagcauugccggauggaucuuaggaaacccagaaugcgaaucacuguuuucuaagaaaucaugguccuacauugcagaaacaccaaacuccgagaauggaacauguuacccaggguauuucgccgacuaugaggaacugagggagcaauugaguucaguaucaucauucgagagauucgaaauauuccccaaagaaagcucauggcccaaccacaccguaaccaaaggaguaacggcaucaugcucccauaaggggagaagcaguuuuuacagaaauuugcuauggcugacgaagaagaauggcucguacccaaaucugagcaaguccuaugugaacaacaaagagaaagaaguccuuguacuaugggguguucaucacccgucuaacauaggggaccaaagggccaucuaucauacagaaaaugcuuaugucucuguagugucuucacauuauaacaggagauucaccccagaaauagcaaaaagacccaaaguaagagaucaagaaggaagaauuaacuacuacuggacucugcuggaacccggggacacaauaauauuugaggcaaauggaaaucuaauagcgccaugguaugcuuucgcacugaguagaggcuuugggucaggaaucaucaccucaaacgcaucaauggaugaaugugacgcgaagugucaaacaccccagggagcuauaaacaguagucuuccuuuccagaauguacacccagucacaauaggagagugcccaaaguaugucaggaguacaaaauuaaggaugguuacaggacuaaggaacaucccauccauucaauccagagguuuguuuggagccauugccgguuucauugaagggggguggacuggaaugauagauggaugguaugguuaucaucaucagaaugaacaaggaucuggcuaugcugcggaucaaaaaagcacacaaaaugccauuaacgggauuacaaacaaggugaauucuguaaucgagaaaaugaacacucaauucacagcugugggcaaagaauucaacaaauuagaaagaaggauggaaaacuuaaauaaaaaaguugaugauggauuucuggacauuuggacauauaaugcagaauuguugguucuacuggaaaaugaaaggacuuuggauuuucaugacucaaaugugaagaaucuguaugagaaaguaaaaagccaauuaaagaauaaugccaaagaaauaggaaacggguguuuugaauucuaccacaaguguaacaaugaaugcauggaaagugugaaaaauggaacuuaugacuauccaaaauauuccgaggaaucaaaauuaaacagggaaaaaauugauggagugaaauuggaaucaaugggagucuaucagauucuggcgaucuacucaacugucgccaguucacuggugcuuuuggucucccugggggcaaucagcuucuggauguguucuaaugggucuuugcaguguagaauaugcaucuga

SEQ ID NO: 33630 - RNA, 1701 nt, Artificial Sequence
  derived and/or modified CDS sequence (wt) from hemagglutinin__InfluenzaA__ABO38406
augaaagcaaaacuacugguccuguuaugugcacucucagcuacagaugcagacacaauauguauaggcuaccaugcgaacaacucaaccgacacuguugacacaguacucgaaaagaacgugacagugacacacucugucaaccuacuugaggacaaucacaacgggaaacuaugcaaacuaaaaggaauagcgccacuacaauuggggaaaugcagcauugccggauggaucuuaggaaacccagaaugcgaaucacuguuuucuaagaaaucaugguccuacauugcagaaacaccaaacuccgagaauggaacauguuacccaggguauuucgccgacuaugaagaacugagggaacaauugaguucaguaucaucauucgagagauucgaaauauuucccaaggaaaguucauggcccaaccacaacguaaccaaaggaguaacggcaucaugcucccauaaggggaaaagcaguuuuuacagaaauuugcuauggcugacggagaaaaaaggcucguacccaaaucugagcaaauccuaugugaacaacaaagagaaagaaguccuuguacuaugggguauucaucacccgucuaacauagaggaccaaaagaccaucuaucguaaagaaaaugcuuaugucucuguagugucuucacauuauaacaggagauucaccccagaaauagcaaaaagacccaaaguaagagaucaagaagggagaauuaacuacuacuggacucugcuggaacccggggacacaauaauauuugaggcaaauggaaaucuaauagcgccaugguaugcuuucgcacugaguaggggcuuugggucaggaaucaucaccucaaacgcaucgauggaugaaugugacgcgaagugucaaacaccccggggagcuauaaacaguagucuuccuuuucagaauguacacccagucacaauaggagagugcccaaaguacgucaggaguacaaaauuaaggaugguuacaggacuaaggaacaucccauccauucaauccagagguuuguuuggagcuauugccgguuucauugaagggggauggacuggaaugauugauggaugguaugguuaucaucaucagaaugaacagggaucuggcuaugcugcggaucaaaaaagcacacaaagugccauuaacgggauuacaaacaaggugaacucuauaaucgagaaaaugaacacucaauucacagcuguggguaaagaauucaacaaacuagaaaaaaggauggaaaacuuaaauaaaaaaguugaugauggauuucuggacauuuggacauauaaugcagaauuguugguucuacuggaaaaugaaaggacuuuggauuuccacgacucaaaugugaagaaccuguaugagaaaguaaaaagccaauuaaagaauaaugccaaagaaauaggaaacggguguuuugaauucuaccacaaguguaacaaugaaugcauggaaaguguaaaaaauggaacuuaugacuauccaaaauauucagaggaaucaaaauuaaacagggaaaaaauugauggagugaaauuggaaucaaugggagucuaucagauucuggcgaucuacucaacugucgccaguucacuggugcuuuuggucucccugggggcaaucagcuucuggauguguucuaaugggucuuugcagugcagaauaugcaucuga

SEQ ID NO: 33631 - RNA, 1701 nt, Artificial Sequence
  derived and/or modified CDS sequence (wt) from hemagglutinin__InfluenzaA__ABO38417
augaagacuaucauugcuuugagcuacauuuuaugucugguuuucgcucaaaaacuucccguaaaugacaacagcacggcaacgcugugccugggacaccaugcagugccaaacggaacgcuagugaaaacaaucacgaaugaccacauugaagugacuaaugcuacugagcugguucagaguuccccaacagguagaauaugcgacaguccucaccaaauccuugauggagaaaacugcacacuaauagaugcucuguugggagacccucauugugauggcuuccaaaauaaggaaugggaccuuuuuguugaacgcagcacagccuacagcaacuguuacccuuaugaugugccggauuaugccucccuuaggucacuaguugccucauccggcacacuggaguuuaacaaugaaagcuucaauuggacuggagucgcucagaauggaacaagcucugcuugcaaaaggagaucuauuaaaaguuucuuuaguagauugaauugguugcaccaauuaaaauacaaauauccagcacugaacgugacuaugccaaacaaugaaaaauuugacaaauuguacauuugggggguucaucacccgaguacggacagugaccaaaucagccuauaugcucaagcaucagggagagucacagucucuaccaaaagaagccaacaaacuguaaucccgaauaucggaucuagacccuggguaaggggugucuccagcagaauaagcaucuauuggacaauaguaaaaccgggagacauacuuuugauuaacagcacagggaaucuaauugcuccucgggguuacuucaaaauacgaagugggaaaagcucaauaaugaggucaaauacacccauuggcaaaugcaauucugaaugcaucacuccaaauggaagcauucccaaugacaaaccauuucaaaauguaaacaggaucacauauggggccugucccagauauguuaagcaaaacacucugaaauuggcaacagggaugcggaauguaccagagaaacaaacuagaggcauauucggcgcaauugcggguuucauagaaaaugguugggaaggaaugguggacgguugguacgguuucaggcaucaaaauucugagggcacaggacaagcagcagaucuuaaaagcacucaagcugcaaucaaccaaaucaacgggaaacugaauagguuaaucgagaaaacaaacgagaaauuccaucaaauugaaaaagaauucucagaaguagaagggagaauucaggaccucgagaaauauguugaggacacuaaaauagaucucuggucguacaacgcggagcuucuuguugcccuggagaaccaacauacaauugaucuaacugacucagaaaugaacaaacuguuugaaagaacaaggaagcaacugagggaaaaugcugaggauaugggcaaugguuguuucaaaauauaccacaaaugugacaaugccugcauagggucaaucagaaauggaacuuaugaccaugauguauacagagacgaagcauuaaacaaccgguuccagaucaaagguguugagcugaagucaggauacaaagauuggauccuauggauuuccuuugccauaucauguuuuuugcuuuguguuguuuugcugggguucaucaugugggccugccaaaaaggcaacauuaggugcaacauuugcauuuga

SEQ ID NO: 33632 - RNA, 1689 nt, Artificial Sequence
  derived and/or modified CDS sequence (wt) from hemagglutinin__InfluenzaA__ABO38712
auggccaucauuuauuucauacuccuguucacagcagugaggggggaccagauaugcauuggauaccaugccaauaauuccacagaaaaggucgacacaauucuagagcggaaugucacugugacucaugccaaggacauccuugagaagacccauaacggaaagcuaugcaaacuaaacggaaucccuccacuugaacuaggggauuguagcauugccggauggcuccuuggaaauccagaaugugauaggcuucuaagggugccagaaugguccuauauaauggagaaagaaaacccgagauacaguuuguguuauccaggcagcuucaaugacuaugaagaauugaaacaucuccucagcagcguaaaacacuucgagaaaguaaggauucugcccaaagauggauggacacaacauacaacaucuggagguucaaaggccugcgcagugucagguaaaucaucauucuucaggaacauggucuggcugacaaagaaaggaccaaauuauccgguugccaaaagaucguacaacaauacgagcggagagcaaaugcuaauaauuuggggagugcaccauccuaaagaugaggcagaacaaagagcauuguaccagaaagugggaaccuauguuuccgcaagcacaucaacauugaacaaaaggucaaccccagaaauagcagcaaggccugaagugaauggacuaggaaguagaauggaauucucuuggacccuauuggaugugugggacaccauaaauuuugagagcacugguaaucuaguugcaccagaguauggauucaaaauaucgaaaagagguaguucaggaaucaugaagacagaaggaacacuuggaaacugugagaccaaaugccaaacuccuuugggagcaauaaauacaacacuaccuuuucacaauguccacccacugacaauaggugaaugccccaaauauguaaaaucggagaaauuggucuuagcaacaggacuaaggaauguuccucagauugaaucaagaggauuguuuggggcaauagcuggcuuuauagaaggaggauggcaaggaaugguugaugguugguauggauaccaucacagcaaugaccagggaucaggguaugcagcagacaaagaauccacucaaaaggcauuugacagaaucaccaacaagguaaauucugugauugaaaagaugaacacucaauuugaagcuguugggaaagaauucaguaacuuagagaaaagacuggaaaacuugaacaaaaagauggaagacggguuucuagauguguggacauacaaugcugagcuucuaguucugauggaaaaugagaggacacuugacuuucaugauucuaaugucaagaaccuguauaauaaagucagaaugcagcugagagacaacgucaaagaacuaggaaauggauguuuugaauuuuaucacaaaugugacgaugaaugcaugaguagugugaaaaacgggacguaugauuaucccaaguaugaagaagaaucuaaacuaaagagaaaugaaaucaaagggguaaaauugagcagcauggggguuuaccaaauucuugccauuuaugcuacaguugcagguucucugucacuggcaaucaugauagcugggaucucuuuauggaugugcuccaacgggucucugcagugcagaaucugcauauga

SEQ ID NO: 33633 - RNA, 1689 nt, Artificial Sequence
  derived and/or modified CDS sequence (wt) from hemagglutinin__InfluenzaA__ABO38723
auggccaucauuuauuucauacuccuguucacagcagugaggggggaccagauaugcauuggauaccaugccaauaauuccacagaaaaggucgacacaauucuagagcggaaugucacugugacucaugccaaggacauccuugagaagacccauaacggaaagcuaugcaaacuaaacggaaucccuccacuugaacuaggggauuguagcauugccggauggcuccuuggaaauccagaaugugauaggcuucuaagggugccagaaugguccuauauaauggagaaagaaaacccgagauacaguuuguguuauccaggcagcuucaaugacuaugaagaauugaaacaucuccucagcagcguaaaacacuucgagaaaguaaggauucugcccaaagauggauggacacaacauacaacaucuggagguucaaaggccugcgcagugucagguaaaucaucauucuucaggaacauggucuggcugacaaagaaaggaccaaauuauccgguugccaaaagaucguacaacaauacgagcggagagcaaaugcuaauaauuuggggagugcaccauccuaaugaugaggcagaacaaagagcauuguaccagaaagugggaaccuauguuuccgcaagcacaucaacauugaacaaaaggucaaccccagaaauagcagcaaggccugaagugaauggacuaggaaguagaauggaauucucuuggacccuauuggaugugugggacaccauaaauuuugagagcacugguaaucuaguugcaccagaguauggauucaaaauaucgaaaagagguaguucaggaaucaugaagacagaaggaacacuuggaaacugugagaccaaaugccaaacuccuuugggagcaauaaauacaacacuaccuuuucacaauguccacccacugacaauaggugaaugccccaaauauguaaaaucggagaaauuggucuuagcaacaggacuaaggaauguuccucagauugaaucaagaggauuguuuggggcaauagcuggcuuuauagaaggaggauggcaaggaaugguugaugguugguauggauaccaucacagcaaugaccagggaucaggguaugcagcagacaaagaauccacucaaaaggcauuugacagaaucaccaacaagguaaauucugugauugaaaagaugaacacucaauuugaagcuguugggaaagaauucaguaacuuagagaaaagacugggaaacuugaacaaaaagauggaagacggguuucuagauguguggacauacaaugcugagcuucuaguucugauggaaaaugagaggacacuugacuuucaugauucuaaugucaagaaccuguauaauaaagucagaaugcagcugagagacaacgucaaagaacuaggaaauggauguuuugaauuuuaucacaaaugugacgaugaaugcaugaguagugugaaaaacgggacguaugauuaucccaaguaugaagaagaaucuaaacuaaagagaaaugaaaucaaagggguaaaauugagcagcauggggguuuaccaaauucuugccauuuaugcuacaguugcagguucucugucacuggcaaucaugauagcugggaucucuuuauggaugugcuccaacgggucucugcagugcagaaucugcauauga

SEQ ID NO: 33634 - RNA, 1698 nt, Artificial Sequence
  derived and/or modified CDS sequence (wt) from hemagglutinin__InfluenzaA__ABO44046
augaaaguaaaacuacugguccuguuauguacauuuacagcuacauaugcagacacaauauguauaggguaccaugccaacaacucaaccgacacuguugacacaguacuugagaagaaugugacagugacacacucugucaaccuacuugaggacagucacaauggaaaacuaugucuacuaaaaggaauagccccacuacaauuggguaauugcagcguugccggauggaucuuaggaaacccagaaugcgaauuacugauuuccaaggaaucaugguccuacauuguagaaacaccaaauccugagaauggaacauguuacccaggguauuucgccgacuaugaggaacugagggagcaauugaguucaguaucuucauuugagagauucgaaauauuccccaaagaaagcucauggcccaaccacaccguaaccggaguaucagcaucaugcucccauaaugggaaaagcaguuuuuacagaaauuugcuauggcugacggggaagaaugguuuguacccaaaccugagcaaguccuaugcaaacaacaaagagaaagaaguccuuguacuaugggguguucaucacccgccuaacauaggggaccaaagggcccucuaucauacagaaaaugcuuaugucucuguagugucuucacauuauagcagaagauucaccccagaaauagccaaaagacccaaaguaagagaucaggaaggaagaaucaacuacuacuggacucugcuggaacccggggauacaauaauauuugaggcaaauggaaaucuaauagcgccacgguaugcuuucgcacugaguagaggcuuuggaucaggaaucaucaccucaaaugcaccaauggaugaaugugaugcgaagugucaaacaccucagggagcuauaaacagcagucuuccuuuccagaacguacacccagucacaauaggagaguguccaaaguaugucaggagugcaaaauuaaggaugguuacaggacuaaggaacaucccauccauucaauccagagguuuguuuggagccauugccgguuucauugaagggggguggacuggaaugguagaugggugguaugguuaucaucaucagaaugagcaaggaucuggcuaugccgcagaucaaaaaagcacacaaaaugccauuaacgggauuacaaacaagaugaauucuguaauugagaaaaugaacacucaauucacagcugugggcaaagaauucaacaaauuggaaagaaggauggaaaacuuaaauaaaaaaguugaugauggguuucuagacauuuggacauauaaugcagaauuguugguucuacuggaaaaugaaaggacuuuggauuuccaugacuccaaugugaagaaucuguaugagaaaguaaaaagccaauuaaagaauaaugccaaagaaauaggaaacggguguuuugaauucuaucacaaguguaacaaugaaugcauggagagugugaaaaauggaacuuaugacuauccaaaauauuccgaagaaucaaaguuaaacagggagaaaauugauggagugaaauuggaaucaaugggagucuaucagauucuggcgaucuacucaacugucgccaguucccugguucuuuuggucucccugggggcaaucagcuucuggauguguuccaaugggucuuugcaguguagaauaugcaucuga

SEQ ID NO: 33635 - RNA, 1689 nt, Artificial Sequence
  derived and/or modified CDS sequence (wt) from hemagglutinin__InfluenzaA__ABO44057
auggccaucauuuaucucauacuccuguucacagcagugaggggggaccagauaugcauuggauaccaugccaauaauuccacagaaaaggucgacacaauucuagagcggaaugucacugugacucaugccaaggacauccuugagaagacccauaacggaaagcuaugcaaacuaaacggaaucccuccacuugaacuaggggauuguagcauugccggauggcuccuuggaaauccagaaugugauaggcuucuaagggugccagaaugguccuauauaauggagaaagaaaacccgagauacaguuuguguuauccaggcagcuucaaugacuaugaagaauugaaacaucuccuaaguagcguaaaacacuucgagaaaguaaagauucugccaaaagauggauggacacagcaugagacagauggagguucaaaggccugcgcagugucagguaaagcaucauucuucaggaacauggucuggcugacaaagagaggaccaaauuaucagguugccaaaagaucguacaacaauacgagcggagagcaaaugcuaauaauuuggggagugcaccauccuaaggaugaggcagaacaaagagcauuguaccagaaagugggaaccuauguuuccgcaagcacaucaacauugaacaaaaggucaaccccagaaauagcagcaaggccugaagugaauggacuagagaguagaauggaauucucuuggacccucuuggaugugugggacaccauaaauuuugagagcacugguaaucuaguugcaccagaguauggauucaaaauaucgaaaagagguaguucagggaucaugaagacagaaggaacacuugggaacugugagaccaaaugccaaacuccuuugggagcaauaaauacaacacuaccuuuucacaauguccacccacugacaauaggugaaugccccaaauauguaaaaucggagaaauuggucuuagcaacaggacuaaggaauguuccccagauugaaucaagaggauuguuuggggcaauagcuggcuuuauagaaggaggauggcaaggaaugguugaugguugguauggauaccaucacagcaaugaccagggaucaggguaugcagcagacaaagaauccacucaaaaggcauuugacagaaucaccaacaagguaaauucugugauugaaaagaugaacauccaauuugaagcuguugggaaagaauucaguaacuuagagaaaagacuggaaaacuugaacaaaaagauggaagacggguuucuagauguguggacauacaaugcugagcuucuaguucugauggaaaaugagaggacacuugacuuucaugauucuaaugucaagaaccuguaugauaaagucagaaugcagcugagagacaacgucaaagaacuaggaaauggauguuuugaauuuuaucauaaaugugacgaugaaugcaugaauagugugaaaaaugggacauaugauuaucccaaguaugaagaagaaucuaagcuaaagagaaaugaaaucaaagggguaaaauugagcagcauggggguuuaccaaauucuugccauuuaugcuacaguugcagguucucugucauuggcaaucaugauagcugggaucucuuucuggauguguuccaacgggucucugcagugcagagucugcauauga

SEQ ID NO: 33636 - RNA, 1701 nt, Artificial Sequence; identical to SEQ ID NO: 33540
  derived and/or modified CDS sequence (wt) from hemagglutinin__InfluenzaA__ABO44079

SEQ ID NO: 33637 - RNA, 1689 nt, Artificial Sequence
  derived and/or modified CDS sequence (wt) from hemagglutinin__InfluenzaA__ABO44090
auggccaucauuuaucucauucuccuguucacagcagugagaggggaccaaauaugcauuggauaccaugccaauaauuccacagagaaggucgacacaauucuagagcggaacgucacugugacucaugccaaggacauucuugagaagacccauaacggaaaguuaugcaaacuaaacggaaucccuccacuugaacuaggggacuguagcauugccggauggcuccuuggaaauccagaaugugauaggcuucuaagagugccagaaugguccuauauaauggagaaagaaaacccgagagacgguuuguguuauccaggcagcuucaaugauuaugaagaauugaaacaucuccucagcagcgugaaacauuucgagaaaguaaagauucugcccaaagauagauggacacagcauacaacaacuggagguucacgggccugcgcggugucugguaauccaucauucuucaggaacaugaucuggcugacaaagaaaggaucaaauuauccgguugccaaaggaucguacaacaacacaagcggagaacaaaugcuaauaauuugggggguacaccaucccaaugaugagacagaacaaagaacauuguaccagaaugugggaaccuauguuuccguagucacaucaacauugaacaaaaggucaaccccgaaaauagcaacaaggccuaaagugaauggacuaggagguagaauggaauucucuuggacccuauuggauaugugggacaccauaaauuuugagaguacugguaaucuaauugcuccagaguauggauucaaaauaucgaaaagaggcaguucagggaucaugaaaacagaaggaacacuugagaacugugagaccaaaugccaaacuccuuugggagcaauaaauacaacauugccuuuucacaauguccacccacugacaauaggugagugccccaaauauguaaaaucggagaaguuggucuuagcaacaggacuaaggaauguuccccagauugaaucaagaggauuguuuggggcaauagcuggcuuuauagaaggaggauggcaaggaaugguugaugguugguauggauaccaucacagcaaugaccagggaucaggguaugcagcagacaaagaauccacucaaagggcauuugauggaaucacuaacaagguaaauucugugauugaaaagaugaacacccaauuugaagcuguuggaaaagaauucaguaacuuagagagaagacuggagaacuugaacaaaaagauggaagacgggcuucuagauguguggacauacaaugcugagcuucuaguucugauggaaaaugagaggauacuugacuuucaugauucuaaugucaagaaucuguaugauaaagucagaaugcagcugagagacaacgucaaagaacuaggaaauggauguuuugaauuuuaucacaaaugugaugaugagugcaugaauagugugaaaaacgggacguaugauuaucccaaguaugaagaagagucuaaacuaaauagaaaugaaaucaaagggguaaaauuaagcagcauggggguuuaucaaauccuugccauuuaugcuacaguagcagguucucugucacuggcaaucaugauggcugggaucucuuucuggaugugcuccaacgggucccugcagugcaggaucugcauauga

SEQ ID NO: 33638 - RNA, 1689 nt, Artificial Sequence
  derived and/or modified CDS sequence (wt) from hemagglutinin__InfluenzaA__ABO44101
auggccaucauuuaucucauacuccuguucacagcagugaggggggaccagauaugcauuggauaccaugccaauaauuccacagaaaaggucgacacaauucuagagcggaaugucacugugacucaugccaaggacauccuugagaagacccauaacggaaagcuaugcaaacuaaacggaauuccuccacuugaacuaggggauuguagcauugccggauggcuccuuggaaauccagaaugugauaggcuucuaagggugccagaaugguccuauauaauggagaaagaaaacccgagauacaguuuguguuauccaggcagcuucaaugacuaugaagaauugaaacaucuccucaguagcguaaaacacuucgagaaaguaaagauucugccaaaagauggauggacacagcauaagacagauggagguucaaaggccugcgcagugucagguaaaccaucauucuucaggaacauggucuggcugacaaagaaaggaccuaauuauccgguugccaaaagaucguacaacaauacgagcggagagcaaaugcuaauaauuuggggagugcaccauccuaaugaugaggcagaacaaagagcauuguaccagaaagugggaaccuauguuuccgcaagcacaucaacauugaacaaaaggucaaccccagaaauagcagcaaggccugaagugaguggacuaggaaguagaauggaauucucuuggacccucuuggaugugugggacaccauaaguuuugagagcacugguaaucuaguugcaccagaguauggauucaaaauaucgaaaagagguaguucagggaucaugaagacagaaggaacacuugggaacugugagaccaaaugccaaacuccuuugggagcaauaaauacaacacuaccuuuucacaauguccacccacugacaauaggugaaugccccaaauauguaaaaucggagaaauuggucuuagcaacaggacuaaggaauguuccccagauugaaucaagaggauuguuuggggcaauagcuggcuuuauagaaggaggauggcaaggaaugguugaugguugguauggauaccaucacagcaaugaccagggaucaggguaugcagcagacaaagaauccacucaaaaggcauuugacagaaucaccaacaagguaaauucugugauugaaaagaugaacacccaauuugaagcuguugggaaagaauucaguaacuuagagaaaagacuggaaaacuugaacaaaaagauggaagacggguuucuagauguguggacauacaaugcugagcuucuaguucugauggaaaaugagaggacacuugacuuucaugauucuaaugucaagaaccuguaugauaaagucagaaugcagcugagagacaacgucaaagaacuaggaaauggauguuuugaauuuuaucauaaaugugacgaugaaugcaugaauagugugaaaaaugggacguaugauuaucccaaguaugaagaagaaucuaaacuaaagagaaaugaaaucaaaggggugaaauugagcagcauggggguuuaccaaauucuugccauuuaugcuacaguugcagguucucugucacuggcaaucaugauagcugggaucucuuucuggaugugcuccaacgggucucugcagugcagaaucugcauauga

SEQ ID NO: 33639 - RNA, 1701 nt, Artificial Sequence
  derived and/or modified CDS sequence (wt) from hemagglutinin__InfluenzaA__ABO44123
augaaagcaaaacuacuaguccuguuaugugcauuuacagcuacagaugcagacacaauauguauaggcuaccaugcgaacaacucaaccgacacuguugacacaguacuugaaaagaacgugacagugacacacucugucaaccuacuugaggacagucacaacggaaaacuaugucgacuaaaaggaauagccccacuacaauuggguaauugcagcauugccggauggauuuuaggaaacccagaaugcgaaucacuguuuucuaagaaaucaugguccuacauugcagaaacaccaaacuccgagaauggaacauguuacccaggguauuucgccgacuaugaggaacugagggagcaauugaguucaguaucaucauucgagagauucgaaauauuccccaaagaaagcucauggcccaaccacaccguaaccaaaggaguaacggcaucaugcucccauaaggggaaaagcaguuuuuacagaaauuugcuauggcugacgaagaagaauggcucguacccaaaucugagcaaguccuaugugaacaacaaagagaaagaaguccuuguacuaugggguguucaucacccgucuaacauaggggaccaaagggccaucuaucauacagaaaaugcuuaugucucuguagugucuucacauuauaacaggagauucaccccagaaauagcaaaaagacccaaaguaagagaucaagaaggaagaauuaacuacuacuggacucugcuggaacccggggacacaauaauauuugaggcaaauggaaaucuaauagcgccaugguaugcuuucgcacugaguagaggcuuugggucaggaaucaucaccucaaacgcaucaauggaugaaugugacgcgaagugucaaacaccccagggagcuauaaacaguagucuuccuuuccagaauguacacccagucacaauaggagagugcccaaaguaugucaggaguacaaaauuaagaaugguuacaggacuaaggaacaucccauccauucaauccagagguuuguuuggagccauugccgguuucauugaagggggguggacuggaaugauagauggaugguaugguuaucaucaucagaaugaacaaggaucuggcuaugcugcggaucaaaaaagcacacaaaaugccauuaacgggauuacaaacaaggugaauucuguaaucgagaaaaugaacacucaauucacagcugugggcaaagaauucaacaaauuagaaagaaggauggaaaacuuaaauaaaaaaguugaugauggauuucuggacauuuggacauauaaugcagaauuguugguucuacuggaaaaugaaaggacuuuggauuuucaugacucaaaugugaagaaucuguaugagaaaguaaaaagccaauuaaagaacaaugccaaagaaauaggaaacggguguuuugaauucuaccacaaguguaacaaugaaugcauggaaagugugaaaaauggaacuuaugacuauccaaaauauuccgaggaaucaaaguuaaacagggaaaaaauugauggagugaaauuggaaucaaugggagucuaucagauucuggcgaucuacucaacugucgccaguucacuggugcuuuuggucucccugggggcaaucagcuucuggauguguucuaaugggucuuugcaguguagaauaugcaucuga

SEQ ID NO: 33640 - RNA, 1701 nt, Artificial Sequence
  derived and/or modified CDS sequence (wt) from hemagglutinin__InfluenzaA__ABO44134
augaaagcaaaacuacugguccuguuaugugcacuuucagcuacagaugcagacacaauauguauaggcuaccaugcgaacaacucaaccgacacuguugacacaguacucgaaaagaacgugacagugacacacucugucaaccuacucgaggacagucacaacggaaaacuaugcagacuaaaaggaauagccccacuacaauuggggaaaugcagcauugccggauggaucuuaggaaacccagaaugcgaaucacuguuuucuaagaaaucaugguccuacauugcagaaacaccaaacuccgagaauggaacauguuacccaggauauuucgccgacuaugaggaacugagggagcaauugagcucaguaucaucauucgagagauucgaaauauuccccaaggaaaggucauggcccaaacacaacguaaccagaggaguaacggcaucaugcucccauaaggggaaaagcaguuuuuacagaaauuugcuauggcugacggagaaaaauggcucguacccaaaucugagcaaguccuaugugaacaacaaagagaaagaaguccuuguacuaugggguguucaucacccgucuaacauagaggaccaaaagaccaucuaucggaaagaaaaugcuuaugucucuguagugucuucaaauuauaacaggagauucaccccagaaauagcagaaagacccaaaguaagaggucaagcagggagaauuaacuacuacuggacucugcuggaacccggggacacaauaauauuugaggcaaauggaaaucuaauagcgccauggcaugcuuucgcacugaguagaggcuuugggucaggaaucaucaccucaaacgcaucgauggaugaaugugacacgaagugucaaacaccccagggagcuauaaacaguagucuuccuuuccagaauauacacccagucacaauaggagagugcccaaaauacgucaggaguacaaaauugaggaugguuacaggacuaaggaacaucccauccauucaauccagaggucuguuuggagccauugccgguuucauugaagggggauggacuggaaugauagauggaugguaugguuaucaucaucagaaugaacagggaucuggcuaugcugcagaucaaaaaagcacacaaaaugccauuaacgggauuacaaacaaggugaacucuguuaucgagaaaaugaacacucaauucacagcuguggguaaagaauucaacaaauuagaaaaaaggauggaaaacuuaaauaaaaaaguugaugauggauuucuggacauuuggacauauaaugcagaauuguugguucuacuggaaaaugaaaggacuuuggauuuucaugacucaaaugugaagaaucuguaugagaaaguaaaaagccaauuaaagaauaaugccaaagaaauaggaaacggguguuuugaauucuaccacaaguguaacaaugaaugcauggaaaguguaaaaaauggaacuuaugacuauccaaaauauucagaggaaucaaaguuaaacagggaaaaaauugauggagugaaauuggaaucaaugggagucuaucaaauucuggcgaucuacucaacugucgccaguucacuggugcuuuuggucucccugggggcaaucagcuucuggauguguucuaaugggucuuugcagugcagaauaugcaucuga

SEQ ID NO: 33641 - RNA, 1701 nt, Artificial Sequence
  derived and/or modified CDS sequence (wt) from hemagglutinin__InfluenzaA__ABO52071
augaagacuaucauugcuuugagcuacauucuaugucugguuuucgcucaaaaacuucccggaaaugacaacagcacggcaacgcugugccuugggcaccaugcaguaccaaacggaacgauagugaaaacaaucacgaaugaccaaauugaaguuacuaaugcuacugagcugguucagaauuccucaacagguggaauaugcgacaguccucaucagauccuugauggagaaaacugcacacuaauagaugcucuauugggagacccucagugugauggcuuccaaaauaagaaaugggaccuuuuuguugaacgcagcaaagccuacagcaacuguuacccuuaugaugugccggauuaugccucccuuaggucacuaguugccucauccggcacacuggaguuuaacaaugaaagcuucaauuggacuggagucacucaaaauggaacaagcucugcuugcaaaaggagaucuaauaacaguuucuuuaguagauugaauugguugacccauuuaaaauucaaauacccagcauugaacgugacuaugccaaacaaugaaaaauuugacaaauuguacauuugggggguucaccacccgaguacggacaaugaccaaaucagccuauaugcucaagcaucaggaagaaucacagucucuaccaaaagaagccaacaaacuguaaucccgaauaucggaucuagacccaggguaagggauauccccagcagaauaagcaucuauuggacaauaguaaaaccgggagacauacuuuugauuaacagcacagggaaucuaauugcuccucgggguuacuucaaaauacgaagugggaaaagcucaauaaugagaucagaugcacccauuggcaaaugcaauucugaaugcaucacuccaaauggaagcauucccaaugacaaaccauuucaaaauguaaacaggaucacauauggggccugucccagauauguuaagcaaaacacucugaaauuggcaacagggaugcgaaauguaccagagaaacaaacuagaggcauauuuggcgcaaucgcggguuucauagaaaaugguugggagggaaugguggaugguugguacgguuucaggcaucaaaauucugagggaauaggacaagcagcagaucucaaaagcacucaagcagcaaucaaccaaaucaaugggaagcugaauagguugaucgggaaaaccaacgagaaauuccaucagauugaaaaagaauucucagaaguagaagggagaauucaggaccucgagaaauauguugaggacacuaaaauagaucucuggucauacaacgcggagcuucuuguugcccuggagaaccaacauacaauugaucuaacugacucagaaaugaacaaacuguuugaaagaacaaagaagcaacugagggaaaaugcugaggauaugggcaaugguuguuucaaaauauaccacaaaugugacaaugccugcauagggucaaucagaaauggaacuuaugaccaugauguauacagagaugaagcauuaaacaaccgguuccagaucaaagguguugagcugaagucaggauacaaagauuggauccuauggauuuccuuugccauaucauguuuuuugcuuuguguugcuuuguugggguucaucaugugggccugccaaaaaggcaacauuaggugcaacauuugcauuuga

SEQ ID NO: 33642 - RNA, 1701 nt, Artificial Sequence
  derived and/or modified CDS sequence (wt) from hemagglutinin__InfluenzaA__ABO52225
augaaagcaaaacuacuaguccuguugugugcauuuacagcuacauaugcagacacaauauguauaggcuaccaugcgaacaacucaaccgacacuguugacacaguacuugagaagaacgugacagugacacacucugucaaccuacuugaggacagucacaacggaaaacuaugccgacuaaaaggaacagccccacuacaauuggguaauugcagcguugccggauggaucuuaggaaacccagaaugcgaaucacuguuuucuaaggaaucaugguccuacauugcagaaacaccaaacccugagaauggaacauguuacccaggguauuucgccgacuaugaggaacugaaggagcaauugagcucaguaucaucauucgagagauucgaaauauuccccaaggaaagcucauggcccaaccacacaguaaccaaaggagugacggcaucaugcucccauaaugggaaaagcaguuuuuacaaaaauuugcuauggcugacggaaaagaauggcuuguacccaaaucugagcaaguccuauguaaacaacaaggagaaagaaguccuuguacuaugggguguucaucauccgucuaacauaggggaccaaagggccaucuaucauacagaaaaugcuuauguuucuguggugucuucacauuauagcagaagauucaccccagaaauagcaaaaagacccaaaguaagagaucaagaagggagaauuaacuacuacuggacucugcuggaacccggggacacaauaauauuugaggcaaauggaaaucuaauagcgccaugguacgcuuucgcauugaguagaggcuuugggucagggaucaucaccucaaacgcaucaaugggugaaugugacgcuaagugucaaacaccccaaggagcuauaaacaguagucuuccuuuccagaauguacacccagucacaauaggagagugucccaaguaugucaggaguacaaaauuaaggaugguuacaggacuaagaaacaucccauccauucaaucuagagguuuguuuggagccauugccgguuucauugaagggggguggacuggaaugauagauggaugguaugguuaucaucaucagaaugaacaaggaucuggcuaugcugcagacaaaaaaagcacacaaaaugccauugaugggauuacaaacaaggugaauucuguaaucgagaaaaugaacacucaauucacagcuguaggcaaagaauucaacaaauuagagagaaggauggaaaacuuaaauaagaaaguugaugauggauuucuggacauuuggacauauaaugcagaguuguugguucuccuggaaaaugaaaggacuuuggauuuucaugacucaaaugugaagaaucuguaugagaaaguaaaaaaccaauugaagaauaaugccaaagaaaucgggaacggguguuuugaauucuaucacaaguguaacgaugaaugcauggaaagugugaaaaauggaacuuaugacuauccaaaauauuccgaagaaucaaaguuaaaaagggaaaaaauugauggagugaaauuggaaucaaugggagucuaucagauucuggcgaucuacucaacugucgccaguucacuggugcuuuuggucucccugggggcaaucaguuucuggauguguucuaaugggucuuugcaguguagaauaugcaucuga

SEQ ID NO: 33643 - RNA, 1689 nt, Artificial Sequence
  derived and/or modified CDS sequence (wt) from hemagglutinin__InfluenzaA__ABO52236
auggccaucauuuaucucauucuccuguucacagcagugagaggggaccagauaugcauuggauaccaugccaauaauuccacagagaaggucgacacaauucuagagcggaacgucacugugacucaugccaaggacauucuugagaagacccauaacggaaaguuaugcaaacuaaacggaaucccuccacuugaacuaggggacuguagcauugccggauggcuccuuggaaauccagaaugugauaggcuucuaagugugccagaaugguccuauauaauggagaaagaaaacccgagagacgguuuguguuauccaggcagcuucaaugauuaugaagaauugaaacauuuccucagcagcgugaaacauuucgagaaaguaaagauucugcccaaagauagauggacacagcauacaacaacuggagguucacgggccugcgcggugucugguaauccaucauucuucaggaacauggucuggcugacaaagaaaggaucaaauuauccgguugccaaaggaucguacaacaauacaagcggagaacaaaugcuaauaauuuggggggugcaccaucccaaugaugagacagaacaaagaacauuguaccagaaugugggaaccuauguuuccguaggcacaucaacauugaacaaaaggucaaccccagacauagcaacaaggccuaaagugaauggacuaggagguagaauggaauucucuuggacccuauuggauaugugggacaccauaaauuuugagaguacugguaaucuaauugcaccagaguauggauucaaaauaucgaaaagagguaguucagggaucaugaaaacagaaggaacacuugggaacugugagaccaaaugccaaacuccuuugggagcaauaaauacaacauugccuuuucacaauguccacccacugacaauaggugagugccccaaauauguaaaaucggagaaguuggucuuagcaacaggacuaaggaauguuccccagauugaaucaagaggauuguuuggggcaauagcugguuuuauagaaggaggauggcaaggaaugguugaugguugguauggauaccaucacagcaaugaccagggaucaggguaugcagcagacaaagaauccacucaaaaggcauuugauggaaucaccaacaagguaaauucugugauugaaaagaugaacacccaauuugaagcuguugggaaagaauucaguaacuuagagagaagacuggaaaacuugaacaaaaagauggaagacggguuucuagauguguggacauacaaugcugagcuucuaguucugauggaaaaugagaggacacuugacuuucaugauucuaaugucaagaaucuguaugauaaagucagaaugcagcuaagagacaacgccaaagaacuaggaaauggauguuuugaauuuuaucacaaaugugaugaugaaugcaugaauagugugaaaaacgggacguauuauuaucccaaguaugaagaagagucuaaacuaaauagaaaugaaaucaaagggguaaaauugagcagcauggggguuuaucaaauccuugccauuuaugcuacaguagcagguucucugucacuggcaaucaugauggcugggaucucuuucuggaugugcuccaacgggucucugcagugcaggaucugcauauga

SEQ ID NO: 33644 - RNA, 1689 nt, Artificial Sequence
  derived and/or modified CDS sequence (wt) from hemagglutinin__InfluenzaA__ABO52247
auggccaucauuuaucucauacuccuguucacagcagugaggggggaccagauaugcauuggauaccaugccaauaauuccacagaaaaggucgacacaauucuagagcggaaugucacugugacucaugccaaggacauccuugagaagacccauaacggaaagcuaugcaaacuaaacggaauuccuccacuugaacuaggggauuguagcauugccggauggcuccuuggaaauccagaaugugauaggcuucuaagggugccagaaugguccuauauaauggagaaagaaaacccgagauacaguuuguguuauccaggcagcuucaaugacuaugaagaauugaaacaucuccucaguagcguaaaacacuucgagaaaguaaagauucugccaaaagauggauggacacagcauaagacagauggagguucaaaggccugcgcagugucagguaaaccaucauucuucaggaacauggucuggcugacaaagaaaggaccuaauuauccgguugccaaaagaucguacaacaauacgagcggagagcaaaugcuaauaauuuggggagugcaccauccuaaugaugaggcagaacaaagagcauuguaccagaaagugggaaccuauguuuccgcaagcacaucaacauugaacaaaaggucaaccccagaaauagcagcaaggccugaagugaguggacuaggaaguagaauggaauucucuuggacccucuuggaugugugggacaccauaaguuuugagagcacugguaaucuaguugcaccagaguauggauucaaaauaucgaaaagagguaguucagggaucaugaagacagaaggaacacuugggaacugugagaccaaaugccaaacuccuuugggagcaauaaauacaacacuaccuuuucacaauguccacccacugacaauaggugaaugccccaaauauguaaaaucggagaaauuggucuuagcaacaggaccaaggaauguuccccagauugaaucaagaggauuguuuggggcaauagcuggcuuuauagaaggaggauggcaaggaaugguugaugguugguauggauaccaucacagcaaugaccagggaucaggguaugcagcagacaaagaauccacucaaaaggcauuugacagaaucaccaacaagguaaauucugugauugaaaagaugaacacccaauuugaagcuguugggaaagaauucaguaacuuagagaaaagacuggaaaacuugaacaaaaagauggaagacggguuucuagauguguggacauacaaugcugagcuucuaguucugauggaaaaugagaggacacuugacuuucaugauucuaaugucaagaaccuguaugauaaagucagaaugcagcugagagacaacgucaaagaacuaggaaauggauguuuugaauuuuaucauaaaugugacgaugaaugcaugaauagugugaaaaaugggacguaugauuaucccaaguaugaagaagaaucuaaacuaaagagaaaugaaaucaaaggggugaaauugagcagcauggggguuuaccaaauucuugccauuuaugcuacaguugcagguucucugucacuggcaaucaugauagcugggaucucuuucuggaugugcuccaacgggucucugcagugcagaaucugcauauga

SEQ ID NO: 33645 - RNA, 1701 nt, Artificial Sequence
  derived and/or modified CDS sequence (wt) from hemagglutinin__InfluenzaA__ABO52258
augaaagcaaaacuacugguccuguuaugugcacuuucagcuacagaugcagacacaauauguauaggcuaccaugcgaacaauucaaccgacacuguugacacgguacucgaaaagaacgugacagugacacacucugucaaccuacuugaggacagucacaacggaaaacuaugcagacuaaaaggaauagccccacuacaauuggggaaaugcagcauugccggauggaucuuaggaaacccagaaugcgaaucacuguuuucuaagaaaucaugguccuacauugcagaaacaccaaacuccgagaauggaacauguuacccaggguauuucgccgacuaugaagaacugagggagcaauugaguucaguaucaucauucgagagauucgaaauauuccccaaggaaaguucauggcccaaacacaacguaaccagaggaguaacggcuucaugcucccauaaggggaaaugcaguuuuuacagaaauuugcuauggcugacggagaaaaauggcucguacccaaaucugagcaaauccuaugugaacaacaaagagaaagaaguccuuguacuaugggguguucaucacccgucuaacauagaggaccaaaagaccaucuaucguaaagaaaaugcuuaugucucuguagugucuucacauuauaacaggagauucaccccagaaauagcaaaaagacccaaaguaagagaucaagaagggagaauuaacuacuacuggacucugcuggaacccggggacacaauaauauuugaggcaaauggaaaucuaauagcgccaugguaugcuuucgcacugaguagaggauuugggucaggaaucaucaccucaaacgcaucgauggaugaaugugacgcgaagugucaaacaccccagggagcuauaaacaguagucuuccuuuccagaauguacacccagucacaauaggagagugcccaaaauacgucaggaguacaaaauuacggaugguuacaggacuaaggaacaucccauccauucaauccagagguuuguuuggagccauugccgguuucauugaagggggauggacuggaaugauagauggaugguaugguuaucaucaucagaaugaacagggaucuggcuaugcugcagaucaaaaaagcacacaaaaugccauuaacgggauuacaaacaaggugaacucuguuaucgagaaaaugaacacucaauucacagcuguggguaaagaauucaacaaauuagaaaaaaggauggaaaacuuaaauaaaaaaguugaugauggauuucuggacauuuggacauauaaugcagaauuguugguucuacuggaaaaugaaaggacuuuggauuuucaugacucaaaugugaagaaccuguaugagaaaguaaaaagccaauuaaagaauaaugccaaagaaauaggaaacggguguuuugaauucuaccacaaguguaacaaugaaugcauggaaaguguaaaaaauggaacuuaugacuauccaaaauauucagaggaaucaaaguuaaacagggaaaaaauugauggagugaaauuggaaucaaugggagucuaucagauucuggcgaucuacucaacugucgccaguucacuggugcuuuuggucucccugggggcaaucagcuucuggauguguucuaaugggucuuugcagugcagaauaugcaucuga

SEQ ID NO: 33646 - RNA, 1701 nt, Artificial Sequence
  derived and/or modified CDS sequence (wt) from hemagglutinin__InfluenzaA__ABO52280
augaaagcaagacuacugauccuguuaugugcacuuucagcuacagaugcagacacaauauguauaggcuaccaugcgaacaauucaaccgacacuguugacacaguacucgaaaagaaugugacagugacacacucuguaaaccuacucgaagacagccacaacgggaaauuaugcagauuaaaaggaauagccccacuacaauuggggaaauguaacauugccggauggaucuugggaaacccagaaugcgaaucauugcucucuaauagaucaugguccuacauugcagaaacaccaaacucugagaauggaauauguuacccaggagauuucgccgacuaugaggaacugagggagcaauugagcucaguaucaucauucgagagauucgaaauauuccccaaggaaagcucauggcccaaacacaacauaaccagaggaguaacgguagcaugcucccacgcgaagaaaagcaguuuuuacaaaaauuugcucuggcugacggaggcaaauggcuuauacccaagucugagcaaguccuaugugaacgacagagagaaagaaguccuugugcuaugggguguucaucacccgucuaacauagaggaucaaaggacccucuaucggaaagaaaaugcuuaugucucuguggugucuucaaauuauaacaggagauucaccccggaaauagcagaaagacccaaaguaagaggucaaccagggagaaugaacuauuacuggacuuugcuagaacccggagacaaaauaauauuugaggcaaauggaaaccuaauagcgccaugguaugcuuucgcacugaguagaggcccuggaucaggaaucaucaccuccaacgcaucaauggaugaaugugacacgaagugucaaacaccccagggagccauaaacaguagccucccuuuucagaacauacacccagucacaauaggagagugcccaaaauaugucaggaguaccaaauugaggaugguuacaggacuaaggaacaucccauccauucaauccagaggucuguuuggagccauugccgguuucauugaagggggauggacuggaaugguggauggaugguaugguuaccaucaucagaaugagcagggaucuggcuaugcugcggaccaaaaaagcacacaaaaugccauuaacgggauuacaaauaaggugaacucuguuaucgagaaaaugaacacucaauucacagcuguggguaaagaguucaacaaauuggaaaaaagaauggaaaacuuaaauaaaaaaguugaugauggauuucuggacauuuggacauauaaugcagaauuauugguucuacuggaaaaugaaaggacuuuggauuuccaugacucaaaugugaagaaucuguaugagaaaguaaaaaaccaauugagaaauaaugcaaaggaaauaggaaacggguguuuugaguucuaccacaagugugacaaugaaugcauggaaaguguaaaaaauggaacuuaugauuacccaaaguauucagaggaaucaaaguuaaacagggcaaaaauugauggaguaaaacuggaaucaaugggggucuaucagauucuggcgaucuacucaacugucgccaguucacuggugcuucuggucucccugggggcaaucagcuuuuggauguguuccaaugggucuuugcaaugcagaauaugcaucuga

SEQ ID NO: 33647 - RNA, 1689 nt, Artificial Sequence
  derived and/or modified CDS sequence (wt) from hemagglutinin__InfluenzaA__ABO52302
auggccaucauuuaucucauucuccuguucacagcagugagaggggaccagauaugcauuggauaccaugccaauaauuccacagagaaggucgacacaauucuagagcggaacgucacugugacucaugccaaggacauucuugagaagacccauaacggaaaguuaugcaaacuaaacggaaucccuccacuugaacuagggaacuguagcauugccggauggcuccuuggaaauccagaaugugauaggcuucuaagugugccagaaugguccuauauaauggagaaagaaaacccgagagacgguuuguguuauccaggcagcuucaacgauuaugaagaauugaaacaucuccucagcagcgugaaacauuucgagaaaguaaagauucugcccaaagauagauggacacagcauacaacaacuggagguucacgggccugcgcggugucugguaauccaucauucuucaggaacauggucuggcugacaaagaaaggaucaaauuauccgguugccaaaggaucguacaacaauacaagcggagaacaaaugcuaauaauuuggggggugcaccaucccaaugaugagacagaacaaagaacauuguaccagaaugugggaaccuauguuuccguaggcacaucaacauugaacaaaaggucaaccccagacauagcaacaaggccuaaagugaauggacuaggagguagaauggaauucucuuggacccuauuggauaugugggacaccauaaauuuugagaguacugguaaucuaauugcaccagaguauggauucaaaauaucgaaaagagguaguucagggaucaugaaaacagaaggaacacuugggaacugugagaccaaaugccaaacuccuuugggagcaauaaauacaacauugccuuuucacaauguccacccacugacaauaggugagugccccaaauauguaaaaucggagaaguuggucuuagcaacaggacuaaggaauguuccccagauugaaucaagaggauuguuuggggcaauagcugguuuuauagaaggaggauggcaaggaaugguugaugguugguauggauaccaucacagcaaugaccagggaucaggguaugcagcagacaaagaauccacucaaaaggcauuugauggaaucaccaacaagguaaauucugugauugaaaagaugaacacccaauuugaagcuguugggaaagaauucaguaacuuagagagaagacuggagaacuugaacaaaaagauggaagacggguuucuagauguguggacauacaaugcugagcuucuaguucugauggaaaaugagaggacacuugacuuucaugauucuaaugucaagaaucuguaugauaaagucagaaugcagcugagagacaacgucaaagaacuaggaaauggauguuuugaauuuuaucacaaaugugaugaugaaugcaugaauagugugaaaaacgggacguaugauuaucccaaguaugaagaagagucuaaacuaaauagaaaugaaaucaaagggguaaaauugagcagcauggggauuuaucaaauccuugccauuuaugcuacaguagcagguucucugucacuggcaaucaugauggcugggaucucuuucuggaugugcuccaacgggucucugcagugcaggaucugcauauga

SEQ ID NO: 33648 - RNA, 1701 nt, Artificial Sequence
  derived and/or modified CDS sequence (wt) from hemagglutinin__InfluenzaA__ABO52313
augaagacuaucauugcuuugagcuacauuuucugucugguuuucgcccaaaaccuuccaggaaaugacaacagcacagcaacgcugugccugggacaucaugcggugccaaacggaacgcuagugaaaacaaucacgaaugaucagauugaagugacuaaugcuacugagcugguucagagcuccucaacggguaaaauaugcaacaauccucaucgaauccuugauggaauaaacugcacacugauagaugcucuauugggggacccucauugugauggcuuucaaaaugagaaaugggaccuuuucguugaacgcagcaaagcuuucagcaacuguuacccuuaugaugugccagacuaugccucccuuaggucacuaguugccucgucaggcacucuggaguuuaucaaugaaggcuucaauuggacuggggucacucagaaugggggaagcaaugcuugcaaaaggggaccugauagcgguuuuuucaguagacugaacugguuguacaaaucaggaagcacauauccagugcugaacgugacuaugccaaacaaugacaauuuugacaaacuauacauuugggggguucaccacccgagcacggaccaagaacaaaccaaccuauauguucaagcaucagggagagucacagucuccaccaagagaagccagcaaacuauaaucccgaauguugggucuagacccuggguaaggggucugucuaguagaauaagcaucuauuggacaauaguuaaaccgggagacauacugguaauuaauaguaaugggaaccuaauugcuccucggggucacuucaaaaugcgcacugggaagagcucaauaaugaggucagaugcaccuauuggcaccugcaguucugaaugcaucacuccaaauggaagcauucccaaugacaagcccuuucaaaacguaaacaagaucacauauggggcaugucccaaguacgucaagcaaaacacucugaaguuggcaacagggaugcggaauguaccagagaaacaaacuagaggcauauucggcgcaauagcagguuucauagaaaaugguugggagggaaugauagacgguugguacgguuucaggcaucgaaauucugagggcacaggacaagcagcagaucuuaaaagcacucaagcagcuaucgaccaaaucaaugggaaacugaauaggguaaucgagaagacgaacgagaaauuccaucaaaucgaaaaggaauucucagaaguagaagggagaauucaggaccucgagaaauacguugaagacacuaaaauagaucucuggucuuacaaugcggagcuucuugucgcucuggagaaccaacauacaauugaucugacugacucggaaaugaacaaacuguuugaaaaaacaaggaggcaacugagggaaaaugcugaggacaugggcaaugguugcuucaaaauauaccacaaaugugacaaugcuugcauagggucaaucagaaaugggacuuaugaccaugauguauacagagacgaagcauuaaacaaccgguuucagaucaaagguguugaacugaagucaggauacaaagacuggauccuguggauuuccuuugccauaucaugcuuuuugcuuuguguuguuuugcugggguucaucaugugggccugccaaaaaggcaacauuaggugcaacauuugcauuuga

SEQ ID NO: 33649 - RNA, 1701 nt, Artificial Sequence
  derived and/or modified CDS sequence (wt) from hemagglutinin__InfluenzaA__ABO52335
augaagacuaucauugcuuugagcuacauuuucugucugguucucggccaagacuuuccaagaaaugacaacagcacagcaacgcugugccugggacaucaugcggugccaaacggaacacuagugaaaacaaucacaaaugaucagauugaagugacuaaugcuacugagcugguucagaguuccucaacggggaaaauaugcaacaauccucaucgaauccucgauggaauagacugcacacugauagaugcucuauugggggacccucauugugauggcuuucaaaaugagacaugggaccuuuucguugaacgcagcaaagcuuucagcaacuguuacccuuaugaugugccagauuaugccucccuuaggucacuaguugccucgucuggcacucuggaguuuaucaaugaaggcuucacuuggacuggggucacucagaaugggggaagcaaugcuugcaaaaggggaccugauagcgguuuuuucaguagacugaacugguuguacaaaucaggaaacacauauccaguacugaacgugacuaugccaaacaaugacaauuuugacaaacuauacauuugggggguucaccacccgagcacggaccaagaccaaaccagccuauauguucaagcaucagggagagucacagucuccacuaagagaagccagcaaacuguaaucccgaauaucgggccuagacccuggguaaggggucugucuaguagaauaagcaucuauuggacaauaguuaaaccgggagacauacuguuaauuaauaguaaugggaaccuaauugcuccucgggguuauuucaaaaugcgcacugggaaaagcucaauaaugaggucagaugcaccuauuggcaccugcauuucugaaugcaucacuccaaauggaagcauucccaaugacaagcccuuucaaaacguaaacaagaucacauauggggcauguccuaaguauguuaagcaaaacacccugaaguuggcaacagggaugcggaauguaccagagaaacaaacuagaggcauauucggcgcaauagcagguuucauagaaaaugguugggagggaaugauagacgguugguacgguuucaggcaucaaaauucugagggcacagggcaagcagcagaucuuaaaagcacucaagcagccaucgaccaaaucaauggaaaacugaauaggguaaucgagaagacgaacgagaaauuccaucaaaucgaaaaggaguucucagaaguagaagggagaauucaggaccucgagaaauacguugaagacacuaaaauagaucucuggucuuacaaugcggagcuucuugucgcucuggagaaccaacauacaauugaucugacugacucggaaaugaacaaacuguuugaaaaaacaaggaggcaacugagggaaaaugcugaggacaugggcaaugguugcuucaaaauauaccacagaugugacaaugcuugcauagggucaaucagaaaugggacuuaugaccaugauguauacagagacgaagcauuaaacaaccgguuucagaucaaagguguugaacugaagucaggauacaaagacuggauccuguggauuuccuuugccauaucaugcuuuuugcuuuguguuguuuugcugggguucaucaugugggccugccagaaaggcaacauuaggugcaacauuugcauuuga

SEQ ID NO: 33650 - RNA, 1701 nt, Artificial Sequence
  derived and/or modified CDS sequence (wt) from hemagglutinin__InfluenzaA__ABO52346
augaagacuaucauugcuuugagcuacauuuucugucugguuuucgcccaagaccuuccaggaaaugacaacagcacagcaacucugugccugggacaucaugcggugccaaacggaacgcuagugaaaacaaucacgaaugaucagauugaagugacuaaugcuacugaacugguucagaguuccucaacggguaaaauaugcgacaauccucaucgaauccuugauggaauaaacugcacacugauagaugcucuauugggggacccucauugugauggcuuucaaaaugagaaaugggaccuuuucguugaacgcagcaaagcuuucagcgacuguuacccuuaugaugugccagauuaugccucccuuaggucacuaguugccucgucaggcacucuggaguuuaucaaugaaggcuucaauuggacuggggucacucagaaugggggaagcagugcuugcaaaaggggaccugauaacgguuuuuucaguagacugaacugguuguacaaaucaggaagcacauauccagugcagaacgugaccaugccaaacaaugacaacucugacaaacuauacauuugggggguucaccacccgagcacggacaaagaacaaaccgaccuauauguucaagcaucagggaaagucacagucuccaccaagagaagccagcaaacuguaaucccgaaugucgggucuagacccuggguaaggggucugucuaguagaguaagcaucuauuggacaauaguuaaaccgggagacauacugguaauuaauaguaauggaaaccuaauugcuccucgggguuacuucaaaaugcgcacugggaagagcucaauaaugaggucagaugcaccuauuggcaccugcagcucugaaugcaucacuccaaauggaagcauucccaaugacaagcccuuucaaaacguaaacaagaucacauauggggcaugucccaaguauguuaagcaaaacacucugaaguuggcaacaggaaugcggaauguaccagagaaacaaacuagaggcauauucggcgcaauagcagguuucauagaaaaugguugggagggaaugauagacgguugguacgguuucaggcaucaaaauucugagggcacaggacaagcagcagaucuuaaaagcacucaagcagccaucgaccaaaucaaugggaaacugaauaggguaaucgagaagacgaacgagaaauuccaucaaaucgaaaaggaauucucagaaguagaagggagaauucaggaccucgagaaauacguugaagacacuaaaauagaucucuggucuuacaaugcggagcuucuugucgcucuggagaaccaacauacaauugaucugacugacucggaaaugaacaaacuguuugaaaaaacaaggaggcaacugagggaaaaugcugaggacaugggcaaugguugcuucaaaauauaccacaaaugugacaaugcuugcauagggucaaucagaaaugggacuuaugaccaugauguauacagagacgaagcauuaaacaaccgguuucagaucaaagguguugaacugaagucaggauacaaagacuggauccuguggauuuccuuugccauaucaugcuuuuugcuuuguguuguuuugcugggguucaucaugugggccugccagaaaggcaacauuaggugcaacauuugcauuuga

SEQ ID NO: 33651 - RNA, 1701 nt, Artificial Sequence
  derived and/or modified CDS sequence (wt) from hemagglutinin__InfluenzaA__ABO52357
augaagaccaucauugcuuugagcuacauuuucugucuggcucucggccaagaccuuccaggaaaugacaacagcacagcaacgcugugccugggacaucaugcggugccaaacggaacacuagugaaaacaaucacagaugaucagauugaagugacuaaugcuacugagcuaguucagagcuccucaacggggaaaauaugcaacaauccucaucgaauccuugauggaauagacugcacacugauagaugcucuauugggggacccucauugugauguuuuucaaaaugagacaugggaccuuuucguugaacgcagcaaagcuuucagcaacuguuacccuuaugaugugccagauuaugccucccuuaggucacuaguugccucgucaggcacucuggaguuuaucacugaggguuucacuuggacuggggucacucagaaugggggaagcaaugcuugcaaaaggggaccugguagcgguuuuuucaguagacugaacugguugaccaaaucaggaagcacauauccagugcugaacgugacuaugccaaacaaugacaauuuugacaaacuauacauuugggggguucaccacccgagcacgaaccaagaacaaaccagccuguauguucaagcaucagggagagucacagucucuaccaggagaagccagcaaaccauaaucccgaauaucggguccagacccuggguaaggggucugucuaguagaauaagcaucuauuggacaauaguuaagccgggagacguacugguaauuaauaguaaugggaaccuaaucgcuccucgggguuauuucaaaaugcgcacugggaaaagcucaauaaugaggucagaugcaccuauugauaccuguauuuuugaaugcaucacuccaaauggaagcauucccaaugacaagcccuuucaaaacguaaacaagaucacauauggagcaugccccaaguauguuaagcaaaacacccugaaguuggcaacagggaugcggaauguaccagagaaacaaacuagaggcauauucggcgcaauagcagguuucauagaaaaugguugggagggaaugauagacgguugguacgguuucaggcaucaaaauucugagggcacaggacaagcagcagaucuuaaaagcacucaagcagccaucgaccaaaucaaugggaaauugaacaggguaaucgagaagacgaacgagaaauuccaucaaaucgaaaaggaauucucagaaguagaagggagaauucaggaccucgagaaauacguugaagacacuaaaauagaucucuggucuuacaaugcggagcuucuugucgcucuggagaaucaacauacaauugaccugacugacucggaaaugaacaagcuguuugaaaaaacaaggaggcaacugagggaaaaugcugaagacaugggcaaugguugcuucaaaauauaccacaaaugugauaacgcuugcauagagucaaucagaaaugggacuuaugaccaugauguauacagagacgaagcauuaaacaaccgguuucagaucaaagguguugaacugaagucuggauacaaagacuggauccuguggauuuccuuugccauaucaugcuuuuugcuuuguguuguuuugcugggguucaucaugugggccugccagagaggcaacauuaggugcaacauuugcauuuga

SEQ ID NO: 33652 - RNA, 1701 nt, Artificial Sequence
  derived and/or modified CDS sequence (wt) from hemagglutinin__InfluenzaA__ABO52368
augaagaccaucauugcuuugagcuacauuuucugucuggcucucggccaagaccuuccaggaaaugacaacaguacagcaacgcugugccugggacaucaugcggugccaaacggaacacuagugaaaacaaucacaaaugaucagauugaagugacuaaugcuacugagcuaguucagaguuccucaacggggaaaauaugcaacaauccucaucgaauccuugauggaauaaacugcacacugauagacgcucuauugggggacccucauugugauguuuuccaagaugagacaugggaccuuuucguugaacgcagcaaagcuuucagcaacuguuacccuuaugaugugccagauuaugccucccuuaggucacuaguugccucgucaggcacucuggaguuuaucacugaggguuucacuuggacuggggucacucagaaugggggaagcaaugcuugcaaaaggggaccugguagcgguuuuuucaguagacugaacugguugaccaaaucaggaagcacauauccagugcugaacgugacuaugccaaacaaugacaauuuugacaaacuauacauuugggggguucaccacccgagcacgaaccaagaacaaaccagccuguauguucaagcaucagggagagucacagucucuaccaggagaagccagcaaacuauaaucccgaauaucggguccagacccuggguaaggggucugucuaguagaauaagcaucuauuggacaauaguuaaaccgggagacguacugguaauuaauaguaaugggaaccuaaucgcuccucgggguuauuucaaaaugcgcacugggaaaagcucaauaaugaggucagaugcaccuauugauaccuguauuucugaaugcaucacuccaaauggaagcauucccaaugacaagcccuuucaaaacguaaacaagaucacauauggagcaugccccaaguauguuaagcaaaacacccugaaauuggcaacagggaugcggaauguaccagagaaacaaacuagaggccuauucggcgcaauagcaggcuucauagaaaaugguugggagggaaugauagacgguugguacgguuucaggcaucaaaauucugagggcacaggacaagcagcagaucuuaaaagcacucaagcagccaucgaccaaaucaaugggaaauugaacagaguaaucgagaagacgaacgagaaauuccaucaaaucgaaaaggaauucucugaaguagaagggagaauucaggaccucgagaaauacguugaagacacuaaaauagaucucuggucuuacaaugcggagcuucuugucgcucuggagaaucaacauacaauugaccugacugacucggaaaugaacaagcuguuugaaaaaacaaggaggcaacugagggaaaaugcugaagacaugggcaaugguugcuucaaaauauaccacaaaugugacaacgcuugcauagagucaaucagaaaugggacuuaugaccaugauguauacagagacgaagcauuaaacaaccgguuucagaucaaagguguugaacugaagucuggauacaaagacuggauccuguggauuuccuuugccauaucaugcuuuuugcuuuguguuguuuugcugggguucaucaugugggccugccagagaggcaacauuaggugcaacauuugcauuuga

SEQ ID NO: 33653 - RNA, 1701 nt, Artificial Sequence
  derived and/or modified CDS sequence (wt) from hemagglutinin__InfluenzaA__ABO52797
augaaagcaaaacuacugguccuguuaugugcacucucagcuacagaugcagacacaauauguauaggcuaccaugcgaacaacucaaccgacacuguugacacaguacucgaaaagaacgugacagugacacacucugucaaccuacuugaggacaaucacaacgggaaacuaugcaaacuaaaaggaauagcgccacuacaauuggggaaaugcagcauugccggauggaucuuaggaaacccagaaugcgaaucacuguuuucuaagaaaucaugguccuacauugcagaaacaccaaacuccgagaauggaacauguuacccaggguauuucgccgacuaugaagaacugagggaacaauugaguucaguaucaucauucgagagauucgaaauauuccccaaggaaaguucauggcccaaccacaacguaaccaaaggaguaacggcaucaugcucccauaaggggaaaagcaguuuuuacagaaauuugcuauggcugacggagaaaaauggcucguacccaagucugagcaaguccuaugugaacaacaaagagaaagaaguccuuguacuaugggguguucaucacccgucuaacauaaaggaccaaaagaccaucuaucguaaagaaaaugcuuaugucucuguagugucuucacauuauaacaggagauucaccccagaaauagcaaaaagacccaaaguaagagaucaagaagggagaauuaacuacuacuggacucugcuggaacccggggacacaauaauauuugaggcaaauggaaaucuaauagcgccaugguaugcuuucgcacugaguagaggcuuugggucaggaaucaucaccucaaacgcaucgauggaugaaugugacgcgaagugucaaacaccccagggagcuauaaacaguagucuuccuuuucagaauguacacccagucacaauaggagagugcccaaaguacguaaggaguacaaaauuaaggaugguuacaggacuaaggaacaucccauccauucaauccagagguuuguuuggagccauugccgguuucauugaagggggauggacuggaaugauugauggaugguaugguuaucaucaucagaaugaacagggaucuggcuaugcugcggaucaaaaaagcacacaaagugccauuaacgggauuacaaacaaggugaacucuauaaucgagaaaaugaacacucaauucacagcuguggguaaagaauucaacaaacuagaaaaaaggauggaaaacuuaaauaaaaaaguugaugauggauuucuggacauuuggacauauaaugcagaauuguugguucuacuggaaaaugaaaggacuuuggauuuccaugacucaaaugugaagaaccuguaugagaaaguaaaaagccaauuaaagaauaaugccaaagaaauaggaaacggguguuuugaauucuaccacaaguguaacaaugaaugcauggaaaguguaaaaaauggaacuuaugacuauccaaaauauucagaggaaucaaaauuaaacagggaaaaaauugauggagugaaauuggaaucaaugggagucuaucagauucuggcgaucuacucaacugucgccaguucacuggugcuuuuggucucccugggggcaaucagcuucuggauguguucuaaugggucuuugcagugcagaauaugcaucuga

SEQ ID NO: 33654 - RNA, 1698 nt, Artificial Sequence; identical to SEQ ID NO: 32754
  derived and/or modified CDS sequence (wt) from hemagglutinin__InfluenzaA__ABP49217

SEQ ID NO: 33655 - RNA, 1698 nt, Artificial Sequence
  derived and/or modified CDS sequence (wt) from hemagglutinin__InfluenzaA__ABP49305
augaaagcaaaacuaaugguccuguuauguacauuuacagcuacauaugcagacacaauauguaucggcuaccaugccaacaacucaaccgacacuguugacacaguacuugagaagaaugugacagugacacacucugucaaccuacuugaggacagucacaauggaaaacuaugucuacuaaaaggaauagccccacuacaauuggguaacugcagcguugccggauggaucuuaggaaacccagaaugcgaauuacugauuuccaaggaaucaugguccuacauuguagaaacaccaaauccugaaaauggaacauguuacccaggguauuucgccgacuaugaggaacugagggagcaauugaguucaguaucuucauuugagagauucgaaauauuccccaaagaaagcucauggcccaaccacaccguaaccggaguaucagcaucaugcucccauaaugggaaaagcaguuuuuacagaaauuugcuauggcugacggggaagaaugguuuguacccaaaccugagcaaguccuaugcaaacaacaaagagaaagaaguccuuguacuaugggguguucaucacccgccuaacauaggggaccaaagggcccucuaucauacagaaaaugcuuaugucucuguagugucuucacauuauagcagaagauucaccccagaaauagccaaaagacccaaaguaagagaucaggaaggaagaaucaacuacuacuggacucugcuggaacccggggauacaauaauauuugaggcaaauggaaaucuaauagcgccaugguaugcuuucgcacugaguagaggcuuuggaucaggaaucaucaccucaaaugcaccaaugggugaaugugaugcgaagugucaaacaccucagggagcuauaaacagcagucuuccuuuccagaauguacacccagucacaauaggagaguguccaaaguaugucaggagugcaaaauuaaggaugguuacaggacuaaggaacaucccauccauucaauccagagguuuguuuggagccauugccgguuucauugaagggggguggacuggaaugguagaugggugguaugguuaucaucaucagaaugagcaaggaucuggcuaugcugcagaucaaaaaagcacacaaaaugccauuaacgggauuacaaacaaggugaauucuguaauugagaaaaugaacacucaauucacagcugugggcaaagaauucaacaaauuggaaagaaggauggaaaacuuaaauaaaaaaguugaugauggguuucuagacauuuggacauauaaugcagaauuguugguucuacuggaaaaugaaaggacuuuggauuuccaugacuccaaugugaagaaucuguaugagaaaguaaaaagccaauuaaagaauaaugccaaagaaauaggaaacggguguuuugaauucuaucacaaguguaacaaugaaugcauggagagugugaaaaauggaacuuaugacuauccaaaauauuccgaagaaucaaaguuaaacagggagaaaauugauggagugaaauuggaaucaaugggagucuaucagauucuggcgaucuacucaacugucgccaguucccugguucuuuuggucucccugggggcaaucagcuucuggauguguuccaaugggucuuugcaguguagaauaugcaucuga

SEQ ID NO: 33656 - RNA, 1701 nt, Artificial Sequence
  derived and/or modified CDS sequence (wt) from hemagglutinin__InfluenzaA__ABP49316
augaaagcaaaacuacugguccuguuaugugcacuuucagcuacagaugcagacacaauauguauaggcuaccaugcgaacaacucaaccgacacuguugacacaguacucgaaaagaacgugacagugacacacucugucaaccuacucgaggacagccacaacgggaaacuaugcagacuaaaaggaauagccccacuacaauuggggaaaugcaacauugccggauggaucuuaggaaacccagaaugcgaaucacuguuuucuaagaaaucaugguccuacauugcagaaacaccaaacucugagaauggaacauguuacccaggauauuucgccgacuaugaggaacugagggagcaauugagcucaguaucaucauucgagagauucgaaauauuccccaaggaaaggucauggcccaaacacaacauaaccagaggaguaacggcagcaugcucccauaaggggaaaagcaguuuuuacagaaauuugcuauggcugacggagaaaaauggcucguacccaaaucugaaaaaguccuaugugaacaauaaagagaaagaaguccuuguacuaugggguguucaucacccgucuaacauagaggaccaaaagacccucuaucggaaagaaaaugcuuaugucucuguagugucuucaaauuauaacaagagauucaccccagaaauagcagaaagacccaaaguaagaggucaagcagggagaauuaacuacuacuggacucugcuggaacccggagacacaauaauauuugaggcaaauggaaaucuaauagcgccauggcaugcuuucgcacugaguagaggcuuugggucaggaaucaucaccucaaacgcaucgauggaugaaugugacacgaagugucaaacaccccagggagcuauaaacaguagucucccuuuccagaauauacacccagucacaauaggagagugcccaaaauacgucaggaguacaaaauugaggaugguuacaggacuaaggaacaucccauccauucaauccagaggucuguuuggggccauugccgguuucauugaagggggauggacuggaaugauagauggaugguaugguuaucaucaucagaaugaacagggaucuggcuaugcugcggaucaaaaaagcacacaaaaugccauuaacgggauuacaaacaaggugaacucuguuaucgagaaaaugaacacucaauucacagcuguggguaaagaauucaacaaauuagaaaaaaggauggaaaacuuaaauaaaaaaguugaugauggauuucuggacauuuggacauauaaugcagaauuguugguucuacuggaaaaugaaaggacuuuggauuuucaugacucaaaugugaagaaucuguaugagaaaguaaaaagccaauuaaagaauaaugccaaagaaauaggaaacggguguuuugaauucuaccacaaguguaacaaugaaugcauggaaaguguaaaaaauggaacuuaugauuauccaaaauauucagaggaaucaaaguuaaacagggaaaaaauugauggagugaaauuggaaucaaugggagucuaucagauucuggcgaucuacucaacugucgccaguucacuggugcuucuggucucccugggggcaaucagcuucuggauguguucuaaugggucuuugcagugcagaauaugcaucuga

SEQ ID NO: 33657 - RNA, 1701 nt, Artificial Sequence
  derived and/or modified CDS sequence (wt) from hemagglutinin__InfluenzaA__ABP49327
augaaggcaagacuacugguccuguuaugugcacuugcagcuacagaugcagacacaauauguauaggcuaccaugcgaacaacucaaccgauacuguugacacaguacucgaaaagaaugugacagugacacacucugucaaccuacucgaagacagccacaacgggaaauuauguagauuaaaaggaauagccccacuacaauugaggaaauguaacauugcuggauggauccugggaaacccagaaugcgaaucacugcuuucagagagaucaugguccuacauuguugaaacaccaaacucugagaauggaacauguuacccaggagauuuuaccaacuaugaggaacugagggagcaauugagcucuguaucaucauucgaaagauucgaaauauuccccaaggaaagcucauggcccaaacacaacacaaccagaggaguaacggcagcaugcucccaugcgggaaaaagcaguuuuuacagaaauuugcuauggcugacggagaaggauggcucauauccgaaucugaacaauuccuaugugaacaagaaagggaaagaaguccuuguacuaugggguguucaucacccguccaacauaaaggaucaacagacccucuaucagaaagaaaaugcuuaugucucuguagugucuucaaacuauaacaggagauucaccccggaaauagcagaaagacccaaaguaagaggucaagcagggaggaugaacuauuacuggaccuugcuaaaacccggagacacaauaauguuugaggcaaauggaaaucuaauagcgccaugguaugcuuucgcacuaaguagaggcuuugggucaggcaucaucaccucaaacgcaucgaugcaugagugugacacgaagugucaaacaccccagggagcuauaaacagcagucucccuuuccagaauauccacccagucacaauaggagagugcccaaaauacgucaggaguaccaaauugaggaugguuacaggacuacggaacaucccauccauucaauccagaggucuauuuggagccauugccgguuucauugaagggggauggacuggaaugauagauggaugguaugguuaucaucaucagaaugaacagggaucaggcuaugcugcggaucaaaaaagcacacaaaaugccauuaacgggauuacaaacaaggugaacucuguuaucgagaagaugaacacucaauucacugcuguggguaaagaauucaacaacuuagaaaaaaggauggaaaacuuaaacaaaaaaguugaugauggauuucuggacauuuggacauauaaugcagaauuguugauucuacuggaaaaugaaaggacucuggauuuccaugacucaaaugugaagaaucuguaugaaaaaguuaaaagccaauuaaggaauaaugccaaagaaauaggaaacggguguuuugaguucuaccacaaguguaacaaugaaugcauggaaaguguaaaaaauggaacuuaugauuauccaaaauauucagaagaaucaaaguugaacagggaaaaaauagauggagugaaauuggaaucaaugggggucuaucagauucuggcgaucuacucaacugucgccaguucacuggugcuucuagucucccugggggcaaucagcuucuggauguguucuaaugggucuuugcagugcagaauaugcaucuga

SEQ ID NO: 33658 - RNA, 1701 nt, Artificial Sequence
  derived and/or modified CDS sequence (wt) from hemagglutinin__InfluenzaA__ABP49338
augaaagcaaaacuacugguccuguuaugugcacuuucagcuacagaugcagacacaauauguauaggcuaccaugcgaacaacucaaccgacacuguugacacaguacucgaaaagaacgugacagugacacacucugucaaccuacuugaggacagucacaacggaaaacuaugcagacuaaaaggaauagcuccacuacaauuggggaaaugcagcauugccggauggaucuuaggaaacccagaaugcgaaucacuguuuucuaagaaaucaugguccuacauugcagaaacaccaaacuccgagaauggaacauguuacccaggauauuucgccgacuaugaggaacugagggagcaauugaguucaguaucaucauucgagagauucgaaauauuccccaaggaaagaucauggcccaaacacaacguaaccagaggaguaacggcaucaugcucccauaaggggaaaagcaguuuuuacagaaauuugcuauggcugacggagaaaaauggcucguacccaaaucugagcaaguccuaugugaacaacaaagagaaagaaguccuuguacuaugggguguucaucacccgucuaacauagaggaccaaaagaccaucuaucggaaagaaaaugcuuaugucucuguagugucuucaaauuauaacaggagauucaccccagaaauagcaaaaagacccaaaguaagaggucaagaagggagaauuaacuacuacuggacucugcuggaacccggggacacaauaauauuugaggcaaauggaaaucuaauagcgccaugguaugcuuucgcacugaguagaggcuuugggucaggaaucaucaccucaaacgcaucgauggaugaaugugacacgaagugucaaacaccccagggagcuauaaacaguagccuuccuuuccagaauguacacccagucacaauaggagagugcccaaaauacgucaggaguacaaaauuaaggaugguuacaggacuaagaaacaucccauccauucaauccagaggucuguuuggagccauugccgguuucauugaagggggauggacuggaaugauagauggaugguaugguuaucaucaucagaaugaacagggaucuggcuaugcugcggaucaaaaaagcacacaaaaugccauuaacgggauuacaaacaaggugaacucuguuaucgagaaaaugaacacucaauucacagcuguggguaaagaauucaacaaauuagaaaaaaggauggaaaacuuaaauaaaaaaguugaugauggauuucuggacauuuggacauauaaugcagaauuguugguucuacuggaaaaugaaaggacuuuggauuuucaugacucaaaugugaagaaucuguaugagaaaguaaaaagccaauuaaagaauaaugccaaagaaauaggaaacggguguuuugaauucuaccacaaguguaacaaugaaugcauggaaaguguaaaaaauggaacuuaugacuauccaaaauauucagaggaaucaaaguuaaacagggaaaaaauugauggagugaaauuggaaucaaugggagucuaucagauucuggcgaucuacucaacugucgccaguucacuggugcuuuuggucucccugggggcaaucagcuucuggauguguucuaaugggucuuugcagugcagaauaugcaucuga

SEQ ID NO: 33659 - RNA, 1701 nt, Artificial Sequence
  derived and/or modified CDS sequence (wt) from hemagglutinin__InfluenzaA__ABP49349
augaaagcaaaacuacugguccuguuaugugcacuuucagcuacagaugcagacacaauauguauaggcuaccaugcgaacaacucaaccgacacuguugacacaguacucgaaaagaacgugacagugacacacucugucaaccuacuugaggacaaucacaacgggaaacuaugcaaacuaaaaggaauagcgccacuacaauuggggaaaugcagcauugccggauggaucuuaggaaacccagaaugugaaucacuguuuucuaagaaaucaugguccuacauugcagaaacaccaaacuccgagaauggaacauguuacccaggguauuucgccgacuaugaagaacugagggaacaauugaguucaguaucaucauucgagagauucgaaauauuccccaaggaaaguucauggcccaaccacaacguaaccaaaggaguaacggcaucaugcucccauaaggggaaaagcagcuuuuacagaaauuugcuauggcugacggagaaaaauggcucguacccaaaucugagcaaauccuaugugaacaacaaagagaaagaaguccuuguacuaugggguauucaucacccgucuaacauagaggaccaaaagaccaucuaucguaaagaaaaugcuuaugucucuguagugucuucacauuauaacaggagauucaccccagaaauagcaaaaagacccaaaguaagagaucaagaagggagaauuaacuacuacuggacucugcuggaacccggggacacaauaauauuugaggcaaauggaaaucuaauagcgccaugguaugcuuucgcacugaguaggggcuuugggucaggaaucaucaccucaaacgcaucgauggaugaaugugacgcgaagugucaaacaccccugggagcuauaaacaguagucuuccuuuucagaauguacacccagucacaauaggagagugcccaaaguacgucaggaguacaaaauuaaggaugguuacaggacuaaggaacaucccauccauucaauccagagguuuguuuggagcuauugccgguuucauugaagggggauggacuggaaugauugauggaugguaugguuaucaucaucagaaugaacagggaucuggcuaugcugcggaucaaaaaagcacacaaagugccauuaacgggauuacaaacaaggugaacucuauaaucgagaaaaugaacacucaauucacagcuguggguaaagaauucaacaaacuagaaaaaaggauggaaaacuuaaauaaaaaaguugaugauggauuucuggacauuuggacauauaaugcagaauuguugguucuacuggaaaaugaaaggacuuuggauuuccaugacucaaaugugaagaaccuguaugagaaaguaaaaagccaauuaaagaauaaugccaaagaaauaggaaacggguguuuugaauucuaccacaaguguaacaaugaaugcauggaaaguguaaaaaauggaacuuaugacuauccaaaauauucagaggaaucaaaauuaaacagggaaaaaauugauggagugaaauuggaaucaaugggagucuaucagauucuggcgaucuacucaacugucgccaguucacuggugcuuuuggucucccugggggcaaucagcuucuggauguguucuaaugggucuuugcagugcagaauaugcaucuga

SEQ ID NO: 33660 - RNA, 1701 nt, Artificial Sequence
  derived and/or modified CDS sequence (wt) from hemagglutinin__InfluenzaA__ABP49360
augaaagcaaaacuacuaauccuguuaugugcauuuacagcuacagaugcagacacaauauguauaggcuaccaugcgaacaacucaaccgacacuguugacacaguacuugaaaagaacgugacagugacacacucugucaaccuacuugaggacagucacaacggaaaacuaugucgacuaaaaggaauagccccacuacaauuggguaauugcagcauugccggauggauuuuaggaaacccagaaugcgaaucacuguuuucuaagaaaucaugguccuacauugcagaaacaccaaacuccgagaauggaacauguuacccaggguauuucgccgacuaugaggaacugagggagcaauugaguucaguaucaucauucgagagauucgaaauauuccccaaagaaagcucauggcccaaccacaccguaaccaaaggaguaacggcaucaugcucccauaaugggaaaagcaguuuuuacagaaauuugcuauggcugacgaagaagaauggcucguacccaaaucugagcaaguccuaugugaacaacaaagagaaagaaguccuuguacuaugggguguucaucacccgucuaacauaggggaccaaagggccaucuaucauacagaaaaugcuuaugucucuguagugucuucacauuauaacaggagauucaccccagaaauagcaaaaagacccaaaguaagagaucaagaaggaagaauuaacuacuacuggacucugcuggaacccggggacacaauaauauuugaggcaaauggaaaucuaauagcgccaugguaugcuuucgcacugaguagaggcuuugggucaggaaucaucaccucaaacgcaucaauggaugaaugugacgcgaagugucaaacaccccagggagcuauaaacaguagucuuccuuuccagaauguacacccagucacaauaggagagugcccaaaguaugucaggaguacaaaauuaagaaugguuacaggacuaaggaacaucccauccauucaauccagagguuuguuuggagccauugccgguuucauugaagggggguggacuggaaugauagauggaugguaugguuaucaucaucagaaugaacaaggaucuggcuaugcugcggaucaaaaaagcacacaaaaugccauuaacgggauuacaaacaaggugaauucuguaaucgagaaaaugaacacucaauucacagcugugggcaaagaauucaacaaauuagaaagaaggauggaaaacuuaaauaaaaaaguugaugauggauuucuggacauuuggacauauaaugcagaauuguugguucuacuggaaaaugaaaggacuuuggauuuucaugacucaaaugugaagaaucuguaugagaaaguaaaaagccaauuaaagaacaaugccaaagaaauaggaaacggguguuuugaauucuaccacaaguguaacaaugaaugcauggaaagugugaaaaauggaacuuaugacuauccaaaauauuccgaggaaucaaaguuaaacagggaaaaaauugauggagugaaauuggaaucaaugggagucuaucagauucuggcgaucuacucaacugucgccaguucacuggugcuuuuggucucccugggggcaaucagcuucuggauguguucuaaugggucuuugcaguguagaauaugcaucuga

SEQ ID NO: 33661 - RNA, 1701 nt, Artificial Sequence
  derived and/or modified CDS sequence (wt) from hemagglutinin__InfluenzaA__ABP49371
augaagacuaucauugcuuugagcuacauuuuaugucugguuuucgcucaaaaacuucccggaaaugacaacagcacggcaacgcugugccuggggcaccaugcagugccaaacggaacgcuagugaaaacaaucacgaaugaccaaauugaagugacuaaugcuacugagcugguucagaguuccucaacagguggaauaugcgacaguccucaccaaauccuugauggagaaaacugcacacuaauagaugcucuauugggagacccucauugugauggcuuccaaaauaaggaaugggaccuuuuuguugaacgcagcaaagccuacagcaacuguuacccuuaugaugugccggauuaugccucccuuaggucacuaguugccucauccggcacacuggaguuuaacaaugaaagcuucaauuggacuggagucgcucagaauggaacaagcucugcuugcaaaaggagaucuaauaaaaguuucuuuaguagauugaauugguugcaccaauuaaaauacaaauacccagcacugaacgugacuaugccaaacaaugaaaaauuugacaaauuguacauuugggggguucaccacccgaguacggacagugaccaaaucagccuauaugcucaagcaccagggagagucacagucucuaccaaaagaagccaacaaacuguaaucccgaauaucggaucuagacccuggguaaggggugucuccagcagaauaagcaucuauuggacaauaguaaaaccgggagacauacuuuugauuaacugcacagggaaucuaauugcuccucgggguuacuucaaaauacgaagugggaaaagcucaauaaugaggucagaugcauccauuggcaaaugcaauucugaaugcaucacuccaaauggaagcauucccaaugacaaaccauuucaaaauguaaacaggaucacauauggggccugucccagauauguuaagcaaaacacucugaaauuggcaacagggaugcggaauguaccagagaaacaaacuagaggcauauucggcgcaaucgcggguuucauagaaaaugguugggagggaaugguggacgguugguacgguuucaggcaucaaaauucugagggcacaggacaagcagcagaucucaaaagcacucaagcagcaaucaaccaaaucaacggaaaacugaauagguuaaucgagaaaacgaacgagaaauuccaucaaauugaaaaagaauucucagaaguggaagggagaauucaggaccucgagaaauauguugaggacacuaaaauagaucucuggucguacaacgcggagcuucuuguugcccuggagaaccagcauacaauugaucuaacugacucagaaaugaacaaacuguuugaaagaacaaagaagcaacugagggaaaaugcugaggauaugggcaaugguuguuucaaaauauaccacaaaugugacaaugccugcauagggucaaucagaaaugggacuuaugaccaugauguauacagagacgaagcauuaaacaaccgguuccagaucaaagguguugagcugaagucaggauacaaagauuggauccuauggauuuccuuugccauaucauguuuuuugcuuuguguugucuugcugggguucaucaugugggccugccaaaaaggcaacauuaggugcaacauuugcauuuga

SEQ ID NO: 33662 - RNA, 1701 nt, Artificial Sequence; identical to SEQ ID NO: 33399
  derived and/or modified CDS sequence (wt) from hemagglutinin__InfluenzaA__ABP49382

SEQ ID NO: 33663 - RNA, 1698 nt, Artificial Sequence
  derived and/or modified CDS sequence (wt) from hemagglutinin__InfluenzaA__ABP49393
augaaaguaaaacuacugguucuguuauguacauuuacagcuacauaugcagacacaauauguauaggcuaccaugccaacaacucgaccgacacuguugacacaguacuugagaagaaugugacagugacacacucugucaaccuacuugaggacagucacaauggaaaacuaugucuacuaaaaggaauagccccacuacaauuggguaauugcagcguugccggauggaucuuaggaaacccagaaugcgaauuacugauuuccaaggaaucaugguccuacauuguagaaacaccaaauccugagaauggaacauguuacccaggguauuucgccgacuaugaggagcugagggagcaauugaguucaguaucuucauuugagagguucgaaauauuccccaaagagagcucauggcccaaccacaccguaaccggaguaucagcaucaugcucccauaacgggaaaagcaguuuuuacagaaauuugcuauggcugacggggaagaaugguuuguauccaaaccugagcaaguccuaugcaaacaacaaagagaaagaaguccuuguacugugggguauucaucacccgccuaacauaggggaccaaagggcccucuaucauacagaaaaugcuuaugucucuguagugucuucacauuacagcagaagauucaccccagaaauagccaaaagacccaaggugagagaucaggaaggaagaaucaacuacuacuggacucugcuggaacccggggauacaauaauauuugaggcaaauggaaaucuaauagcgccaagguuugcuuucgcacugaguagaggcuuuggaucaggaaucaucaccucaaaugcaccaauggaugaaugugaugcgaagugucaaacaccucagggagcuauaaacagcagucuuccuuuccagaauguacacccagucacaauaggagaguguccaaaguaugucaggagugcaaaauuaagaaugguuacaggacuaaggaacaucccauccauucaauccagagguuuguuuggagccauugccgguuucauugaagggggguggacuggaaugguagaugguugguaugguuaucaccaucagaaugagcaaggaucuggguaugcugcagaucaaaaaagcacacaaaaugccauuaacgggauuacaaacaaggugaauucuguaauugagaaaaugaacacucaauucacagcugugggcaaagaauucaacaaauuggaaagaaggauggaaaacuuaaauaaaaaaguugaugauggguuucuagacauuuggacauauaacgcagaauuguugguucuacuggaaaaugaaaggacuuuggacuuccaugacuccaacgugaagaaucuguaugagaaaguaaaaagccaauuaaagaauaaugccaaagaaauaggaaacggguguuuugaauucuaucacaaguguaacgaugaaugcauggagagugugaaaaauggaacuuaugacuauccaaaauauuccgaagaaucaaaguugaacagggagagaauugauggagugaaauuggaaucaaugggagucuaucagauucuggcgaucuacucaacagucgccaguucccugguucuuuuggucucccugggggcaaucagcuucuggauguguuccaaugggucuuugcaguguagaauaugcaucuaa

SEQ ID NO: 33664 - RNA, 1701 nt, Artificial Sequence
  derived and/or modified CDS sequence (wt) from hemagglutinin__InfluenzaA__ABP49404
augaagacuaucauugcuuugagcuacacucuaugucugguuuucgcucaaaaacuucccggaaaugacaacagcacggcaacgcugugccuugggcaccaugcaguaccaaacggaacgauagugaaaacaaucacgaaugaccaaauugaaguuacuaaugcuacugagcugguucagaguuccucaacagguggaauaugcgacaguccucaucagauccuugauggagaaaacugcacacuaauaggugcucuauugggagacccucagugugauggcuuccaaaauaagaaaugggaccuuuuuguugaacgcagcaaagccuacagcaauuguuacccuuaugaugugccggauuaugccucccuuaggucacuaguugccucauccggcacacuggaguuuaacaaugaaagcuucaauuggacuggagucacucaaaauggaacaagcucugcuugcaaaaggagaucuaauaacaguuucuuuaguagauugaauugguugacccauuuaaaauucaaauacccagcauugaacgugacuaugccaaacaaugaaaaauuugacaaauuguacauuugggggguucaccacccggguacguacaaugaccaaaucagccuauaugcucaagcaucaggaagaaucacagucucuaccaaaagaagccaacaaacuguaaucccgaauaucggaucuagacccaggguaagggauauccccagcagaauaagcaucuauuggacaauaguaaaaccgggagacauacuuuugauuaacagcacagggaaucuaauugcuccucgggguuacuucaaaauacgaagugggaaaagcucaauaaugagaucagaugcaccuauuggcaaaugcaauucugaaugcaucacuccaaauggaagcauucccaaugacaaaccauuucaaaauguaaacaggaucacauauggggccugucccagauauguuaagcaaaacacucugaaauuggcaacagggaugcgaaauguaccagagaaacaaacuagaggcauauuuggcgcaaucgcggguuucauagaaaaugguugggagggaaugguggaugguugguacgguuucaggcaucaaaauucggaaggaauaggacaagcagcagaucucaaaagcacucaagcagcaaucaaccaaaucaaugggaagcugaauagguugaucgggaaaaccaacgagaaauuccaucagauugaaaaagaauucucagaaguagaagggagaauucaggaccucgagaaauauguugaggacacuaaaauagaucucuggucauacaacgcggagcuucuuguugcccuggagaaccaacauacaauugaucuaacugacucagaaaugaacaaacuguuugaaagaacaaagaagcaacugagggaaaaugcugaggauaugggcaaugguuguuucaaaauauaccacaaaugugacaaugccugcauagggucaaucagaaauggaacuuaugaccaugauguauacagagaugaagcauuaaacaaccgguuccagaucaaagguguugagcugaagucaggauacaaagauuggauccuauggauuuccuuugccauaucauguuuuuugcuuuguguugcuuuguugggguucaucaugugggccugccaaaaaggcaacauuagaugcaacauuugcauuuga

SEQ ID NO: 33665 - RNA, 1701 nt, Artificial Sequence; identical to SEQ ID NO: 32662
  derived and/or modified CDS sequence (wt) from hemagglutinin__InfluenzaA__ABP49415

SEQ ID NO: 33666 - RNA, 1701 nt, Artificial Sequence
  derived and/or modified CDS sequence (wt) from hemagglutinin__InfluenzaA__ABP49426
augaagacuaucauugcuuugagcuacauuuuaugucugguuuucgcucaaaaacuuccaggaaaugacaacagcacggcaacgcugugccuggggcaccaugcagugccaaacggaacgcuagugaaaacaaucacgaaugaccaaauugaagugacuaaugcuacugagcugguucagaguuccucaacagguggaauaugcgacaguccucaccaaauccuugauggagaaaacugcacacuaauagaugcucuauugggagacccucauugugauggcuuccaaaauaaggaaugggaccuuuuuguugaacgcagcaaagccuacagcaacuguuacccuuaugaugugccggauuaugccucccuuaggucacuaguugccucauccggcacacuggaguuuaacaaugaaagcuucaauuggacuggagucgcucagaauggaacaagcucugcuugcaaaaggagaucuaauaaaaguuucuuuaguagauugaauugguugcaccaauuaaaauacaaauacccagcacugaacgugacuaugccaaacaaugaaaaauuugacaaauuguacauuugggggguucaccacccgaguacggacagugaccaaaucagccuauaugcucaagcaccagggagagucacagucucuaccaaaagaagccaacaaacuguaaucccgaauaucggaucuagacccuggguaaggggugucuccagcagaauaagcaucuauuggacaauaguaaaaccgggagacauacuuuugauuaacugcacagggaaucuaauugcuccucgggguuacuucaaaauacgaagugggaaaagcucaauaaugaggucagaugcauccauuggcaaaugcaauucugaaugcaucacuccaaauggaagcauucccaaugacaaaccauuucaaaauguaaacaggaucacauauggggccugucccagauauguuaagcaaaacacucugaaauuggcaacagggaugcggaauguaccagagaaacaaacuagaggcauauucggcgcaaucgcggguuucauagaaaaugguugggagggaaugguggacgguugguacgguuucaggcaucaaaauucugagggcacaggacaagcagcagaucucaaaagcacucaagcagcaaucaaccaaaucaacgggaaacugaauagguuaaucgagaaaacgaacgagaaauuccaucaaauugaaaaagaauucucagaaguggaagggagaauucaggaccucgagaaauauguugaggacacuaaaauagaucucuggucguacaacgcggagcuucuuguugcccuggagaaccagcauacaauugaucuaacugacucagaaaugaacaaacuguuugaaagaacgaagaagcaacugagggaaaaugcugaggauaugggcaaugguuguuucaaaauauaccacaaaugugacaaugccugcauagggucaaucagaaaugggacuuaugaccaugauguauacagagacgaagcauuaaacaaccgguuccagaucaaagguguugagcugaagucaggauacaaagauuggauccuauggauuuccuuugccauaucauguuuuuugcuuuguguugucuugcugggguucaucaugugggccugccaaaaaggcaacauuaggugcaacauuugcauuuga

SEQ ID NO: 33667 - RNA, 1689 nt, Artificial Sequence
  derived and/or modified CDS sequence (wt) from hemagglutinin__InfluenzaA__ABP49437
auggccaucauuuaucucauucuccuguucacagcagugagaggggaccagauaugcauuggauaccaugccaauaauuccacagagaaggucgacacaauucuagagcggaacgucacuguaacucaugccaaggacauucuugagaagacccauaacggaaaguuaugcaaacuaaacggaaucccuccacuugaacuaggggacuguagcauugccggauggcuccuuggaaauccagaaugugauaggcuucuaagugugccagaaugguccuauauaauggagaaagaaaacccgagagacgguuuguguuauccaggcagcuucaaugauuaugaagaauugaaacaucuccucagcagcgugaaacauuucgagaaaguaaagauucugcccaaagauagauggacacagcauacaacaacuggagguucacgggccugcgcggugucugguaauccaucauucuucaggaacauggucuggcugacaaagaaaggaucaaauuauccgguugccaaaggaucguacaacaauacaagcggagaacaaaugcuaauaauuuggggggugcaccaucccaaugaugagacagaacaaagaacauuguaccagaaugugggaaccuauguuuccguaggcacaucaacauugaacaaaaggucaaccccagaaauagcaacaaggccuaaagugaauggacuaggagguagaauggaauucucuuggacccucuuggauaugugggacaccauaaauuuugagaguacugguaaucuaauugcaccagaguauggauucaaaauaucgaaaagagguaguucagggaucaugaaaacagaaggaacacuugagaacugugagaccaaaugccaaacuccuuugggagcaauaaauacaacauugccuuuucacaauguccacccacugacaauaggugagugccccaaauauguaaaaucggagaaguuggucuuagcaacaggacuaaggaauguuccccagauugaaucaagaggauuguuuggggcaauagcugguuuuauagaaggaggauggcaaggaaugguugaugguugguauggauaccaucacagcaaugaccagggaucaggguaugcagcagacaaagaauccacucaaaaggcauuugauggaaucaccaacaagguaaauucugugauugaaaagaugaacacccaauuugaagcuguugggaaagaauucaguaacuuagagagaagacuggagaacuugaacaaaaagauggaagacggguuucuagauguguggacauacaaugcugagcuucuaguucugauggaaaaugagaggacacuugacuuucaugauucuaaugucaagaaucuguaugauaaagucagaaugcagcugagagacaacgucaaagaacuaggaaauggauguuuugaauuuuaucacaaaugugaugaugaaugcaugaauagugugaaaaacgggacguaugauuaucccaaguaugaagaagagucuaaacuaaauagaaaugaaaucaaagggguaaaauugagcagcauggggguuuaucaaauccuugccauuuaugcuacaguagcagguucucugucacuggcaaucaugauggcugggaucucuuucuggaugugcuccaacgggucucugcagugcaggaucugcauauga

SEQ ID NO: 33668 - RNA, 1701 nt, Artificial Sequence
  derived and/or modified CDS sequence (wt) from hemagglutinin__InfluenzaA__ABP49448
augaaagcaaaacuacugguccuguuaugugcacuuucagcuacagaugcagacacaauauguauaggcuaccaugcgaacaacucaaccgacacuguugacacaguacucgaaaagaacgugacagugacacacucugucaaccuacuugaggacagucacaacggaaaacuaugcagacuaaaaggaauagccccacuacaauuggggaaaugcagcauugccggauggaucuuaggaaacccagaaugcgaaucacuguuuucuaagaaaucaugguccuacauugcagaaacaccaaacuccgagaauggaacauguuacccaggauauuucgccgacuaugaggaacugagggagcaauugaguucaguaucaucauucgagagauucgaaauauuccccaaggaaagaucauggcccaaacacaacguaaccagaggaguaacggcaucaugcucccauaaggggaaaagcaguuuuuacagaaauuugcuauggcugacggagaaaaauggcucguacccaaaucugagcaaguccuaugugaacaacaaagagaaagaaguccuuguacuaugggguguucaucacccgucuaacauagaggaccaaaagaccaucuaucggaaagaaaaugcuuaugucucuguagugucuucaaauuauaacaggagauucaccccagaaauaucagaaagacccaaaguaagaggucaagaagggagaauuaacuacuacuggacucugcuggaacccggggacacaauaauauuugaggcaaauggaaaucuaauagcgccaugguaugcuuucgcacugaguagaggcuuugggucaggaaucaucaccucaaacgcaucgauggaugaaugugacacgaagugucaaacaccccagggagcuauaaacaguagucuuccuuuccagaauguacacccagucacaauaggagagugcccaaaauacgucaggaguacaaaauuaaggaugguuacaggacuaaggaacaucccauccauucaauccagaggucuguuuggagccauugccgguuucauugaagggggauggacuggaaugauagauggaugguaugguuaucaucaucagaaugaacagggaucuggcuaugcugcggaucaaaaaagcacacaaaaugccauuaacgggauuacaaacaaggugaacucuguuaucgagaaaaugaacacucaauucacagcuguggguaaagaauucaacaaauuagaaaaaaggauggaaaacuuaaauaaaaaaguugaugauggauuucuggacauuuggacauauaaugcagaauuguugguucuacuggaaaaugaaaggacuuuggauuuucaugacucaaaugugaagaaucuguaugagaaaguaaaaagccaauuaaagaauaaugccaaagaaauaggaaacggguguuuugaauucuaccacaaguguaacaaugaaugcauggaaaguguaaaaaauggaacuuaugacuauccaaaauauucagaggaaucaaaguuaaacagggaaaaaauugauggagugaaauuggaaucaaugggagucuaucagauucuggcgaucuacucaacugucgccaguucacuggugcuuuuggucucccugggggcaaucagcuucuggauguguucuaaugggucuuugcagugcagaauaugcaucuga

SEQ ID NO: 33669 - RNA, 1689 nt, Artificial Sequence
  derived and/or modified CDS sequence (wt) from hemagglutinin__InfluenzaA__ABP49459
auggccaucauuuaucucauucuccuguucacagcagugagaggggaccagauaugcauuggauaccaugccaauaauuccacagagaaggucgacacaauucuagagcggaacgucacugugacucaugccaaggacauucuugagaagacccauaacggaaaguuaugcaaacuaaacggaaucccuccacuugaacuaggggacuguagcauugccggauggcuccuuggaaauccagaaugugauaggcuucuaagugugccagaaugguccuauauaauggagaaagaaaacccgagagacgguuuguguuauccaggcagcuucaaugauuaugaagaauugaaacaucuccucagcagcgugaaacauuucgagaaaguaaagauucugcccaaagauagauggacacagcauacaacaacuggagguucacgggccugcgcggugucugguaauccaucauucuucaggaacauggucuggcugacaaagaaaggaucaaauuauccgguugccaaaggaucguacaacaauacaagcggagaacaaaugcuaauaauuuggggggugcaccaucccaaugaugagacagaacaaagaacauuguaccagaaugugggaaccuauguuuccguaggcacaccaacauugaacaaaaggucaaccccagacauagcaacaaggccuaaagugaauggacaaggagguagaauggaauucucuuggacccuauuggauaugugggacaccauaaauuuugagaguacugguaaucuaauugcaccagaguauggauucaaaauaucgaaaagagguaguucagggaucaugaaaacagaaggaacacuugggaacugugagaccaaaugccaaacuccuuugggagcaauaaauacaacauugccuuuucacaauguccacccacugacaauaggugagugccccaaauauguaaaaucggagaaguuggucuuagcaacaggacuaaggaauguuccccagauugaaucaagaggauuguuuggggcaauagcugguuuuauagaaggaggauggcaaggaaugguugaugguugguauggauaccaucacagcaaugaccagggaucaggguaugcagcagacaaagaauccacucaaaaggcauuugauggaaucaccaacaagguaaauucugugauugaaaagaugaauacccaauuugaagcuguugggaaagaauucaguaacuuagagagaagacuggagaacuugaacaaaaagauggaagacggguuucuagauguguggacauacaaugcugagcuucuaguucugauggaaaaugagaggacacuugacuuucaugauucuaaugucaagaaucuguaugauaaagucagaaugcagcugagagacaacgucaaagaacuaggaaauggauguuuugaauuuuaucacaaaugugaugaugaaugcaugaauagugugaaaaacgggacguaugauuaucccaaguaugaagaagagucuaaacuaaauagaaaugaaaucaaagggguaaaauugagcagcauggggguuuaucaaauccuugccauuuaugcuacaguagcagguucucugucacuggcaaucaugauggcugggaucucuuucuggaugugcuccaacgggucucugcagugcaggaucugcauauga

SEQ ID NO: 33670 - RNA, 1689 nt, Artificial Sequence
  derived and/or modified CDS sequence (wt) from hemagglutinin__InfluenzaA__ABP49470
auggccaucauuuaucucauucuccuguucacagcagugagaggagaccagauaugcauuggauaccaugccaauaauuccacagagaaggucgacacaauucuagagcggaacgucacugugacucaugccaaggacauucuugagaagacccauaacggaaaguuaugcaaacuaaacggaaucccuccacuugaacuaggggacuguagcauugccggauggcuccuuggaaauccagaaugugauaggcuucuaagugugccagaaugguccuauauaauggagaaagaaaacccgagagacgguuuguguuauccaggcagcuucaaugauuaugaagaauugaaacaucuccucagcagcgugaaacauuucgagaaaguaaagauucugcccaaagauagauggacacagcauacaacaacuggagguucacgggccugcgcggugucugguaauccaucauucuucaggaacauggucuggcugacaaagaaaggaucaaauuauccgguugccaaaggaucguacaacaauacaagcggagaacaaaugcuaauaauuuggggggugcaccaucccaaugaugagacagaacaaagaacauuguaccagaaugugggaaccuauguuuccguaagcacaucaacauugaacaaaaggucaaccccagacauagcaacaaggccuaaagugaauggacuaggagguagaauggaauucucuuggacccuauuggauaugugggacaccauaaauuuugagaguacugguaaucuaauugcaccagaguauggauucaaaauaucgaaaagagguaguucagggaucaugaaaacagaaggaacacuugggaacugugagaccaaaugccaaacuccuuugggagcaauaaauacaacauugccuuuucacaauguccacccacugacaauaggugagugccccaaauauguaaaaucggagaaguuggucuuagcaacaggacuaaggaauguuccccagauugaaucaagaggauuguuuggggcaauagcugguuuuauagaaggaggauggcaaggaaugguugaugguugguauggauaccaucacagcaaugaccagggaucaggguaugcagcagacaaagaauccacucaaaaggcauuugauggaaucaccaacaagguaaauucugugauugaaaagaugaacacccaauuugaagcuguugggaaagaauucaguaacuuagagagaagacuggagaacuugaacaaaaagauggaagacggguuucuagauguguggacauacaaugcugagcuucuaguucugauggaaaaugagaggacacuugacuuucaugauucuaaugucaagaaucuguaugauaaagucagaaugcagcugagagacaacgucaaagaacuaggaaauggauguuuugaauuuuaucacaaaugugaugaugaaugcaugaauagugugaaaaacgggacguaugauuaucccaaguaugaagaagagucuaaacuaaauagaaaugaaaucaaagggguaaaauugagcagcauggggguuuaucaaauccuugccauuuaugcuacaguagcagguucucugucacuggcaaucaugauggcugggaucucuuucuggaugugcuccaacgggucucugcagugcaggaucugcauauga

SEQ ID NO: 33671 - RNA, 1701 nt, Artificial Sequence
  derived and/or modified CDS sequence (wt) from hemagglutinin__InfluenzaA__ABP49492
augaagacuaucauugcuuugagcuacauuuucugucugguuuuugcccaaggccuuccaggaaaugacaacagcacagcaacucugugccugggacaucaugcggugccaaacggaacgcuagugaaaacaaucacgaaugaucagauugaagugacuaaugcuacugaacugguucagaguuccucaacggguaaaauaugcgacaauccucaucgaauccuugauggaauaaacugcacacugauagaugcucuauugggggacccucauugugauggcuuucaaaaugagaaaugggaccuuuucguugaacgcagcaaagcuuucagcaacuguuacccuuaugaugugccagauuaugccucccuuaggucacuaguugccucgucaggcacucuggaguuuaucaaugaaggcuucaauuggacuggggucacucagaaugggggaagcaguucuugcaaaaggggaccugauaacgguuuuuucaguagacugaacugguuguacaaaucaggaagcacauauccagugcagaacgugaccaugccaaacaaugacaacucugacaaacuauacauuugggggguucaccacccgagcacggacaaagaacaaaccgaccuauauguucaagcaucagggaaagucacagucuccaccaagagaagccagcaaacuguaaucccgaaugucgggucuagacccuggguaaggggucugucuaguagaguaagcaucuauuggacaauaguuaaaccgggagacauacugguaauuaauaguaauggaaaccuaauugcuccucgggguuacuucaaaaugcgcacugggaaaagcucaauaaugaggucagaugcaccuauuggcaccugcagcucugaaugcaucacuccaaauggaagcauucccaaugacaagcccuuucaaaacguaaacaagaucacauauggggcaugucccaaguauguuaagcaaaacacucugaaguuggcaacagggaugcggaauguaccagagaaacaaacuagaggcauauucggcgcaauagcagguuucauagaaaaugguugggagggaaugauagacgguugguacgguuucaggcaucaaaauucugagggcacaggacaagcagcagaucuuaaaagcacucaagcagccaucgaccaaaucaaugggaaacugaauaggguaaucgagaagacgaacgagaaauuccaucaaaucgaaaaggaauucucagaaguagaagggagaauucaggaccucgagaaauacguugaagacacuaaaauagaucucuggucuuacaaugcggagcuucuugucgcucuggagaaccaacauacaauugaucugacugacucggaaaugaacaaacuguuugaaaaaacaaggaggcaacugagggaaaaugcugaggacaugggcaaugguugcuucaaaauauaccacaaaugugacaaugcuugcauagggucaaucagaaaugggacuuaugaccaugauguauacagagacgaagcauuaaacaaccgguuucagaucaaagguguugaacugaagucaggauacaaagacuggauccuguggauuuccuuugccauaucaugcuuuuugcuuuguguuguuuugcugggguucaucaugugggccugccagaaaggcaacauuaggugcaacauuugcauuuga

SEQ ID NO: 33672 - RNA, 1701 nt, Artificial Sequence
  derived and/or modified CDS sequence (wt) from hemagglutinin__InfluenzaA__ABP49503
augaagaccaucauugcuuugagcuacauuuucugucuggcucucggccaagaccuuccaggaaaugacaacagcacagcaacgcugugccugggacaucaugcggugccaaacggaacacuagugaaaacaaucacagaugaucagauugaagugacuaaugcuacugagcuaguucagagcuccucaacggggaaaauaugcaacaauccucaucgaauccuugauggaauaaacugcacacugauagaugcucuauugggggacccucauugugauguuuuucaagaugagacaugggaccuuuucguugaacgcagcaaagcuuucagcaacuguuacccuuaugaugugccagauuaugccucccuuaggucacuaguugccucgucaggcacucuggaguuuaucacugaggguuucacuuggacuggggucacucagaaugggggaagcaaugcuugcaaaaggggaccugguagcgguuuuuucaguagacugaacugguugaccaaaucaggaagcacauauccagugcugaacgugacuaugccaaacaaugacaauuuugacaaacuauacauuugggggguucaccacccgagcacgaaccaagaacaaaccagccuguauguucaagcaucagggagagucacagucucuaccaggagaagccagcaaacuauaaucccgaauaucggguccagacccuggguaaggggucugucuaguagaauaagcaucuauuggacaauaguuaagccgggagacguacugguaauuaauaguaauggaaaccuaaucgcuccucgggguuauuucaaaaugcgcacugggaaaagcucaauaaugaggucagaugcaccuauugauaccuguauuucugaaugcaucacuccaaauggaagcauucccaaugacaagcccuuucaaaacguaaacaagaucacauauggagcaugccccaaguauguuaagcaaaacacccugaaguuggcaacagggaugcggaauguaccagagaaacaaacuagaggccuauucggcgcaauagcaggcuucauagaaaaugguugggagggaaugauagacgguugguacgguuucaggcaucaaaauucugagggcacaggacaagcagcagaucuuaaaagcacucaagcagccaucgaccaaaucaaugggaaauugaacaggguaaucgagaagacgaacgagaaauuccaucaaaucgaaaaggaauucucagaaguagaagggagaauucaggaccucgagaaauacguugaagacacuaaaauagaucucuggucuuacaaugcggagcuucuugucgcucuggagaaucaacauacaauugaccugacugacucggaaaugaacaagcuguuugaaaaaacaaggaggcaacugagggaaaaugcugaagacaugggcaaugguugcuucaaaauauaccacaaaugugacaacgcuugcauagagucaaucagaaaugggacuuaugaccaugauguauacagagacgaagcauuaaacaaccgguuucagaucaaagguguugaacugaagucuggauacaaagacuggauccuguggauuuccuuugccauaucaugcuuuuugcuuuguguuguuuugcugggguucaucaugugggccugccagagaggcaacauuaggugcaacauuugcauuuga

SEQ ID NO: 33673 - RNA, 1701 nt, Artificial Sequence
  derived and/or modified CDS sequence (wt) from hemagglutinin__InfluenzaA__ABP49514
augaagaccaucauugcuuugagcuacauuuucuaucuggcucucggccaagaccuuccaggaaaugacaacagcacagcaacgcugugccugggacaucaugcggugccaaacggaacacuagugaaaacaaucacaaaugaucagauugaagugacuaaugcuacugagcuaguucagagcuccucaacggggaaaauaugcaacaauccucaucgaauccuugauggaauagacugcacacugauagaugcucuauugggggacccucauugugauguuuuucaaaaugagacaugggaccuuuucguugaacgcagcaaagcuuucagcaacuguuacccuuaugaugugccagauuaugccucccuuaggucacuaguugccucgucaggcacucuggaguuuaucacugaggguuucacuuggacuggggucacucagaaugggggaagcaaugcuugcaaaaggggaccugguagcgguuuuuucaguagacugaacugguugaccaaaucaggaagcacauauccagugcugaacgugacuaugccaaacaaugacaauuuugacaaacuauacauuugggggguucaccacccgagcacgaaccaagaacaaaccagccuguauguucaagcaucagggagagucacagucucuaccaggagaagccagcaaacuauaaucccgaauaucggguccagacccuggguaaggggucugucuaguagaauaagcaucuauuggacaauaguuaagccgggagacguacugguaauuaauaguaaugggaaccuaaucgcuccucgggguuauuucaaaaugcgcacugggaaaagcucaauaaugaggucagaugcaccuauugauaccuguauuucugaaugcaucacuccaaauggaagcauucccaaugacaagcccuuucaaaacguaaacaagaucacauauggagcaugccccaaguauguuaagcaaaacacccugaaguuggcaacagggaugcggaauguaccagagaaacaaacuagaggccuauucggugcaauagcagguuucauagaaaaugguugggagggaaugauagacgguugguacgguuucaggcaucaaaauucugagggcacaggacaagcagcagaucuuaaaagcacucaagcagccaucgaccaaaucaaugggaaauugaacaggguaaucgagaagacgaacgagaaauuccaucaaaucgaaaaggaauucucagaaguagaagggagaauucaggaccucgagaaauacguugaagacacuaaaauagaucucuggucuuacaaugcggagcuucuugucgcucuggagaaucaacauacaauugaccugacugacucggaaaugaacaagcuguuugaaaaaacaaggaggcaacugagggaaaaugcugaagacaugggcaaugguugcuucaaaauauaccacaaaugugacaacgcuugcauagagucaaucagaaaugggacuuaugaccaugauguauacagagacgaagcauuaaacaaccgguuucagaucaaagguguugaacugaagucuggauacaaagacuggauccuguggauuuccuuugccauaucaugcuuuuugcuuuguguuguuuugcugggauucaucaugugggccugccagagaggcaacauuaggugcaacauuugcauuuga

SEQ ID NO: 33674 - RNA, 1701 nt, Artificial Sequence
  derived and/or modified CDS sequence (wt) from hemagglutinin__InfluenzaA__ABQ01311
augaaagcaagacuacugauccuguuaugugcacuuucagcuacagaugcagacacaauauguauaggcuaccaugcgaacaauucaaccgacacuguugacacaguacucgaaaagaaugugacagugacacacucuguaaaccuacucgaagacagccacaacgggaaauuaugcagauuaaaaggaauagccccacuacaauuggggaaauguaacauugccggauggaucuugggaaacccagaaugcgaaucauugcucucuaauagaucaugguccuacauugcagaaacaccaaacucugagaauggaacauguuacccaggagauuucgccgacuaugaggaacugagggagcaauugagcucaguaucaucauucgagagauucgaaauauuccccaaggaaagaucauggcccaaacacaacauaaccagaggaguaacggcagcaugcucccacgcgaagaaaagcaguuuuuacaaaaauuugcucuggcugacggaggcaaauggcucauacccaaaucugagcaaguccuaugugaacaacaaagagaaagaaguccuugugcuaugggguguucaucacccgucuaaaauagaggaucaaaggacccucuaucggaaagaaaaugcuuaugucucuguggugucuucaaauuauaacaggagauucaccccggaaauagcagaaagacccaaaguaagaggucaagcagggagaaugaacuauuacuggacuuugcuagaacccggagacaaaauaauauuugaggcaaauggaaaccuaauagcgccaugguaugcuuucgcacugaguagaggccuuggaucaggaaucaucaccucaaacgcaucaauggaugaaugugacacgaagugucaaacaccccagggagcuauaaacaguagucucccuuuucagaacauacacccagucacaauaggagagugcccaaaauaugucaggaguaccaaauugaggaugguuacaggacuaaggaacaucccauccauucaauccagaggucuguuuggagccauugccgguuucauugaagggggauggacuggaaugguagauggaugguaugguuaccaucaucaaaaugaacagggaucuggcuaugcugcggaucaaaaaagcacacaaaaugccauuaacgggauuacaaauaaggugaacucuguuaucgagaaaaugaacacucaauucacagcuguggguaaagaauucaacaaauuggaaaaaagaauggaaaacuuaaauaaaaaaguugaugauggauuucuggacauuuggacauauaaugcagaauuguugguucuacuggaaaaugaaaggacuuuggauuuccaugacucaaaugugaagaaucuguaugagaaaguaaaaaaccaauugagaaauaaugcaaaggaaauaggaaacggguguuuugaguucuaccacaagugugacaaugaaugcauggaaaguguaaaaaauggaacuuaugauuacccaaaguauucagaggaaucaaaguuaaacagggaaaaaauugauggagugaaauuggaaucaaugggggucuaucagauucuggcgaucuacucaacugucgccaguucacuggugcuucuggucucccugggggcaaucagcuucuggauguguuccaaugggucuuugcaaugcagaauaugcaucuga

SEQ ID NO: 33675 - RNA, 1701 nt, Artificial Sequence
  derived and/or modified CDS sequence (wt) from hemagglutinin__InfluenzaA__ABQ01322
augaaagcaaaacuacugguccuguuaugugcacuuucagcuacagaugcagacacaauauguauaggcuaccaugcgaacaacucaaccgacacuguugacacaguacucgaaaagaacgugacagugacacacucugucaaccuacuugaggacagucacaacggaaaacuaugcagacuaaaaggaauagcuccacuacauuuggggaaaugcagcauugccggauggauauuaggaaacccagaaugcgaaucacuguuuucuaagaaaucaugguccuacauugcagaaacaccaaacuccgagaauggaacauguuacccaggauauuucgccgacuaugaggaacugagggagcaauugaguucaguaucaucauucgagagauucgaaauauuccccaaggaaagaucauggcccaaacacaacguaaccagaggaguaacggcagcaugcucccauaaggggaaaagcaguuuuuacagaaauuugcuauggcugacggagaaaaauggcucguacccaaaucugagcaaguccuaugugaacaacaaagagaaagaaguccuuguacuaugggguguucaucacccgucuaacauagaggaccaaaagaccaucuaucggaaagaaaaugcuuaugucucuguagugucuucaaauuauaacaggagauucaccccagaaauagcaaaaagacccaaaguaagaggucaagaagggagaauuaacuacuacuggacucugcuggaacccggggacacaauaauauuugaggcaaauggaaaucuaauagcgccaugguaugcuuucgcacugaguagaggcuuugggucaggaaucaucaccucaaacgcaucgauggaugaaugugacgcgaagugucaaacaccccagggagcuauaaacaguagccuuccuuuccagaauguacacccagucacaauaggagagugcccaaaauacgucaggaguacaaaauuaaggaugguuacaggacuaagaaacaucccauccauucaauccagaggucuguuuggagccauugccgguuucauugaagggggauggacuggaaugauagauggaugguaugguuaucaucaucagaaugaacagggaucuggcuaugcugcggaucaaaaaagcacacaaaaugccauuaacgggauuacaaacaaggugaacucuguuaucgagaaaaugaacacucaauucacagcuguggguaaagaauucaacaaauuagaaaaaaggauggaaaacuuaaauaaaaaaguugaugauggauuucuggacauuuggacauauaaugcagaauuguugguucuacuggaaaaugaaaggacuuuggauuuucaugacucaaaugugaagaaucuguaugagaaaguaaaaagccaauuaaagaauaaugccaaagaaauaggaaacggguguuuugaauucuaccacaaguguaacaaugaaugcauggaaaguguaaaaaauggaacuuaugacuauccaaaauauucagaggaaucaaaguuaaacagggaaaaaauugauggagugaaguuggaaucaaugggagucuaucagauucuggcgaucuacucaacugucgccaguucacuggugcuuuuggucucccugggggcaaucagcuucuggauguguucuaaugggucuuugcagugcagaauaugcaucuga

SEQ ID NO: 33676 - RNA, 1701 nt, Artificial Sequence
  derived and/or modified CDS sequence (wt) from hemagglutinin__InfluenzaA__ABQ01333
augaagacuaucauugcuuugagcuacauuuuaugucugguuuucgcucaaaaacuucccggaaaugacaacagcacggcaacgcugugccuggggcaccaugcagugccaaacggaacgcuagugaaaacaaucacgaaugaccaaauugaagugacuaaugcuacugagcugguucagaguuccucaacagguggaauaugcgacaguccucaccaaauccuugauggagaaaacugcacacuaauagaugcucuauugggagacccucauugugauggcuuccaaaauaaggaaugggaccuuuuuguugaacgcagcaaagccuacagcaacuguuacccuuaugaugugccggauuaugccucccuuaggucacuaguugccucauccggcacacuggaguuuaacaaugaaagcuucaauuggacuggagucgcucagaauggaacaagcucugcuugcaaaaggagaucuaauaaaaguuucuuuaguagauugaauugguugcaccaauuaaaauacaaauacccagcacugaacgugacuaugccaaacaaugaaaaauuugacaaauuguacauuugggggguucaccacccgaguacggacagugaccaaaucagccuauaugcucaagcaccagggagagucacagucucuaccaaaagaagccaacaaacuguaaucccgaauaucggaucuagacccuggguaaggggugucuccagcagaauaagcaucuauuggacaauaguaaaaccgggagacauacuuuugauuaacugcacagggaaucuaauugcuccucgggguuacuucaaaauacgaagugggaaaagcucaauaaugaggucagaugcauccauuggcaaaugcaauucugaaugcaucacuccaaauggaagcauucccaaugacaaaccauuucaaaauguaaacaggaucacauauggggccugucccagauauguuaagcaaaacacucugaaauuggcaacagggaugcggaauguaccagagaaacaaacuagaggcauauucggcgcaaucgcggguuucauagaaaaugguugggagggaaugguggacgguugguacgguuucaggcaucaaaauuccgagggcacaggacaagcagcagaucucaaaagcacucaagcagcaaucaaccaaaucaacgggaaacugaauagguuaaucgagaaaacgaacgagaaauuccaucaaauugaaaaagaauucucagaaguggaagggagaauucaggaccucgagaaauauguugaggacacuaaaauagaucucuggucguacaacgcggagcuucuuguugcccuggagaaccagcauacaauugaucuaacugacucagaaaugaacaaacuguuugaaagaacaaagaagcaacugagggaaaaugcugaggauaugggcaaugguuguuucaaaauauaccacaaaugugacaaugccugcauagggucaaucagaaaugggacuuaugaccaugauguauacagagacgaagcauuaaacaaccgguuccagaucaaagguguugagcugaagucaggauacaaagauuggauccuauggauuuccuuugccauaucauguuuuuugcuuuguguugucuugcugggguucaucaugugggccugccaaaaaggcaacauuaggugcaacauuugcauuuga

SEQ ID NO: 33677 - RNA, 1701 nt, Artificial Sequence
  derived and/or modified CDS sequence (wt) from hemagglutinin__InfluenzaA__ABQ01344
augaagacuaucauugcuuugagcuacauuuuaugucugguuuucgcucaaaaacuucccggaaaugacaacagcacggcaacgcugugccuggggcaccaugcagugccaaacggaacgcuagugaaaacaaucacaaaugaccaaauugaagugacuaaugcuacugagcugguucagaguuccucaacagguggaauaugcgacaguccucaccaaauccuugauggagaaaacugcacacuaauagaugcucuauugggagacccucauugugauggcuuccaaaauaaggaaugggaccuuuuuguugaacgcagcaaagccuacagcaacuguuacccuuaugaugugccggauuaugccucccuuaggucacuaguugccucauccggcacacuggaguuuaacaaugaaagcuucaauuggacuggagucgcucagaauggaacaagcucugcuugcaaaaggagaucuaauaaaaguuucuuuaguagauugaauugguugcaccaauuaaaauacaaauacccagcacugaacgugacuaugccaaacaaugaaaaauuugacaaauuguacauuugggggguucaccacccgaguacggacagugaccaaaucagccuauaugcucaagcaccagggagagucacagucucuaccaaaagaagccaacaaacuguaaucccgaauaucggaucuagacccuggguaaggggugucuccagcagaauaagcaucuauuggacaauaguaaaaccgggagacauacuuuugauuaacugcacagggaaucuaauugcuccucgggguuacuucaaaauacgaagugggaaaagcucaauaaugaggucagaugcauccauuggcaaaugcaauucugaaugcaucacuccaaauggaagcauucccaaugacaaaccauuucaaaauguaaacaggaucacauauggggccugucccagauauguuaagcaaaacacucugaaauuggcaacagggaugcggaauguaccagagaaacaaacuagaggcauauucggcgcaaucgcggguuucauagaaaaugguugggagggaaugguggacgguugguacgguuucaggcaucaaaauucugagggcacaggacaagcagcagaucucaaaagcacucaagcagcaaucaaccaaaucaacgggaaacugaauagguuaaucgggaaaacgaacgagaaauuccaucaaauugaaaaagaauucucagaaguggaagggagaauucaggaccucgagaaauauguugaggacacuaaaauagaucucuggucguacaacgcggagcuucuuguugcccuggagaaccagcauacaauugaucuaacugacucagaaaugaacaaacuguuugaaagaacaaagaagcaacugagggaaaaugcugaggauaugggcaaugguuguuucaaaauauaccacaaaugugacaaugccugcauagggucaaucagaaaugggacuuaugaccaugauguauacagagacgaagcauuaaacaaccgguuccagaucaaagguguugagcugaagucaggauacaaagauuggauccuauggauuuccuuugccauaucauguuuuuugcuuuguguugucuugcugggguucaucaugugggccugccaaaaaggcaacauuaggugcaacauuugcauuuga

SEQ ID NO: 33678 - RNA, 1689 nt, Artificial Sequence
  derived and/or modified CDS sequence (wt) from hemagglutinin__InfluenzaA__ABQ01355
auggccaucauuuaucucauucuccuguucacagcagugagaggggaccaaauaugcauuggauaccaugccaauaauuccacagagaaggucgacacaauucuagagcggaacgucacugugacucaugccaaggacauucuugagaagacccauaacgggaaguuaugcaaacuaaacggaaucccuccacuugaacuaggggacuguagcauugccggauggcuccuuggaaauccagaaugugauaggcuucuaagagugccagaaugguccuauauaauggagaaagaaaacccgagagacgguuuguguuauccaggcaguuucaaugauuaugaagaauugaaacaucuccucagcagcgugaaacauuucgagaaagugaggauuuugcccaaagauagauggacacagcauacaacaacuggagguucacgggccugcgcggugucugguaauccaucauucuucaggaacaugaucuggcugacaaagaaaggaucaaauuauccgguugccaaaggaucguacaacaacacaagcggagaacaaaugcuaauaauuuggggggugcaccaucccauugaugaaacagaacaaagaacauuguaccagaauguggaaaccuauguuuccguagucacaucaacauugaacaaaaggucaaccccgaaaauagcaacaaggccuaaagugaauggacuaggagguagaauggaauucucuuggacccuauuggauaugugggacaccauaaauuuugagaguacugguaaucuaauugcuccagaguauggauucaaaauaucgaaaagaggcaguucagggaucaugaaaacagaaggaacacuugagaacugugagaccaaaugccaaacuccuuugggagcaauaaauacaacauugccuuuucacaauguccacccacugacaauaggugagugccccaaauauguaaaaucggagaaguuggucuuagcaacaggacuaaggaauguuccccagauugaaucaagaggauuguuuggggcaauagcuggcuuuauagaaggaggauggcaaggaaugguugaugguugguauggauaccaucacagcaaugaccagggaucaggguaugcagcagacaaagaauccacucaaagggcauuugauggaaucacuaacaagguaaauucugugauugagaagaugaacacccaauuugaagcuguugggaaagaauucaguaacuuagagagaagacuggagaacuugaacaaaaagauggaagacggguuucuagauguguggacauacaaugcugagcuucuaguucugauggaaaaugagaggacacuugacuuucaugauucuaaugucaagaaucuguaugauaaagucagaaugcagcugagagacaacgucaaagaacuaggaaauggauguuuugaauuuuaucacaaaugugaugaugagugcaugaauagugugaaaaacgggacguaugauuaucccaaguaugaagaagagucuaaacuaaauagaaaugaaaucaaagggguaaaauugagcagcauggggguuuaucaaauccuugccauuuaugcuacaguagcagguucucugucacuggcaaucaugauggcugggaucucuuucuggaugugcuccaacgggucccugcagugcaggaucugcauauga

SEQ ID NO: 33679 - RNA, 1701 nt, Artificial Sequence
  derived and/or modified CDS sequence (wt) from hemagglutinin__InfluenzaA__ABQ01366
augaagacuaucauugcuuugagcuacauuuucugucugguuuucgcccaagaccuuccaggaaaugacaacagcacagcaacgcugugccugggacaucaugcggugccaaacggaacgcuagugaaaacaaucacgaaugaucagauugaagugacuaaugcuacugaacugguucagaguuccucaacggguaaaauaugcgacaauccucaucgaauccuugauggaauaaacugcacacugauagaugcucuauugggggacccucauugugauggcuuucaaaaugagaaaugggaccuuuucguugaacgcagcaaagcuuucagcaacuguuacccuuaugaugugccagauuaugccucccuuaggucacuaguugccucgucaggcacucuggaguuuaucaaugaaggcuucaauuggacuggggucacucagaaugggggaagcagugcuugcaaaaggggaccugauaacgguuuuuucaguagacugaacugguuguacaaaucaggaagcacauauccagugcagaacgugaccaugacaaacaaugacaauucugacaaacuauacauuugggggguccaccacccgagcacggacaaagaacaaaccgaccuauauguucaagcaucagggaaagucacagucuccaccaagagaagccagcaaacuauaaucccgaaugucgggucuagacccuggguaaggggucugucuaguagaguaagcaucuauuggacaauaguuaaaccgggagacauacugguaauuaauaguaauggaaaccuaauugcuccucgggguuacuucaaaaugcgcacugggaaaagcucaauaaugaggucagaugcaccuauuggcaccugcagcucugaaugcaucacuccaaauggaagcauucccaaugacaagcccuuucaaaacguaaacaagaucacauauggggcaugucccaaguauguuaagcaaaacacucugaaguuggcaacagggaugcggaauguaccagagaaacaaacuagaggcauauucggcgcaauagcagguuucauagaaaaugguugggagggaaugauagacgguugguacgguuucaggcaucaaaauucugagggcacaggacaagcagcagaucuuaaaagcacucaagcagccaucgaccaaaucaaugggaaacugaauaggguaaucgagaagacgaacgagaaauuccaucaaaucgaaaaggaauucucagaaguagaagggagaauucaggaccucgagaaauacguugaagacacuaaaauagaucucuggucuuacaaugcggagcuucuugucgcucuggagaaccaacauacaauugaucugacugacucggaaaugaacaaacuguuugaaaaaacaaggaggcaacugagagaaaaugcugaggacaugggcaaugguugcuucaaaauauaccacaaaugugacaaugcuugcauagggucaaucagaaaugggacuuaugaccaugauguauacagagacgaagcauuaaacaaccgguuucagaucaaagguguugaacugaagucaggauacaaagacuggauccuguggauuuccuuugccauaucaugcuuuuugcuuuguguuguuuugcugggguucauaaugugggccugccagaaaggcaacauuaggugcaacauuugcauuuga

SEQ ID NO: 33680 - RNA, 1701 nt, Artificial Sequence; identical to SEQ ID NO: 33445
  derived and/or modified CDS sequence (wt) from hemagglutinin__InfluenzaA__ABQ44383

SEQ ID NO: 33681 - RNA, 1701 nt, Artificial Sequence; identical to SEQ ID NO: 32669
  derived and/or modified CDS sequence (wt) from hemagglutinin__InfluenzaA__ABQ44405

SEQ ID NO: 33682 - RNA, 1701 nt, Artificial Sequence
  derived and/or modified CDS sequence (wt) from hemagglutinin__InfluenzaA__ABQ44416
augaaagcaaaacuacuaguccuguuaugugcauuuacagcuacagaugcagacacaauauguauaggcuaccaugcgaacaacucaaccgacacuguugacacaguacuugaaaagaacgugacagugacacacucugucaaccuacuugaggacagucacaacggaaaacuaugucgacuaaaaggaauagccccacuacaauuggguaauugcaguauugccggauggauuuuaggaaacccagaaugcgaaucacuguuuucuaagaaaucaugguccuacauugcagaaacaccaaacuccgagaauggaacauguuacccaggguauuucgcugacuaugaggaacugagggagcaauugaguucaguaucaucauucgagagauucgaaauauuccccaaagaaagcucauggcccaaccacaccguaaccaaaggaguaacggcaucaugcucccauaaggggaaaagcaguuuuuacagaaauuugcuauggcugacggagaagaauggcucguacccaaaucugagcaaguccuaugugaacaacaaagagaaagaaguccuuguacuaugggguguucaucacccgucuaacauaggggaccaaagggccaucuaucauacagaaaaugcuuaugucucuguagugucuucacauuauaacaggagauucaccccagaaauagcaaaaagacccaaaguaagagaucaagaaggaagaauuaacuacuacuggacucugcuggaacccgaggacacaauaauauuugaggcaaauggaaaucuaauagcgccaugguaugcuuuugcacugaguagaggcuuugggucaggaaucaucaccucaaacgcaucaauggaugaaugugacgcgaagugucaaacaccccagggagcuauaaacaguagucuuccuuuccagaauguacacccagucacaauaggagagugcccaaaguaugucaggaguacaaaauuaagaaugguuacaggacuaaggaacaucccauccauucaauccagagguuuguuuggagccauugccgguuucauugaagggggguggacuggaaugauagauggaugguaugguuaucaucaucagaaugaacaaggaucuggcuaugcugcggaucaaaaaagcacacaaaaugccauuaacgggauuacaaacaaggugaauucuguaaucgagaaaaugaacacucaauucacagcugugggcaaagaauucaacaaauuagaaagaaggauggaaaacuuaaauaaaaaaguugaugauggguuucuggacauuuggacauauaaugcagaauuguugguucuacuggaaaaugaaaggacuuuggauuuucaugacucaaaugugaagaaucuguaugagaaaguaaaaagccaauuaaagaacaaugccaaagaaauaggaaacggguguuuugaauucuaccacaaguguaacaaugaaugcauggaaagugugaaaaauggaacuuaugacuauccaaaauauuccgaggaaucaaaguuaaacagggaaaaaauugauggagugaaauuggaaucaaugggagucuaucagauucuggcgaucuacucaacugucgccaguucacuggugcuuuuggucucccugggggcaaucagcuucuggauguguucuaaugggucuuugcaguguagaauaugcaucuga

SEQ ID NO: 33683 - RNA, 1701 nt, Artificial Sequence; identical to SEQ ID NO: 32271
  derived and/or modified CDS sequence (wt) from hemagglutinin__InfluenzaA__ABQ44427

SEQ ID NO: 33684 - RNA, 1689 nt, Artificial Sequence
  derived and/or modified CDS sequence (wt) from hemagglutinin__InfluenzaA__ABQ44438
auggccaucauuuauuucauacuccuguucacagcagugaggggggaccagauaugcauuggauaccaugccaauaauuccacagaaaaggucgacacaauucuagagcggaaugucacugugacucaugccaaggacauccuugagaagacccauaacggaaagcuaugcaaacuaaacggaaucccuccacuugaacuaggggauuguagcauuaccggauggcuccuuggaaauccagaaugugauaggcuucuaagggugccagaaugguccuauauaauggagaaagaaaacccgagauacaguuuguguuauccaggcagcuucaaugacuaugaagaauugaaacaucuccucagcagcguaaaacacuucgagaaaguaaggauucugcccaaagauggauggacacaacauacaacaucuggagguucaaaggccugcgcagugucagguaaaucaucauucuucaggaacauggucuggcugacaaagaaaggaccaaauuauccgguugccaaaagaucguacaacaauacgagcggagagcaaaugcuaauaauuuggggagugcaccauccuaaugaugaggcagaacaaagugcauuguaccagaaagugggaaccuauguuuccgcaagcacaucaacauugaacaaaaggucaaccccagaaauagcagcaaggccugaagugaauggacuaggaaguagaauggaauucucuuggacccuauuggaugugugggacaccauaaauuuugagagcacugguaaucuaguugcaccagaguauggauucaaaauaucgaaaagagguaguucaggaaucaugaagacagaaggaacacuuggaaacugugagaccaaaugccaaacuccuuugggagcaauaaauacaacacuaccuuuucacaauguccacccacugacaauaggugaaugccccaaauauguaaaaucggagaaauuggucuuagcaacaggacuaaggaauguuccucagauugaaucaagaggauuguuuggggcaauagcuggcuuuauagaaggaggauggcaaggaaugguugaugguugguauggauaccaucacagcaaugaccagggaucaggguaugcagcagacaaagaauccacucaaaaggcauuugacagaaucaccaacaagguaaauucugugauugaaaagaugaacacucaauuugaagcuguugggaaagaauucaguaacuuagagaaaagacuggaaaacuugaacaaaaagauggaagacggguuucuagauguguggacauacaaugcugagcuucuaguucugauggaaaaugagaggacacuugacuuucaugauucuaaugucaagaaccuguauaauaaagucagaaugcagcugagagacaacgucaaagaacuaggaaauggauguuuugaauuuuaucacaaaugugacgaugaaugcaugaguagugugaaaaacgggacguaugauuaucccaaguaugaagaagaaucuaaacuaaagagaaaugaaaucaaagggguaaaauugagcagcauggggguuuaccaaauucuugccauuuaugcuacaguugcagguucucugucacuggcaaucaugauagcugggaucucuuuauggaugugcuccaacgggucucugcagugcagaaucugcauauga

SEQ ID NO: 33685 - RNA, 1689 nt, Artificial Sequence
  derived and/or modified CDS sequence (wt) from hemagglutinin__InfluenzaA__ABQ44460
auggccaucauuuaucucauucuccuguucacagcagugagaggggaccagauaugcauuggauaccaugccaauaauuccacagagaaggucgacacaauucuagagcggaacgucacugugacucaugccaaggacauucuugagaagacccauaacggaaaguuaugcaaacuaaacggaaucccuccacuugaacuaggggacuguagcauugccggauggcuccuuggaaauccagaaugugauaggcuucuaagugugccagaaugguccuauauaauggagaaagaaaacccgagagacgguuuguguuauccaggcagcuucaaugauuaugaagaauugaaacaucuccucagcagcgugaaacauuucgagaaaguaaagauucugcccaaagauagauggacacagcauacaacaacuggagguucacgggccugcgcggugucugguaauccaucauucuucaggaacaugaucuggcugacaaagaaaggaucaaauuauccgguugccaaaggaucguacaacaauacaagcggagaacaaaugcuaauaauuuggggggugcaccaucccaaugaugagacagaacaaagaacauuguaccagaaugugggaaccuauguuuccguaggcacaucaacauugaacaaaaggucaaccccagacauagcaacaaggccuaaagugaauggacuaggaaguagaauggaauucucuuggacccuauuggauaugugggacaccauaaauuuugagaguacugguaaucuaauugcaccagaguauggauucaaaauaucgaaaagagguaguucagggaucaugaaaacagaaggaacacuugggaacugugagaccaaaugccaaacuccuuugggagcaauaaauacaacauugccuuuucacaauguccacccacugacaauaggugagugccccaaauauguaaaaucggagaaguuggucuuagcaacaggacuaaggaauguuccccagauugaaucaagaggauuguuuggggcaauagcugguuuuauagaaggaggauggcaaggaaugguugaugguugguauggauaccaucacagcaaugaccagggaucaggguaugcagcggacaaagaauccacucaaaaggcauuugauggaaucaccaacaagguaaauucugugauugaaaagaugaacacccaauuugaagcuguugggaaagaauucaguaacuuagagagaagacuggagaacuugaacaaaaagauggaagacggguuucuagauguguggacauacaaugcugagcuucuaguucugauggaaaaugagaggacacuugacuuucaugauucuaaugucaagaaucuguaugauaaagucagaaugcagcugagagacaacgucaaagaacuaggaaauggauguuuugaauuuuaucacaaaugugaugaugaaugcaugaauagugugaaaaacgggacguaugauuaucccaaguaugaagaagagucuaaacuaaauagaaaugaaaucaaagggguaaaauugagcagcauggggguuuaucaaauccuugccauuuaugcuacaguagcagguucucugucacuggcaaucaugauggcugggaucucuuucuggaugugcuccaacgggucucugcagugcaggaucugcauauga

SEQ ID NO: 33686 - RNA, 1701 nt, Artificial Sequence
  derived and/or modified CDS sequence (wt) from hemagglutinin__InfluenzaA__ABQ44471
augaaagcaagacuacugauccuguuaugugcacuuucagcuacagaugcagacacaauauguauaggcuaccaugcgaacaauucaaccgacacuguugacacaguacucgaaaagaaugugacagugacacacucuguaaaccuacucgaagacagccacaacgggaaauuaugcagauuaaaaggaauagccccacuacaauuggggaaauguaacauugccggauggaucuugggaaacccagaaugcgaaucauugcucucuaauagaucaugguccuacauugcagaaacaccaaacucugagaauggaacauguuacccaggagauuucgccgacuaugaggaacugagggagcaauugagcucaguaucaucauucgagagauucgaaauauuccccaaggaaagaucauggcccaaacacaacauaaccagaggaguaacggcagcaugcucccacgcgaagaaaagcaguuuuuacaaaaauuugcucuggcugacggaggcaaauggcucauacccaaaucugagcaaguccuaugugaacaacaaagagaaagaaguccuugugcuaugggguguucaucacccgucuaacauagaggaucaaaggacccucuaucggaaagaaaaugcuuaugucucuguggugucuucaaauuauaacaggagauucaccccggaaauagcagaaagacccaaaguaagaggucaagcagggagaaugaacuauuacuggacucugcuagaacccggagacaaaauaauauuugaggcaaauggaaaccuaauagcgccaugguaugcuuucgcacugaguagaggccuuggaucaggaaucaucaccucaaacgcaucaauggaugaaugugacacgaagugucaaacaccccagggagcuauaaacaauagucucccuuuucagaacauacacccagucacaauaggagagugcccaaaauaugucaggaguaccaaauugaggaugguuacaggacuaaggaacaucccauccauucaauccagaggucuguuuggagccauugccgguuucauugaagggggauggacuggaaugguagauggaugguaugguuaccaucaucaaaaugaacagggaucuggcuaugcugcggaucaaaaaagcacacaaaaugccauuaacgggauuacaaauaaggugaacucuguuaucgagaaaaugaacacucaauucacagcuguggguaaagaauucaacaaauuggaaaaaagaauggaaaacuuaaauaaaaaaguugaugauggauuucuggacauuuggacauauaaugcagaauuguugguucuacuggaaaaugaaaggacuuuggauuuccaugacucaaaugugaagaaucuguaugagaaaguaaaaaaccaauugagaaauaaugcaaaggaaauaggaaacggguguuuugaguucuaccacaagugugacaaugaaugcauggaaaguguaaaaaauggaacuuaugauuacccaaaguauucagaggaaucaaaguuaaacagggaaaaaauugauggagugaaauuggaaucaaugggggucuaucagauucuggcgaucuacucaacugucgccaguucacuggugcuucuggucucccugggggcaaucagcuucuggauguguuccaaugggucuuugcaaugcagaauaugcaucuga

SEQ ID NO: 33687 - RNA, 1701 nt, Artificial Sequence
  derived and/or modified CDS sequence (wt) from hemagglutinin__InfluenzaA__ABR15797
augaagaccaucauugcuuugagcuacauuuucugucuggcucucggccaagaccuuccaggaaaugacaacagcacagcaacgcugugccugggacaucaugcggugccaaacggaacacuagugaaaacaaucacaaaugaucagauugaagugacuaaugcuacugagcuaguucagagcuccucaacggggaaaauaugcaacaauccucaucgaauccuugauggaauagacugcacacugauagaugcucuauugggggacccucauugugauguuuuucaaaaugagacaugggaccuuuucguugaacgcagcaaagcuuucagcaacuguuacccuuaugaugugccagauuaugccucccuuaggucacuaguugccucgucaggcacucuggaguuuaucacugaggguuucacuuggacuggagucacucagaaugggggaagcaaugcuugcaaaaggggaccugguagcgguuuuuucaguagacugaacugguugaccaaaucaggaagcacauauccagugcugaacgugacuaugccaaacaaugacaauuuugacaaacuauacauuugggggguucaccacccgagcacgaaccaagaacaaaccagccuguauguucaagcaucagggagagucacagucucuaccaggagaagccagcaaacuauaaucccgaauaucggguccagacccuggguaaggggucugucuaguagaauaagcaucuauuggacaauaguuaagccgggagacguacugguaauuaauaguaaugggaaccuaaucgcuccucgggguuauuucaaaaugcgcacugggaaaagcucaauaaugaggucagaugcaccuauugauaccuguauuucugaaugcaucacuccaaauggaagcauucccaaugacaagcccuuucaaaacguaaacaagaucacauauggagcaugccccaaguauguuaagcaaaacacccugaaguuggcaacagggaugcggaauguaccagagaaacaaacuagaggccuauucggugcaauagcagguuucauagaaaaugguugggagggaaugauagacgguugguacgguuucaggcaucaaaauucugagggcacaggacaagcagcagaucuuaaaagcacucaagcagccaucgaccaaaucaaugggaaauugaacaggguaaucgagaagacgaacgagaaauuccaucaaaucgaaaaggaauucucagaaguagaagggagaauucaggaccucgagaaauacguugaagacacuaaaauagaucucuggucuuacaaugcggaacuucuugucgcucuggagaaucaacauacaauugaccugacugacucggaaaugaacaagcuguuugaaaaaacaaggagacaacugagggaaaaugcugaagacaugggcaaugguugcuucaaaauauaccacaaaugugacaacgcuugcauagagucaaucagaaaugggacuuaugaccaugauguauacagagacgaagcauuaaacaaccgguuucagaucaaagguguugaacugaagucuggauacaaagacuggauccuguggauuuccuuugccauaucaugcuuuuugcuuuguguuguuuugcugggguucaucaugugggccugccagagaggcaacauuaggugcaacauuugcauuuga

SEQ ID NO: 33688 - RNA, 1701 nt, Artificial Sequence
  derived and/or modified CDS sequence (wt) from hemagglutinin__InfluenzaA__ABR15808
augaaagcaagacuacugauccuguuaugugcacuuucagcuacagaugcagacacaauauguauaggcuaccaugcgaacaauucaaccgacacuguugacacaguacucgaaaagaaugugacagugacacacucuguaaaccuacucgaagacagccacaacgggaaauuaugcagauuaaaaggaauagccccacuacaauuggggaaauguaacauugccggauggaucuugggaaacccagaaugcgaaucauugcucucuaauagaucaugguccuacauugcagaaacaccaaacucugagaauggaacauguuacccaggagauuucgccgacuaugaggaacugagggagcaauugagcucaguaucaucauucgagagauucgaaauauuccccaaggaaagaucauggcccaaacacaacauaaccagaggaguaacggcagcaugcucccacgcgaagaaaagcaguuuuuacaaaaauuugcucuggcugacggaggcaaauggcucauacccaaaucugagcaaguccuaugugaacaacaaagagaaagaaguccuugugcuaugggguguucaucacccgucuaacauagaggaucaaaggacccucuaucggaaagaaaaugcuuaugucucuguggugucuucaaauuauaacaggagauucaccccggaaauagcagaaagacccaaaguaagaggucaagcagggagaaugaacuauuacuggacuuugcuagaacccggagacaaaauaauauuugaggcaaauggaaaccuaauagcgccaugguaugcuuucgcacugaguagaggccuuggaucaggaaucaucaccucaaacgcaucaauggaugaaugugacacgaagugucaaacaccccagggagcuauaaacaguagucucccuuuucagaacauacacccagucacaauaggagagugcccaaaauaugucaggaguaccaaauugaggaugguuacaggacuaaggaacaucccauccauucaauccagaggucuguuuggagccauugccgguuucauugaagggggauggacuggaaugguagauggaugguaugguuaccaucaucaaaaugaacagggaucuggcuaugcugcggaucaaaaaagcacacaaaaugccauuaacgggauuacaaauaaggugaacucuguuaucgagaaaaugaacacucaauucacagcuguggguaaagaauucaacaaauuggaaaaaagaauggaaaacuuaaauaaaaaaguugaugauggauuuuuggacauuuggacauauaaugcagaauuguugguucuacuggaaaaugaaaggacuuuggauuuccaugacucaaaugugaagaaucuguaugagaaaguaaaaaaccaauugagaaauaaugcaaaggaaauaggaaacggguguuuugaguucuaccacaagugugacaaugaaugcauggaaaguguaaaaaauggaacuuaugauuacccaaaguauucagaggaaucaaaguuaaacagggaaaaaauugauggagugaaauuggaaucaaugggggucuaucagauucuggcgaucuacucaacugucgccaguucacuggugcuucuggucucccugggggcaaucagcuucuggauguguuccaaugggucuuugcaaugcagaauaugcaucuga

SEQ ID NO: 33689 - RNA, 1698 nt, Artificial Sequence; identical to SEQ ID NO: 32754
  derived and/or modified CDS sequence (wt) from hemagglutinin__InfluenzaA__ABR15885

SEQ ID NO: 33690 - RNA, 1698 nt, Artificial Sequence
  derived and/or modified CDS sequence (wt) from hemagglutinin__InfluenzaA__ABR15896
augaaagcaaaacuacugguccuguuauguacauuuacagcuacauacgcagacacaauauguauaggcuaccaugccaacaacucaaccgacacuguugacacaguacuugagaagaaugugacagugacacacucugucaaccuacuugaggacagucacaauggaaaacuaugucuacuaaaaggaauagccccacuacaauuggguaauugcagcguugccggauggaucuuaggaaacccagaaugcgaauuacugauuuccaaggaaucaugguccuacauuguagaagcaccaaauccugagaauggaacauguuacccaggguauuucgccgacuaugaggaacugagggagcaauugaguucaguaucuucauuugagagauucgaaauauuccccaaagaaagcucauggcccaaccacaccguaaccggaguaucagcaucaugcucccauaaugggaaaagcaguuuuuacagaaauuugcuauggcugacggggaagaaugguuuguacccaaaccugagcauguccuauguaaacaacaaagagaaagaaguccuugugcuaugggguguucaucacccaccuaacauaggggaccaaagggcccucuaccauacagaaaaugcuuaugucucuguagugucuucacauuauagcagaagauucaccccagaaauagccaaaagacccaaaguaagagaucaggaaggaagaaucaacuacuacuggacucugcuggaacccggggacacaauaauauuugaggcaaauggaaaucuaauagcgccaugguaugcuuucgcacugaguagaggcuuuggaucaggaaucaucaccucaaaugcaccaauggaugaaugugaugcgaagugucaaacaccucagggagcuauaaacaguagucuuccuuuccagaauguacacccaguuacaauaggagaguguccaaaguaugucaggagugcaaaauuaaggaugguuacaggacuaaggaacaucccauccauucaauccagagguuuguuuggagccauugccgguuucauugaagggggguggacuggaaugguagaugggugguaugguuaucaucaucagaaugagcaaggaucuggcuaugcugcagaucaaaaaagcacacaaaaugccauuaacgggauuacaaacaaggugaauucuguaauugagaaaaugaacacucaauucacagcugugggcaaagaauucaacaaauuagaaagaaggauggaaaacuuaaauaaaaaaguugaugauggguuucuagacauuuggacauauaaugcagaauuguugguucuacuggaaaaugaaaggacuuuggauuuccaugacuccaaugugaagaaucuguaugagaaaguaaaaagccaauuaaagaauaaugccaaagaaauaggaaacggguguuuugaauucuaucacaagugcaacaaugaaugcauggaaagugugaaaaauggaacuuaugacuauccaaaauauuccgaagaaucaaaguuaaacagggagaaaauugauggaguaaaauuggaaucaaugggagucuaucagauucuggcgaucuacucaacugucgccaguucccugguucuuuuggucucccugggggcaaucagcuucuggauguguuccaaugggucuuugcaguguagaauaugcaucuga

SEQ ID NO: 33691 - RNA, 1698 nt, Artificial Sequence; identical to SEQ ID NO: 32753
  derived and/or modified CDS sequence (wt) from hemagglutinin__InfluenzaA__ABR15907

SEQ ID NO: 33692 - RNA, 1698 nt, Artificial Sequence
  derived and/or modified CDS sequence (wt) from hemagglutinin__InfluenzaA__ABR15918
augaaaguaaaacuacugguccuguuauguacauuuacagcuacauaugcagacacaauauguauaggguaccaugccaacaacucaaccgacacuguugacacaguacuugagaagaaugugacagugacacacucugucaaccuacuugaggacagucacaauggaaaacuaugucuacuaaaaggaauagccccauuacaauuggguaauugcagcguugccggauggaucuuaggaaacccagaaugcgaauuacugauuuccaaggaaucaugguccuacauuguagaaacaccaaauccugagaauggaacauguuacccaggguauuucgcugacuaugaggaacugagggagcaauugaguucaguaucuucauuugagagauucgaaauauuccccaaagaaagcucauggcccaaccacaccguaaccggaguaucagcaucaugcucccauaaugggaaaagcaguuuuuacagaaauuugcuauggcugacggggaagaaugguuuguacccaaaccugagcaaguccuaugcaaacaacaaagagaaagaaguccuuguacuaugggguguucaucacccgccuaacauaggggaccaaagggcccucuaucauacagaaaaugcuuaugucucuguagugucuucacauuauagcagaagauucaccccagaaauagccaaaagacccaaaguaagagaucaggaaggaagaaucaacuacuacuggacucugcuggaacccggggauacaauaauauuugaggcaaauggaaaucuaauagcgccacgguaugcuuucgcacugaguagaggcuuuggaucaggaaucaucaccucaaaugcaccaauggaugaaugugaugcgaagugucaaacaccucagggagcuauaaacagcagucuuccuuuccagaacguacacccagucacaauaggagaguguccaaaguaugucaggagugcaaaauuaaggaugguuacaggacuaaggaacaucccauccauucaauccagagguuuguuuggagccauugccgguuucauugaagggggguggacuggaaugguagaugggugguaugguuaucaucaucagaaugagcaaggaucuggcuaugccgcagaucaaaaaagcacacaaaaugccauuaacgggauuacaaacaaggugaauucuguaauugagaaaaugaacacucaauucacagcugugggcaaagaauucaacaaauuggaaagaaggauggaaaacuuaaauaaaaaaguugaugauggguuucuagacauuuggacauauaaugcagaauuguugguucuacuggaaaaugaaaggacuuuggauuuccaugacuccaaugugaagaaucuguaugagaaaguaaaaagccaauuaaagaauaaugccaaagaaauaggaaacggguguuuugaauucuaucacaaguguaacaaugaaugcauggagagugugaaaaauggaacuuaugacuauccaaaauauuccgaagaaucaaaguuaaacagggagaaaauugauggagugaaauuggaaucaaugggagucuaucagauucuggcgaucuacucaacugucgccaguucccugguucuuuuggucucccugggggcaaucagcuucuggauguguuccaaugggucuuugcaguguagaauaugcaucuga

SEQ ID NO: 33693 - RNA, 1701 nt, Artificial Sequence
  derived and/or modified CDS sequence (wt) from hemagglutinin__InfluenzaA__ABR15929
augaagacuaucauugcuuugagcuacauuuuaugucugguuuucgcucaaaaacuucccggaaaugacaacagcacggcaacgcugugccuggggcaccaugcagugccaaacggaacgcuagugaaaacaaucacgaaugaccaaauugaagugacuaaugcuacugagcugguucagaguuccucaacagguagaauaugcgacaguccucaccaaauccuugauggagaaaacugcacacuaauagaugcucuauugggagacccucauugugauggcuuccaaaauaaggaaugggaccuuuuuguugaacgcagcaaagccuacagcaacuguuacccuuaugaugugccggauuaugucucccuuaggucacuaguugccucaucaggcacgcuggaguuuaacaaugaaagcuucaauuggacuggagucgcucagaauggaacaagcucugcuugcaaaaggagaucugauaaaaguuucuuuaguagauugaauugguugcaccaauuaaaauacaaauauccagcacugaacgugacuaugccaaacaaugaaaaauuugacaaauuguacauuugggggguucaccacccggguacagacagugaccaaaucagccuauaugcucaagcaucagggagagucacagucucuaccaaaagaagccaacaaacuguaaucccgaauaucggaucuagacccuggguaagggguaucuccagcagaauaagcaucuauuggacaauaguaaaaccgggagacauacuuuuaauuaacagcacagggaaucuaauugcuccucgggguuacuucaaaauacgaagugggaaaagcucaauaaugaggucagaugcacccauuggcaaaugcaauucugaaugcaucacuccaaauggaagcauucccaaugacaaaccauuucaaaauguaaacaggaucacauaugggcccugucccagauauguuaagcaaaacacucugaaauuggcaacagggaugcggaaugugccagagaaacaaacuagaggcauauucggugcaaucgcgggcuucauagaaaaugguugggagggaaugauggacgguugguacgguuucaggcaucaaaauucugagggcacagggcaagcagcagaucuuaaaagcacucaagcagcaaucaaccaaaucaacgggaaacugaauagguuaaucgagaaaacgaacgagaaauuccaucaaauugaaaaagaauucucagaaguagaagggagaauucaggaccucgagaaauauguugaggacacuaaaauagaucucuggucguacaaugcggagcuucuuguugcccuggagaaccaacauacaauugaucuaacugacucagaaaugaacaaacuguuugaaagaacaaagaagcaacugagggaaaaugcugaggauaugggcaaugguuguuucaaaauauaccacaaauguaacaaugccugcauagggucaaucagaaauggaacuuaugaccaugauguauacagagacgaagcauugaacaaccgguuccagaucaaagguguugagcugaagucaggauacaaagauuggauccuauggauuuccuuugccauaucauguuuuuugcuuuguauuguuuugcugggguucaucaugugggccugccaaaaaggcaacauuaggugcaacauuugcauuuga

SEQ ID NO: 33694 - RNA, 1701 nt, Artificial Sequence
  derived and/or modified CDS sequence (wt) from hemagglutinin__InfluenzaA__ABR15940
augaagacuaucauugcuuugagcuacauuuuaugccugguuuucgcucaaaaacuucccggaaaugacaacagcacggcaacgcugugucuggggcaucaugcagugccaaacggaacgcuagugaaaacaaucacgaaugaccaaauugaaguaacuaaugcuacugagcugguucagaguuccucaacagguagaauaugcgacaguccucaccaaauccuugauggagaaaacugcacacuaauagaugcucuauugggagacccucauugugauggcuuccaaaauaaggaaugggaccuuuuuguugaacgcagcaaagccuacagcaacuguuacccuuaugaugugccggauuaugucucccuuaggucacuaguugccucaucaggcacgcuggaguuuaacaaugaaagcuucaauuggacuggagucgcucagaauggaacaagcucugcuugcaaaaggagaucugauaaaaguuucuuuaguagauugaauugguugcaccaauuaaaauacaaauauccagcacugaacgugacuaugccaaacaaugaaaaauuugacaaauuguacauuugggggguucaccacccggguacagacagugaccaaaucagccuauaugcucaagcaucggggagagucacagucucuaccaaaagaagccaacaaacuguaaucccgaauaucggaucuagacccuggguaaggggugucuccagcagaauaagcaucuauuggacaauaguaaaaccgggagacauacuuuugauuaacagcacagggaaucuaauugcuccucgggguuacuucaaaauacgaagugggaaaagcucaauaaugaggucagaugcacccauuggcaaaugcaauucugaaugcaucacuccaaauggaagcauuuccaaugacaaaccauuucaaaauguaaacaggaucacauauggggccugucccagauauguuaagcaaaacacucugaaauuggcaacagggaugcggaaugugccagagaaacaaacuagaggcauauucggugcaaucgcgggcuucauagaaaaugguugggagggaaugauggacgguugguacgguuucaggcaucaaaauucugagggcacagggcaagcagcagaucuuaaaagcacucaagcagcaaucaaccaaaucaacgggaaacugaauagguuaaucgagaaaacgaacgagaaauuccaucaaauugaaaaagaauucucagaaguagaagggagaauucaggaccucgagaaauauguugaggacacuaaaauagaucucuggucguacaaugcggagcuucuuguugcccuggagaaccaacauacaauugaucuaacugacucagaaaugaacaaacuguuugaaagaacaaagaagcaacugagggaaaaugcugaggauaugggcaaugguuguuucaaaauauaccacaaaugugacaaugccugcauagggucaaucagaaauggaacuuaugaccaugauguauacagagacgaagcauugaacaaccgguuccagaucaaagguguugagcugaagucaggauacaaagauuggguccuauggauuuccuuugccauaucauguuuuuugcuuuguauuguuuugcugggguucaucaugugggccugccaaaaaggcaacauuaggugcaacauuugcauuuga

SEQ ID NO: 33695 - RNA, 1701 nt, Artificial Sequence; identical to SEQ ID NO: 32574
  derived and/or modified CDS sequence (wt) from hemagglutinin__InfluenzaA__ABR15951

SEQ ID NO: 33696 - RNA, 1701 nt, Artificial Sequence
  derived and/or modified CDS sequence (wt) from hemagglutinin__InfluenzaA__ABR15962
augaagacuaucauugcuuugagcuacauuuuaugucugguuuucgcucaaaaacuucccggaaaugacaacagcacggcaacgcugugccuggggcaccaugcagugccaaacggaacgcuagugaaaacaaucacgaaugaccaaauugaagugacuaaugcuacugagcugguucagaguuccucaacagguagaauaugcgacaguccucaccaaauccuugauggagaaaacugcacacuaauagaugcucuauugggagacccucauugugauggcuuccaaaauaaggaaugggaccuuuuuguugaacgcagcagagccuacagcaacuguuacccuuaugaugugccggauuaugucucccuuaggucacuaguugccucaucaggcacgcuggaguuuaacaaugaaagcuucaauuggacuggagucgcucagaauggaacaagcucugcuugcaaaaggagaucugauaaaaguuucuuuaguagauugaauugguugcaccaauuaaaauacaaauauccagcacugaacgugacuaugccaaacaaugaaaaauuugacaaauuguacauuugggggguucaccacccggguacagacagugaccaaaucagccuauaugcucaagcaucagggagagucacagucucuaccaaaagaagccaacaaacuguaaucccgaauaucggaucuagacccuggguaaggggugucuccagcauaauaagcaucuauuggacaauaguaaaaccgggagacauacuuuugauuaacagcacagggaaucuaauugcuccucgggguuacuucaaaauacgaagugggaaaagcucaauaaugaggucagaugcacccauuggcaaaugcaauucugaaugcaucacuccaaauggaagcauucccaaugacaaaccauuucaaaauguaaacaggaucacauaugggcccugucccagauauguuaagcaaaacacucugaaauuggcaacagggaugcggaaugugccagagaaacaaacuagaggcauauucggugcaaucgcgggcuucauagaaaaugguugggagggaaugauggacgguugguacgguuucaggcaucaaaauucugagggcacagggcaagcagcagaucuuaaaagcacucaagcagcaaucaaccaaaucaacgggaaacugaauagguuaaucgagaaaacgaacgagaaauuccaucaaauugaaaaagaauucucagaaguagaagggagaauucaggaccucgaaaaauauguugaggacacuaaaauagaucucuggucguacaaugcggagcuucuuguugcccuggagaaccaacauacaauugaucuaacugacucagaaaugaacaaacuguuugaaagaacaaagaagcaacugagggaaaaugcugaggauaugggcaaugguuguuucaaaauauaccacaaaugugacaaugccugcauagggucaaucagaaauggaacuuaugaccaugauguauacagagacgaagcauugaacaaccgguuccagaucaaagguguugagcugaagucaggauacaaagauuggauccuauggauuuccuuugccauaucauguuuuuugcuuuguauuguuuugcugggguucaucaugugggccugccaaaaaggcaacauuaggugcaacauuugcauuuga

SEQ ID NO: 33697 - RNA, 1701 nt, Artificial Sequence
  derived and/or modified CDS sequence (wt) from hemagglutinin__InfluenzaA__ABR22241
augaagacuaucauugcuuugagcuacauuuuaugucuggcuuucgcucaaaaacuucccggaaaugacaacagcacggcaacgcugugccugggacaccaugcagugccaaacggaacgcuagugaaaacaaucacgaaugaccaaauugaagugacuaaugcuacugagcugguucagaguuccucaacagguagaauaugcgacaguccucaccaaauccuugauggagaaaacugcacacugauagaugcucuauugggagacccacauugugauggcuuccaaaauaaggaaugggaccuuuuuguugaacgcagcaaagccuacagcaacuguuacccuuaugaugugccggauuaugccucccuuaggucacuaguugccucauccggcacccuggaguuuaacaaugaaagcuucaauuggacuggagucgcucagaauggaacaagcucugcuugcaaaaggagaucuauuaaaaguuucuuuaguagauugaauugguugcaccaauuagaauacagauauccagcacugaacgugacuaugccaaacaaugacaaauuugacaaauuguacauuugggggguucaccacccgaguacggacagugaccaaaucagcguauaugcccaagcaucagggagagucacagucucuaccaaaagaagccaacaaacuguaaucccgaauaucggauccagacccuggguaagggguaucuccagcagaauaagcaucuauuggacaauaguaaaaccgggagacauacuuuugauuaacagcacagggaaucuaauugcuccucgggguuacuucaaaauacgaagugggaaaagcucaauaaugaggucagaugcacccauuggcaaaugcaauucugaaugcaucacuccaaauggaagcauucccaaugacaaaccauuucaaaauguaaacaggaucacauauggggccugucccagauauguuaagcaaaacacucugaaauuggcaacagggaugcggaauguaccagagaaacaaacuagaggcauauucggcgcaaucgcggguuucauagaaaaugguugggagggaaugauggacgguugguacgguuucaggcaucaaaauucugagggcacaggacaagcagcagaucuuaaaagcacucaagcagcaaucaaccaaaucaacgggaaacugaauaaguuaaucgagaaaacgaacgagaaauuccaucaaauugaaaaagaauucucagaaguagaagggagaauucaggaccucgagaaauauguugaggacacuaaaauagaucucuggucguacaacgcggagcuucuuguugcccuggagaaccaaaauacaauugaucuaacugacucagaaaugaacaaacuguuugaaagaacaaggaagcaacugagagaaaaugcugaggauaugggcaaugguuguuucaaaauauaccacaaaugugacaaugccugcauagggucaaucagaaauggaacuuaugaccaugauguauacagagacgaagcauuaaacaaccgguuccagaucaaagguguugagcugaagucaggauacaaagauuggauccuauggauuuccuuugccauaucauguuuuuugcuuuguguuguuuugcugggguucauuaugugggccugccaaaaaggcaacauuaggugcaacauuugcauuuga

SEQ ID NO: 33698 - RNA, 1701 nt, Artificial Sequence; identical to SEQ ID NO: 32662
  derived and/or modified CDS sequence (wt) from hemagglutinin__InfluenzaA__ABR28515

SEQ ID NO: 33699 - RNA, 1701 nt, Artificial Sequence
  derived and/or modified CDS sequence (wt) from hemagglutinin__InfluenzaA__ABR28592
augaagacuaucauugcuuugagcuacguuuucugucugguuuucgcccaagaccuuccaggaaaugacaacagcacagcaacucugugccugggacaucaugcggugccaaacggaacgcuagugaaaacaaucacgaaugaucagauugaagugacuaaugcuacugaacugguucagaguuccucaacggguaaaauaugcgacaauccucaucgaauccuugauggaauaaacugcacacugauagaugcucuauugggggacccucauugugauggcuuucaaaaugagaaaugggaccuuuucguugaacgcagcaaagcuuucagcaacuguuacccuuaugaugugccagauuaugccucccuuaggucacuaguugccucgucaggcacucuggaguuuaucaaugaaggcuucaauuggacuggggucacucagaaugggggaagcagugcuugcaaaaggggaccugauaacgguuuuuucaguagacugaacugguuguacaaaucaggaagcacauauccagugcagaacgugaccaugccaaacaaugacaacucugacaaacuauacauuugggggguucaccacccgagcacggacaaagaacaaaccgaccuauauguucaagcaucagggaaagucacagucuccaccaagagaagccagcaaacuguaaucccgaaugucgggucuagacccuggguaaggggucugucuaguagaguaagcaucuauuggacaauaguuaaaccgggagacauacugguaauuaauaguaauggaaaccuaauugcuccucgggguuacuucaaaaugcgcacugggaaaagcucaauaaugaggucagaugcaccuauuggcaccugcagcucugaaugcaucacuccaaauggaagcauucccaaugacaagcccuuucaaaacguaaacaagaucacauauggggcaugucccaaguauguuaagcaaaacacucugaaguuggcaacagggaugcggaauguaccagagaaacaaacuagaggcauauucggcgcaauagcagguuucauagaaaaugguugggagggaaugauagacgguugguacgguuucaggcaucaaaauucugagggcacaggacaagcagcagaucuuaaaagcacucaagcagccaucgaccaaaucaaugggaaacugaauaggguaaucgagaagacgaacgagaaauuccaucaaaucgaaaaggaauucucagaaguagaagggagaauucaggaccucgagaaauacguugaagacacuaaaauagaucucuggucuuacaaugcggagcuucuugucgcucuggagaaccaacauacaauugaucugacugacucggaaaugaacaaacuguuugaaaaaacaaggaggcaacugagggaaaaugcugaggacaugggcaaugguugcuucaaaauauaccacaaaugugacaaugcuugcauagggucaaucagaaaugggacuuaugaccaugauguauacagagacgaagcauuaaacaaccgguuucagaucaaagguguugaacugaagucaggauacaaagacuggauccuguggauuuccuuugccauaucaugcuuuuugcuuuguguuguuuugcugggguucaucaugugggccugccagaaaggcaacauuaggugcaacauuugcauuuga

SEQ ID NO: 33700 - RNA, 1698 nt, Artificial Sequence; identical to SEQ ID NO: 32754
  derived and/or modified CDS sequence (wt) from hemagglutinin__InfluenzaA__ABR28768

SEQ ID NO: 33701 - RNA, 1698 nt, Artificial Sequence
  derived and/or modified CDS sequence (wt) from hemagglutinin__InfluenzaA__ABR28779
augaaaguaaaacuacugguccuguuauguacauuuacagcuacauaugcagacacaauauguauaggguaccaugccaacaacucaaccgacacuguugacacaguacuugagaagaaugugacagugacacacucugucaaccuacuugaggacagucacaauggaaaacuaugucuacuaaaaggaauagccccacuacaauuggguaauugcagcguugccggauggaucuuaggaaacccagaaugcgaauuacugauuuccaaggaaucaugguccuacauuguagaaacaccaaauccugagaauggaacauguuacccaggguauuucgccgacuaugaggaacugagggagcaauugaguucaguaucuucauuugagagauucgaaauauuccccaaagaaagcucauggcccaaccacaccguaaccggaguaucagcaucaugcucccauaaugggaaaagcaguuuuuacagaaauuugcuauggcugacggggaagaaugguuuguacccaaaccugagcaaguccuaugcaaacaacaaagagaaagaaguccuuguacuaugggguguucaucacccgccuaacauaggggaccaaagggcccucuaucauacagaaaaugcuuaugucucuguagugucuucacauuauagcagaagauucaccccagaaauagccaaaagacccaaaguaagagaucaggaaggaagaaucaacuacuacuggacucugcuggaacccggggauacaauaauauuugaggcaaauggaaaucuaauagcgccacgguaugcuuucgcacugaguagaggcuuuggaucaggaaucaucaccucaaaugcaccaauggaugaaugugaugcgaagugucaaacaccucagggagcuauaaacagcagucuuccuuuccagaacguacacccagucacaauaggagaguguccaaaguaugucaggagugcaaaauuaaggaugguuacaggacuaaggaacaucccauccauucaauccagagguuuguuuggagccauugccgguuucauugaagggggguggacuggaaugguagaugggugguaugguuaucaucaucagaaugagcaaggaucuggcuaugccgcagaucaaaaaagcacacaaaaugccauuaacgggauuacaaacaaggugaauucuguaauugagaaaaugaacacucaauucacagcugugggcaaagaauucaacaaauuggaaagaaggauggaaaacuuaaauaaaaaaguugaugauggguuucuagacauuuggacauauaaugcagaauuguugguucuacuggaaaaugaaaggacuuuggauuuccaugacuccaaugugaagaauuuguaugagaaaguaaaaagccaauuaaagaauaaugccaaagaaauaggaaacggguguuuugaauucuaucacaaguguaacaaugaaugcauggagagugugaaaaauggaacuuaugacuauccaaaauauuccgaagaaucaaaguuaaacagggagaaaauugauggagugaaauuggaaucaaugggagucuaucagauucuggcgaucuacucaacugucgccaguucccugguucuuuuggucucccugggggcaaucagcuucuggauguguuccaaugggucuuugcaguguagaauaugcaucuga

SEQ ID NO: 33702 - RNA, 1701 nt, Artificial Sequence; identical to SEQ ID NO: 33445
  derived and/or modified CDS sequence (wt) from hemagglutinin__InfluenzaA__ABR28790

SEQ ID NO: 33703 - RNA, 1698 nt, Artificial Sequence
  derived and/or modified CDS sequence (wt) from hemagglutinin__InfluenzaA__ABR28801
augaaaguaaaacuacugguccuguuauguacauuuacagcuacauaugcagacacaauauguauaggguaccaugccaacaacucaaccgacacuguugacacaguacuugagaagaaugugacagugacacacucugucaaccuacuugaggacagucacaauggaaaacuaugucuacuaaaaggaauagccccacuacaauuggguaauugcagcguugccggauggaucuuaggaaacccagaaugcgaauuacugauuuccaaggaaucaugguccuacauuguagaaacaccaaauccugagaauggaacauguuauccaggguauuucgccgacuaugaggaacugagggagcaauugaguucaguaucuucauuugagagauucgaaauauuccccaaagaaagcucauggcccaaccacaccguaaccggaguaucagcaucaugcucccauaaugggaaaagcaguuuuuacagaaauuugcuauggcugacggggaagaaugguuuguacccaaaccugagcaaguccuaugcaaacaacaaagagaaagaaguccuuguacuaugggguguucaucacccgccuaacauaggggaccaaagggcccucuaucauacagaaaaugcuuaugucucuguagugucuucacauuauagcagaagauucaccccagaaauagccaaaagacccaaaguaagagaucaggaaggaagaaucaacuacuacuggacucugcuggaacccggggauacaauaauauuugaggcaaauggaaaucuaauagcgccacgguaugcuuucgcacugaguagaggcuuuggaucaggaaucaucaccucaaaugcaccaauggaugaaugugaugcgaagugucaaacaccucagggagcuauaaacagcagucuuccuuuccagaacguacacccagucacaauaggagaguguccaaaguaugucaggagugcaaaauuaaggaugguuacaggacuaaggaacaucccauccauucaauccagagguuuguuuggagccauugccgguuucauugaagggggguggacuggaaugguagaugggugguaugguuaucaucaucagaaugagcaaggaucuggcuaugccgcagaucaaaaaagcacacaaaaugccauuaacgggauuacaaacaaggugaauucuguaauugagaaaaugaacacucaauucacagcugugggcaaagaauucaacaaauuggaaagaaggauggaaaacuuaaauaaaaaaguugaugauggguuucuagacauuuggacauauaaugcagaauuguugguucuacuggaaaaugaaaggacuuuggauuuccaugacuccaaugugaagaaucuguaugagaaaguaaaaagccaauuaaagaauaaugccaaagaaauaggaaacggguguuuugaauucuaucacaaguguaacaaugaaugcauggagagugugaaaaauggaacuuaugacuauccaaaauauuccgaagaaucaaaguuaaacagggagaaaauugauggagugaaauuggaaucaaugggagucuaucagauucuggcgaucuacucaacugucgccaguucccugguucuuuuggucucccugggggcaaucagcuucuggauguguuccaaugggucuuugcaguguagaauaugcaucuga

SEQ ID NO: 33704 - RNA, 1701 nt, Artificial Sequence
  derived and/or modified CDS sequence (wt) from hemagglutinin__InfluenzaA__ABR28812
augaagacuaucauugcuuugagcuacauuuuaugucugguuuucgcucaaaaacuucccggaaaugacaacagcacggcaacgcugugccuggggcaccaugcagugccaaacggaacgcuagugaaaacaaucacgaaugaccaaauugaagugacuaaugcuacugagcugguucagaguuccucaacagguggaauaugcgacaguccucaccaaauccuugauggagaaaacugcacacuaauagaugcucuauugggagacccucauugugauggcuuccaaaauaaggaaugggaccuuuuuguugaacgcagcaaagccuacagcaacuguuacccuuaugaugugccggauuaugccucccuuaggucacuaguugccucauccggcacacuggaguuuaacaaugaaagcuucaauuggacaggagucgcucagaauggaacaagcucugcuugcaaaaggagaucuaauaaaaguuucuuuaguagauugaauugguugcaccaauuaaaauacaaauacccagcacugaacgugacuaugccaaacaaugaaaaauuugacaaauuguacauuugggggguucaccacccgaguacggacagugaccaaaucagccuauaugcucaagcaccagggagagucacagucucuaccaaaagaagccaacaaacuguaaucccgaauaucggaucuagacccuggguaaggggugucuccagcagaauaagcaucuauuggacaauaguaaaaccgggagacauacuuuugauuaacugcacagggaaucuaauugcuccucgggguuacuucaaaauacgaagugggaaaagcucaauaaugaggucagaugcauccauuggcaaaugcaauucugaaugcaucacuccaaauggaagcauucccaaugacaaaccauuucaaaauguaaacaggaucacauauggggccugucccagauauguuaagcaaaacacucugaaauuggcaacagggaugcggaauguaccagagaaacaaacuagaggcauauucggcgcaaucgcggguuucauagaaaaugguugggagggaaugguggacgguugguacgguuucaggcaucaaaauucugagggcacaggacaagcagcagaucucaaaagcacucaagcagcaaucaaccaaaucaacgggaaacugaauagguuaaucgagaaaacgaacgagaaauuccaucaaauugaaaaagaauucucagaaguggaagggagaauucaggaccucgagaaauauguugaggacacuaaaauagaucucuggucguacaacgcggagcuucuuguugcccuggagaaccagcauacaauugaucuaacugacucagaaaugaacaaacuguuugaaagaacaaagaagcaacugagggaaaaugcugaggauaugggcaaugguuguuucaaaauauaccacaaaugugacaaugccugcauagggucaaucagaaaugggacuuaugaccaugauguauacagagacgaagcauuaaacaaccgguuccagaucaaagguguugagcugaagucaggauacaaagauuggauccuauggauuuccuuugccauaucauguuuuuugcuuuguguugucuugcugggauucaucaugugggccugccaaaaaggcaacauuaggugcaacauuugcauuuga

SEQ ID NO: 33705 - RNA, 1701 nt, Artificial Sequence
  derived and/or modified CDS sequence (wt) from hemagglutinin__InfluenzaA__ABR28823
augaagacuaucauugcuuugagcuacauuuuaugucugguuuucgcucaaaaacuccccggaaaugacaacagcacggcaacgcugugccuggggcaccaugcagugccaaacggaacgcuagugaaaacaaucacgaaugaccaaauugaagugacuaaugcuacugagcugguucagaguuccucaacagguagaauaugcgacaguccucaccaaauccuugauggagaaaacugcacacuaauagaugcucuauugggagacccucauugugauggcuuccaaaauaaggaaugggaccuuuuuguugaacgcagcaaagccuacagcaacuguuacccuuaugaugugccggauuaugucucccuuaggucacuaguugccucaucaggcacgcuggaguuuaacaaugaaagcuucaauuggacuggagucgcucagaauggaacaagcucugcuugcaaaaggagaucugauaaaaguuucuuuaguagauugaauugguugcaccaauuaaaauacaaauauccagcacugaacgugacuaugccaaacaaugaaaaauuugacaaauuguacauuugggggguucaucacccggguacagacagugaccaaaucagccuauaugcucaagcaucagggagagucacagucucuaccaaaagaagccaacaaacuguaaucccgaauaucggaucuagacccuggguaagggguaucuccagcagaauaagcaucuauuggacaauaguaaaaccgggagacauacuuuugauuaacagcacagggaaucuaauugcuccucgggguuacuucaaaauacgaagugggaaaagcucaauaaugaggucagaugcacccauuggcaaaugcaauucugaaugcaucacuccaaauggaagcauucccaaugacaaaccauuucaaaauguaaacaggaucacauaugggcccugucccagauauguuaagcaaaacacucugaaauuggcaacagggaugcggaaugugccagagaaacaaacuagaggcauauucggugcaaucgcgggcuucauagaaaaugguugggagggaaugauggacgguugguacgguuucaggcaucaaaauucugagggcacagggcaagcagcagaucuuaaaagcacucaagcagcaaucaaccaaaucaacgggaaacugaauagguuaaucgagaaaacgaacgagaaauuccaucaaauugaaaaagaauucucagaaguagaagggagaauucaggaccucgagaaauauguugaggacacuaaaauagaucucuggucguacaaugcggagcuucuuguugcccuggagaaccaacauacaauugaucuaacugacucagaaaugaacaaacuguuugaaagaacaaagaagcaacugagggaaaaugcugaggauaugggcaaugguuguuucaaaauauaccacaaaugugacaaugccugcauagggucaaucagaaauggaacuuaugaccaugauguauacagagacgaagcauugaacaaccgguuccagaucaaagguguugagcugaagucaggauacaaagauuggauccuauggauuuccuuugccauaucauguuuuuugcuuuguauuguuuugcugggguucaucaugugggccugccaaaaaggcaacauuaggugcaacauuugcauuuga

SEQ ID NO: 33706 - RNA, 1698 nt, Artificial Sequence; identical to SEQ ID NO: 32882
  derived and/or modified CDS sequence (wt) from hemagglutinin__InfluenzaA__ABR28834

SEQ ID NO: 33707 - RNA, 1698 nt, Artificial Sequence; identical to SEQ ID NO: 32854
  derived and/or modified CDS sequence (wt) from hemagglutinin__InfluenzaA__ABR28845

SEQ ID NO: 33708 - RNA, 1701 nt, Artificial Sequence
  derived and/or modified CDS sequence (wt) from hemagglutinin__InfluenzaA__ABR28856
augaagacuaucauugcuuugagcuacauuuuaugccugguuuucgcucaaaaacuucccggaaaugacaacagcacggcaacgcugugccuggggcaccaugcagugccaaacggaacgcuagugaaaacaaucacgaaugaccaaauugaaguaacuaaugcuacugagcugguucagaguuccucaacagguagaauaugcgacaguccucaccaaauccuugauggagaaaacugcacacuaauagaugcucuauugggagacccucauugugauggcuuccaaaauaaggaaugggaccuuuuuguugaacgcagcaaagccuacagcaacuguuacccuuaugaugugccggauuaugucucccuuaggucacuaguugccucaucaggcacgcuggaguuuaacaaugaaagcuucaauuggacuggagucgcucagaauggaacaagcucugcuugcaaaaggagaucugauaaaaguuucuuuaguagauugaauugguugcaccaauuaaaauacaaauauccagcacugaacgugauuaugccaaacaaugaaaaauuugacaaauuguacauuugggggguccaccacccggguacagacagugaccaaaucagccuauaugcucaagcaucagggagagucacagucucuaccaaaagaagccaacaaacuguaaucccgaauaucggaucuagacccuggguaaggggugucuccagcagaauaagcaucuauuggacaauaguaaaaccgggagacauacuuuugauuaacagcacagggaaucuaauugcuccucgggguuacuucaaaauacgaagugggaaaagcucaauaaugaggucagaugcacccauuggcaaaugcaauucugaaugcaucacuccaaauggaagcauucccaaugacaaaccauuucaaaauguaaacaggaucacauauggggccugucccagauauguuaagcaaaaaacucugaaauuggcaacagggaugcggaaugugccagagaaacaaacuagaggcauauucggugcaaucgcgggcuucauagaaaaugguugggagggaaugauggacgguugguacgguuucaggcaucaaaauucugagggcacagggcaagcagcagaucuuaaaagcacucaagcagcaaucaaccaaaucaacgggaaacugaauagguugauugagaaaacgaacgagaaauuccaucaaauugaaaaagaauucucagaaguagaagggagaauucaggaccucgagaaauaugucgaggacacuaaaauagaucucuggucguacaaugcggagcuucuuguugcccuggagaaccaacauacaauugaucuaacugacucagaaaugaacaaacuguuugaaagaacaaagaagcaacugagggaaaaugcugaggauaugggcaaugguuguuucaaaauauaccacaaaugugacaaugccugcauagggucaaucagaaauggaacuuaugaccaugauguauacagagacgaagcauugaacaaccgguuccagaucaaagguguugagcugaagucaggauacaaagauuggauccuauggauuuccuuugccauaucauguuuuuugcuuuguauuguuuuacugggguucaucaugugggccugccaaaaaggcaacauuaggugcaacauuugcauuuga

SEQ ID NO: 33709 - RNA, 1701 nt, Artificial Sequence
  derived and/or modified CDS sequence (wt) from hemagglutinin__InfluenzaA__ABR28867
augaagacuaucauugcuuugagcuacauuuuaugccugguuuucgcucaaaaacuucccggaaaugacaacagcacggcaacgcugugccuggggcaccaugcagugccaaacggaacgcuagugaaaacaaucacgaaugaccaaauugaagugacuaaugcuacugagcugguucagaguuccucaacagguagaauaugcgacaguccucaccaaauccuugauggagaaaacugcacacuaauagaugcucuauugggagacccucauugugauggcuuccaaaauaaggaaugggaccuuuuuguugaacgcagcaaagccuacagcaacuguuacccuuaugaugugccggauuaugucucccuuaggucacuaguugccucaucaggcacgcuggaguuuaacaaugaaagcuucaauuggacuggagucgcucagaauggaacaagcucugcuugcaaaaggagaucugauaaaaguuucuuuaguagauugaauugguugcaccaauuaaaauacaaauauccagcacugaacgugacuaugccaaacaaugaaaaauuugacaaauuguacauuugggggguucaccacccggguacagauagugaccaaaucagccuauaugcucaagcaucagggagagucacagucucuaccaaaagaagccaacaaacuguaaucccgaauaucggaucuagacccuggguaaggggugucuccagcagaauaagcaucuauuggacaauaguaaaaccgggagacauacuuuugauuaacagcacagggaaucuaauugcuccucgggguuacuucaaaauacgaagugggaaaagcucaauaaugaggucagaugcacccauuggcaaaugcaauucugaaugcaucacuccaaauggaagcauucccaauggcaaaccauuucaaaauguaaacaggaucacauauggggcaugucccagauauguuaagcaaaacacucugaaauuggcaacagggaugcggaaugugccagagaaacaaacuagaggcauauucggugcaaucgcgggcuucauagaaaaugguugggagggaaugauggacgguugguacgguuucaggcaucagaauucugagggcacagggcaagcagcagaucuuaaaagcacucaagcagcaaucaaccaaaucaacgggaaacugaauagguuaaucgagaaaacgaacgagaaauuccaucaaauugaaaaagaauucucagaaguagaagggagaauucaggaccucgagaaauaugucgaggacacuaaaauagaucucuggucguacaaugcggagcuucuuguugcccuggagaaccaacauacaauugaucuaacugacucagaaaugaacaaacuguuugaaagaacaaagaagcaacugagggaaaaugcugaggauaugggcaaugguuguuucaaaauauaccacaaaugugacaaugccugcauagggucaaucagaaauggaacuuaugaccaugauguauacagagacgaagcauugaacaaccgguuccagaucaaagguguugagcugaagucaggauacaaagauuggauccuauggauuuccuuugccauaucauguuuuuugcuuuguauuguuuuacugggguucaucaugugggccugccaaaaaggcaacauuaggugcaacauuugcauuuga

SEQ ID NO: 33710 - RNA, 1701 nt, Artificial Sequence; identical to SEQ ID NO: 32574
  derived and/or modified CDS sequence (wt) from hemagglutinin__InfluenzaA__ABR28878

SEQ ID NO: 33711 - RNA, 1698 nt, Artificial Sequence
  derived and/or modified CDS sequence (wt) from hemagglutinin__InfluenzaA__ABR28900
augaaaguaaaacuacugguucuguuauguacauuuacagcuacauaugcagacacaauauguauaggcuaccaugccaacaacucgaccgacacuguugacacaguacuugagaagaaugugacagugacacacucugucaaccuacuugaggacagucacaauggaaaacuaugucuacuaaaaggaauagccccacuacaauuggguaauugcagcguugccggauggaucuuaggaaacccagaaugcgaauuacugauuuccaaggaaucaugguccuacauuguagaaacaccaaauccugagaauggaacauguuacccaggguauuucgccgacuaugaggagcugagggagcaauugaguucaguaucuucauuugagagguucgaaauauuccccaaagagagcucauggcccaaccacaccguaaccggaguaucagcaucaugcucccauaacgggaaaagcaguuuuuacagaaauuugcuauggcugacggggaagaaugguuuguauccaaaccugagcaaguccuaugcaaacaacaaagagaaagaaguccuuguacugugggguguucaucacccgccuaacauaggggaccaaagggcccucuaucauacagaaaaugcuuaugucucuguagugucuucacauuauagcagaagauucacuccagaaauagccaaaagacccaaggugagagaucaggaaggaagaaucaacuacuacuggacucugcuggaacccggggauacuauaauauuugaggcaaauggaaaucuaauagcgccaagguuugcuuucgcacugaguagaggcuuuggaucaggaaucaucaccucaaaugcaccaauggaugaaugugaugcgaagugucaaacaccucagggagcuauaaacagcagucuuccuuuccagaauguacacccagucacaauaggagaguguccaaaguaugucaggagugcaaaauuaagaaugguuacaggacuaaggaacaucccauccauucaauccagagguuuguuuggagccauugccgguuucauugaagggggguggacuggaaugguagaugguugguaugguuaucaccaucagaaugagcaaggaucuggguaugcugcagaucaaaaaagcacacaaaaugccauuaacgggauuacaaacaaggugaauucuguaauugagaaaaugaacacucaauucacagcugugggcaaagaauucaacaaauuggaaagaaggauggaaaacuuaaauaaaaaaguugaugauggguuucuagacauuuggacauauaacgcagaauuguugguucuacuggaaaaugaaaggacuuuggacuuccaugacuccaacgugaagaaucuguaugagaaaguaaaaagccaauuaaagaauaaugccaaagaaauaggaaacggguguuuugaauucuaucacaaguguaacgaugaaugcauggagagugugaaaaauggaacuuaugacuauccaaaauauuccgaagaaucaaaguugaacagggagagaauugauggagugaaauuggaaucaaugggagucuaucagauucuggcgaucuacucaacagucgccaguucccugguucuuuuggucucccugggggcaaucagcuucuggauguguuccaaugggucuuugcaguguagaauaugcaucuaa

SEQ ID NO: 33712 - RNA, 1701 nt, Artificial Sequence
  derived and/or modified CDS sequence (wt) from hemagglutinin__InfluenzaA__ABR28922
augaagacuaucauugcuuugagcuacauucuaugucugguuuucgcucaaaaacuucccggaaaugacaacagcacggcaacgcugugccuugggcaccaugcaguaccaaacggaacgauagugaaaacaaucacgaaugaccaaauugaaguuacuaaugcuacugagcugguucagaguuccucaacagguggaauaugcgacaguccucaucagauccuugauggagaaaacugcacacuaauagaugcucuauugggagacccucagugugauggcuuccaaaauaagaaaugggaccuuuuuguugaacgcagcaaagccuacagcaacuguuacccuuaugaugugccggauuaugccucccuuaggucacuaguugccucauccggcacacuggaguuuaacaaugaaagcuucaauuggacuggagucacucaaaauggaacaagcucugcuugcaaaaggagaucuaauaacaguuucuuuaguagauugaauugguugacccauuuaaaauucaaauacccagcauugaacgugacuaugccaaacaaugaaaaauuugacaaauuguacauuugggggguucaccacccggguacagacaaugaccaaaucagccuauaugcucaagcaucaggaagaaucacagucucuaccaaaagaagccaacaaacuguaaucccgaauaucggaucuagacccaggguaagggauauccccagcagaguaagcaucuauuggacaauaguaaaaccgggagacauacuuuugauuaacagcacagggaaucuaauugcuccucgggguuacuucaaaauacgaagugggaaaagcucaauaaugagaucagaugcacccauuggcaaaugcaauucugaaugcaucacuccaaauggaagcauucccaaugacaaaccauuucaaaauguaaacaggaucacauauggggccugucccagauauguuaagcaaaacacucugaaauuggcaacagggaugcgaaauguaccagagaaacaaacuagaggcauauuuggcgcaaucgcggguuucauagaaaaugguugggagggaaugguggaugguugguacgguuucaggcaucaaaauucugagggaauaggacaagcagcagaucucaaaagcacucaagcagcaaucaaccaaaucaaugggaagcugaauagguugaucgggaaaaccaacgagaaauuccaucagauugaaaaagaauucucagaaguagaagggagaauucaggaccucgagaaauauguugaggacacuaaaauagaucucuggucauacaacgcggagcuucuuguugcccuggagaaccaacauacaauugaucuaacugacucagaaaugaacaaacuguuugaaagaacaaagaagcaacugagggaaaaugcugaggauaugggcaaugguuguuucaaaauauaccacaaaugugacaaugccugcauagggucaaucagaaauggaacuuaugaccaugauguauacagagaugaagcauuaaacaaccgguuccagaucaaagguguugagcugaagucaggauacaaagauuggauccuauggauuuccuuugccauaucauguuuuuugcuuuguguugcuuuguugggguucaucaugugggccugccaaaaaggcaacauuaggugcaacauuugcauuuga

SEQ ID NO: 33713 - RNA, 1701 nt, Artificial Sequence
  derived and/or modified CDS sequence (wt) from hemagglutinin__InfluenzaA__ABR88080
augaagacuaucauugcuuugagcuacauucuaugucugguuuucgcucaaaaacuucccggaaaugacaacagcacggcaacgcugugccuugggcaccaugcaguaccaaacggaacgauagugaaaacaaucacgaaugaccaaauugaaguuacuaaugcuacugagcugguucagaguuccucaacaggugaaauaugcgacaguccucaucagauccuugauggagaaaacugcacacuaauagaugcucuauugggagacccucagugugauggcuuccaaaauaagaaaugggaccuuuuuguugaacgcagcaaagccuacagcaacuguuacccuuaugaugugccggauuaugccucccuuaggucacuaguugccucauccggcacacuggaguuuaacaaugaaagcuucaauuggacuggagucacucaaaauggaacaagcucugcuugcaaaaggagaucuaauaacaguuucuuuaguagacugaauugguugacccacuuaaaauucaaauacccagcauugaacgugacuaugccaaacaaugaaaaauuugacaaauuguacauuugggggguucaccacccggguacggacaaugaccaaaucuuccuguaugcucaagcaucaggaagaaucacagucucuaccaaaagaagccaacaaacuguaaucccgaauaucggaucuagaccuagaguaaggaauauccccagcagaauaagcaucuauuggacaauaguaaaaccgggagacauacuuuugauuaacagcacagggaaucuaauugcuccuagggguuacuucaaaauacgaagugggaaaagcucaauaaugagaucagaugcacccauuggcaaaugcaauucugaaugcaucacuccaaauggaagcauucccaaugacaaaccauuucaaaauguaaacagaaucacauauggggccugucccagauauguuaagcaaaacacucugaaauuggcaacagggaugagaaauguaccagagaaacaaacuagaggcauauuuggcgcaaucgcggguuucauagaaaaugguugggagggaaugguggaugguugguacgguuucaggcaucaaaauucugagggaauaggacaagcagcagaucucaaaagcacucaagcagcaaucaaucaaaucaaugggaagcugaauagguugaucgggaaaaccaacgagaaauuccaucagauugaaaaagaauucucagaaguagaagggagaauucaggaccucgagaaauauguugaggacacuaaaauagaucucuggucauacaacgcggagcuucuuguugcccuggagaaccaacauacaauugaucuaacugacucagaaaugaacaaacuguuugaaagaacaaagaagcaacugagggaaaaugcugaggauaugggcaaugguuguuucaaaauauaccacaaaugugacaaugccugcauaggaucaaucagaaauggaacuuaugaccaugauguauacagagaugaagcauuaaacaaccgguuccagaucaaaggcguugagcugaagucaggauacaaagauuggauccuauggauuuccuuugccauaucauguuuuuugcuuuguguuguuuuguugggguucaucaugugggccugccaaaaaggcaacauuaggugcaacauuugcauuuga

SEQ ID NO: 33714 - RNA, 1701 nt, Artificial Sequence
  derived and/or modified CDS sequence (wt) from hemagglutinin__InfluenzaA__ABS00315
augaaagcaaaacuacuaguccuguuaugugcauuuacagcuacagaugcagacacaauauguauaggcuaccaugcgaacaacucaaccgacacuguugacacaguacuugaaaagaacgugacagugacacacucugucaaccuacuugaggacagucacaacggaaaacuaugucgacuaaaaggaauagccccacuacaauuggguaauugcagcguugccggauggaucuuaggaaacccagaaugcgaaucacuguuuucuaagaaaucaugguccuacauugcagaaacaccaaacuccgagaauggaacauguuacccaggguauuucgccgacuaugaggaacugagggagcaauugaguucaguaucaucauucgagagauucgaaauauuccccaaagaaagcucauggcccaaccacaccguaaccaaaggaguaucggcaucaugcucccauaaggggagaagcaguuuuuacagaaauuugcuauggcugacggagaagaauggcucguacccaaaucugagcaaguccuaugugaacaacaaagagagagaaguccuuguacuaugggguguucaucacccgucuaacauaggggagcaaagggccaucuaucauacagaaaaugcuuaugucuccguagugucuucacauuauaacaggagauucaccccagaaauagcaaaaagacccaaaguaagaggucaagaaggaagaauuaacuacuacuggacucugcuggaacccggggacacaauaauauuugaggcaaauggaaaucuaauagcgccaugguaugcuuucgcacugaguagaggcuuugggucaggaaucaucaccucaaacgcaucaauggaugaaugugacgcgaagugucaaacaccccagggagcuauaaacaguagucuuccuuuccagaauguacacccagucacaauaggagagugcccaaaguaugucaggaguacaaaauuaaggaugguuacaggacuaaggaacaucccauccauucaauccagagguuuguuuggagccauugccgguuucauugaagggggguggacuggaaugauagauggaugguaugguuaucaucaucagaaugaacaaggaucuggcuaugcugcggaucaaaaaagcacacaaaaugccauuaacgggauuacaaacaaggugaauucuguaaucgagaaaaugaacacucaauucacagcugugggcaaagaauucaacaaauuagaaagaaggauggaaaacuuaaauaaaaaaguugaugauggauuucuggacauuuggacauauaaugcagaauuguugguucuacuggaaaaugaaaggacuuuggauuuucaugacucaaaugugaagaaucuguaugagaaaguaaaaagccaauuaaagaauaaugccaaagaaauaggaaacggguguuuugaauucuaccacaaguguaacaaugaaugcauggaaagugugaaaaauggaacuuaugacuacccaaaauauuccgaggaaucaaaguuaaacagggaaaaaauugauggagugaaauuggaaucaaugggagucuaucagauucuggcgaucuacucaacugucgccaguucacuggugcuuuuggucucccugggggcaaucaguuucuggauguguucuaaugggucuuugcaguguagaauaugcaucuga

SEQ ID NO: 33715 - RNA, 1701 nt, Artificial Sequence
  derived and/or modified CDS sequence (wt) from hemagglutinin__InfluenzaA__ABS00326
augaaagcaaaacuacuaguccuguuaugugcauuuacagcuacagaugcagacacaauauguauaggcuaccaugcgaacaacucaaccgacacuguugacacaguacuugaaaagaacgugacagugacacacucugucaaccuacuugaggacagucacaacggaaaacuaugucgacuaaaaggaauagccccacuacaauuggguaauugcagcguugccggauggaucuuaggaaacccagaaugcgaaucacuguuuucuaagaaaucaugguccuacauugcagaaacaccaaacuccgagaauggaacauguuacccaggguauuucgccgacuaugaggaacugagggagcaauugaguucaguaucaucauucgagagauucgaaauauuccccaaagaaagcucauggcccaaccacaccguaaccaaaggaguaucggcaucaugcucccauaaggggagaagcaguuuuuacagaaauuugcuauggcugacggagaagaauggcucguacccaaaucugagcaaguccuaugugaacaacaaagagaaagaaguccuuguacuaugggguguucaucacccgucuaacauaggggagcaaagggccaucuaucauacagaaaaugcuuaugucucaguagugucuucacauuauaacaggagauucaccccagaaauagcaaaaagacccaaaguaagaggucaagaaggaagaauuaacuacuacuggacucugcuggaacccggggacacaauaauauuugaggcaaauggaaaucuaauagcgccaugguaugcuuucgcacugaguagaggcuuugggucaggaaucaucaccucaaacgcaucaauggaugaaugugacgcgaagugucaaacaccccagggagcuauaaacaguagucuuccuuuccagaauguacacccagucacaauaggagagugcccaaaguaugucaggaguacaaaauuaaggaugguuacaggacuaaggaacaucccauccauucaauccagagguuuguuuggagccauugccgguuucauugaagggggguggacuggaaugauagauggaugguaugguuaucaucaucagaaugaacaaggaucuggcuaugcugcggaucaaaaaagcacacaaaaugccauuaacgggauuacaaacaaggugaauucuguaaucgagaaaaugaacacucaauucacagcugugggcaaagaauucaacaaauuagaaagaaggauggaaaacuuaaauaaaaaaguugaugauggauuucuggacauuuggacauauaaugcagaauuguugguucuacuggaaaaugaaaggacuuuggauuuucaugacucaaaugugaagaaucuguaugagaaaguaaaaagccaauuaaagaauaaugccaaagaaauaggaaacggguguuuugaauucuaccacaaguguaacaaugaaugcauggaaagugugaaaaauggaacuuaugacuauccaaaauauuccgaggaaucaaaguuaaacagggaaaaaauugauggagugaaauuggaaucaaugggagucuaucagauucuggcgaucuacucaacugucgccaguucacuggugcuuuuggucucccugggggcaaucaguuucuggauguguucuaaugggucuuugcaguguagaauaugcaucuga

SEQ ID NO: 33716 - RNA, 1701 nt, Artificial Sequence
  derived and/or modified CDS sequence (wt) from hemagglutinin__InfluenzaA__ABS49899
augaagaccaucauugcuuugagcuacauuuucugucuggcucucggccaagaccuuccaggaaaugacaacaguacagcaacgcugugccugggacaucaugcggugccaaacggaacacuagugaaaacaaucacaaaugaucagauugaagugacuaaugcuacugagcuaguucagaguuccucaacggggaaaauaugcaacaauccucaucgaauccuugauggaauaaacugcacacugauagacgcucuauugggggacccucauugugauguuuuccaagaugagacaugggaccuuuucguugaacgcagcaaagcuuucagcaacuguuacccuuaugaugugccagauuaugccucccuuaggucacuaguugccucgucaggcacucuggaguuuaucacugaggguuucacuuggacuggggucacucagaaugggggaagcaaugcuugcaaaaggggaccugguagcgguuuuuucaguagacugaacugguugaccaaaucaggaagcacauauccagugcugaacgugacuaugccaaacaaugacaauuuugacaaacuauacauuugggggguucaccacccgagcacgaaccaagaacaaaccagccuguauguucaagcgucagggagagucacagucucuaccaggagaagccagcaaacuauaaucccgaauaucggguccagacccuggguaaggggucugucuaguagaauaagcaucuauuggacaauaguuaaaccgggagacguacugguaauuaauaguaaugggaaccuaaucgcuccucgggguuauuucaaaaugcgcacugggaaaagcucaauaaugaggucagaugcaccuauugauaccuguauuucugaaugcaucacuccaaauggaagcauucccaaugacaagcccuuucaaaacguaaacaagaucacauauggagcaugccccaaguauguuaagcaaaacacccugaaauuggcaacagggaugcggaauguaccagagaaacaaacuagaggccuauucggagcaauagcaggcuucauagaaaaugguugggagggaaugauagacgguugguacgguuucaggcaucaaaauucugagggcacaggacaagcagcagaucuuaaaagcacucaagcagccaucgaccaaaucaaugggaaauugaacaggguaaucgagaagacgaacgagaaauuccaucaaaucgaaaaggaauucucugaaguagaagggagaauucaggaccucgagaaauacguugaagacacuaaaauagaucucuggucuuacaaugcggagcuucuugucgcucuggagaaucaacauacaauugaccugacugacucggaaaugaacaagcuguuugaaaaaacaaggaggcaacugagggaaaaugcugaagacaugggcaaugguugcuucaaaauauaccacaaaugugacaacgcuugcauagagucaaucagaaaugggacuuaugaccaugauguauacagagacgaagcauuaaacaaccgguuucagaucaaagguguugaacugaagucuggauacaaagacuggauccuguggauuuccuuugccauaucaugcuuuuugcuuuguguuguuuugcugggguucaucaugugggccugccagagaggcaacauuaggugcaacauuugcauuuga

SEQ ID NO: 33717 - RNA, 1701 nt, Artificial Sequence
  derived and/or modified CDS sequence (wt) from hemagglutinin__InfluenzaA__ABS49910
augaagaccaucauugcuuugagcuacauuuucugucuggcucucggccaagaccuuccaggaaaugacaacaguacagcaacgcugugccugggacaucaugcggugccaaacggaacacuagugaaaacaaucacaaaugaucagauugaagugacuaaugcuacugagcuaguucagagcuccucaacggggaaaauaugcaacaauccucaucgaauccuugauggaauaaacugcacacugauagacgcucuauugggggacccucauugugauguuuuccaagaugagacaugggaccuuuucguugaacgcagcaaagcuuucagcaacuguuacccuuaugaugugccagauuaugccucccuuaggucacuaguugccucgucaggcacucuggaguuuaucacugaggguuucacuuggacuggggucacucagaaugggggaagcaaugcuugcaaaaggggaccugguagcgguuuuuucaguagacugaacugguugaccaaaucaggaagcacauauccagugcugaacgugacuaugccaaacaaugacaauuuugacaaacuauacauuugggggguucaccacccgagcacgaaccaagaacaaaccagccuguauguucaagcaucagggagagucacagucucuaccaggagaagccagcaaacuauaaucccgaauaucggguccagacccuggguaaggggucugucuaguagaauaagcaucuauuggacaauaguuaaaccgggagacguacugguaauuaauaguaaugggaaccuaaucgcuccucgggguuauuucaaaaugcgcacugggaaaagcucaauaaugaggucagaugcaccuauugauaccuguauuucugaaugcaucacuccaaauggaagcauucccaaugacaagcccuuucaaaacguaaacaagaucacauauggagcaugccccaaguauguuaagcaaaacacccugaaauuggcaacagggaugcggaauguaccagagaaacaaacuagaggccuauucggcgcaauagcaggcuucauagaaaaugguugggagggaaugauagacgguugguacgguuucaggcaucaaaauucugagggcacaggacaagcagcagaucuuaaaagcacucaagcagccaucgaccaaaucaaugggaaauugaacaggguaaucgagaagacgaacgaaaaauuccaucaaaucgaaaaggaauucucugaaguagaagggagaauucaggaccucgagaaauacguugaagacacuaaaauagaucucuggucuuacaaugcggagcuucuugucgcucuggagaaucaacauacaauugaccugacugacucggaaaugaacaagcuguuugaaaaaacaaggaggcaaaugagggaaaaugcugaagacaugggcaaugguugcuucaaaauauaccacaaaugugacaacgcuugcauagagucaaucagaaaugggacuuaugaccaugauguauacagagacgaagcauuaaacaaccgguuucagaucaaagguguugaacugaagucuggauacaaagacuggauccuguggauuuccuuugccauaucaugcuuuuugcuuuguguuguuuugcugggguucaucaugugggccugccagagaggcaacauuaggugcaacauuugcauuuga

SEQ ID NO: 33718 - RNA, 1701 nt, Artificial Sequence; identical to SEQ ID NO: 32662
  derived and/or modified CDS sequence (wt) from hemagglutinin__InfluenzaA__ABS49965

SEQ ID NO: 33719 - RNA, 1698 nt, Artificial Sequence
  derived and/or modified CDS sequence (wt) from hemagglutinin__InfluenzaA__ABS49976
augaaaguaaaacuacugguccuguuauguacauuuacagcuacauaugcagacacaauauguauaggguaccaugccaacaacucaaccgacacuguugacacaguacuugagaagaaugugacagugacacacucugucaaccuacuugaggacagucacaauggaaaacuaugucuacuaaaaggaauagccccacuacaauuggguaauugcagcguugccggauggaucuuaggaaacccagaaugcgaauuacugauuuccaaggaaucaugguccuacauuguagaaacaccaaauccugagaauggaacauguuacccaggguauuucgccgacuaugaggaacugagggagcaauugaguucaguaucuucauuugagagauucgaaauauuccccaaagaaagcucauggcccaaccacaccguaaccggaguaucagcaucaugcucccauaaugggaaaagcaguuuuuacagaaauuugcuauggcugacggggaagaaugguuuguacccaaaccugagcaaguccuaugcaaacaacaaagagaaagaaguccuuguacuaugggguguucaucacccgccuaacauagggaaccaaagggcccucuaucauacagaaaaugcuuaugucucuguagugucuucacauuauagcagaagauucaccccagaaauagccaaaagacccaaaguaagagaucaggaaggaagaaucaacuacuacuggacucugcuggaacccggggauacaauaauauuugaggcaaauggaaaucuaauagcgccacgguaugcguucgcacugaguagaggcuuuggaucaggaaucaucaccucaaaugcaccaauggaugaaugugaugcgaagugucaaacaccucagggagcuauaaacagcagucuuccuuuccagaacguacacccagucacaauaggagaguguccaaaguaugucaggagugcaaaauuaaggaugguuacaggacuaaggaacaucccauccauucaauccagagguuuguuuggagccauugccgguuucauugaagggggguggacuggaaugguagaugggugguaugguuaucaucaucagaaugagcaaggaucuggcuaugccgcagaucaaaaaagcacacaaaaugccauuaacgggauuacaaacaaggugaauucuguaauugagaaaaugaacacucaauucacagcugugggcaaagaauucaacaaauuggaaagaaggauggaaaacuuaaauaaaaaaguugaugauggguuucuagacauuuggacauauaaugcagaauuguugguucuacuggaaaaugaaaggacuuuggauuuccauaacuccaaugugaagaaucuguaugagaaaguaaaaagccaauuaaagaauaaugccaaagaaauaggaaacggguguuuugaauucuaccacaaguguaacaaugaaugcauggagagugugaaaaauggaacuuaugacuauccaaaauauuccgaagaaucaaaguuaaacagggagaaaauugauggagugaaauuggaaucaaugggagucuaucagauucuggcgaucuacucaacugucgccaguucccugguucuuuuggucucccugggggcaaucagcuucuggauguguuccaaugggucuuugcaguguagaauaugcaucuga

SEQ ID NO: 33720 - RNA, 1698 nt, Artificial Sequence
  derived and/or modified CDS sequence (wt) from hemagglutinin__InfluenzaA__ABS49987
augaaaguaaaacuacugguccuguuauguacauuuacagcuacauaugcagacacaauauguauaggguaccaugccaacaacucaaccgacacuguugacacaguacuugagaagaaugugacagugacacacucugucaaccuacuugaggacagucacaauggaaaacuaugucuacuaaaaggaauagccccauuacaauuggguaauugcagcguugccggauggaucuuaggaaacccagaaugcgaauuacugauuuccaaggaaucaugguccuacauuguagaaacaccaaauccugagaauggaacauguuacccaggguauuucgcugacuaugaggaacugagggagcaauugaguucaguaucuucauuugagagauucgaaauauuccccaaagaaagcucauggcccaaccacaccguaaccggaguaucagcaucaugcucccauaaugggaaaagcaguuuuuacagaaauuugcuauggcugacggggaagaaugguuuguacccaaaccugagcaaguccuaugcaaacaacaaagagaaagaaguccuuguacuaugggguguucaucacccgccuaacauaggggaccaaagggcccucuaucauacagaaaaugcuuaugucucuguagugucuucacauuauagcagaagauucaccccagaaauagccaaaagacccaaaguaagagaucaggaaggaagaaucaacuacuacuggacucugcuggaacccggggauacaauaauauuugaggcaaauggaaaucuaauagcgccacgguaugcuuucgcacugaguagaggcuuuggaucaggaaucaucaccucaaaugcaccaauggaugaaugugaugcgaagugucaaacaccucagggagcuauaaacagcagucuuccuuuccagaacguacacccagucacaauaggagaguguccaaaguaugucaggagugcaaaauuaaggaugguuacaggacuaaggaacaucccauccauucaauccagagguuuguuuggagccauugccgguuucauugaagggggguggacuggaaugguagaugggugguaugguuaucaucaucagaaugagcaaggaucuggcuaugccgcagaucaaaaaagcacacaaaaugccauuaacgggauuacaaacaaggugaauucuguaauugagaaaaugaacacucaauucacagcugugggcaaagaauucaacaaauuggaaagaaggauggaaaacuuaaauaaaaaaguugaugauggguuucuagacauuuggacauauaaugcagaauuguugguucuacuggaaaaugaaaggacuuuggauuuccaugacuccaauaugaagaaucuguaugagaaaguaaaaagccaauuaaagaauaaugccaaagaaauaggaaacggguguuuugaauucuaucacaaguguaacaaugaaugcauggagagugugaaaaauggaacuuaugacuauccaaaauauuccgaagaaucaaaguuaaacagggagaaaauugauggagugaaauuggaaucaaugggagucuaucagauucuggcgaucuacucaacugucgccaguucccugguucuuuuggucucccugggggcaaucagcuucuggauguguuccaaugggucuuugcaguguagaauaugcaucuga

SEQ ID NO: 33721 - RNA, 1701 nt, Artificial Sequence
  derived and/or modified CDS sequence (wt) from hemagglutinin__InfluenzaA__ABS49998
augaagacuaucauugcuuugagcuacauuuuaugucugguuuucgcucaaaaacuucccggaaaugacaacagcacggcaacgcugugccuggggcaccaugcagugccaaacggaacgcuagugaaaacaaucacgaaugaccaaauugaagugacuaaugcuacugagcugguucagaguuccucaacagguggaauaugcgacaguccucaccaaauccuugauggagaaaacugcacacuaauagaugcucuauugggagacccucauugugauggcuuccaaaauaaggaaugggaccuuuuuguugaacgcagcaaagccuacagcaacuguuacccuuaugaugugccggauuaugccucccuuaggucacuaguugccucauccggcacacuggaguuuaacaaugaaagcuucaauuggacaggagucgcucagaauggaacaagcucugcuugcaaaaggagaucuaauaaaaguuucuuuaguagauugaauugguugcaccaauuaaaauacaaauacccagcacugaacgugauuaugccaaacaaugaaaaauuugacaaauuguacauuugggggguucaccacccgaguacggacagugaccaaaucagccuauaugcucaagcaccagggagagucacagucucuaccaaaagaagccaacaaacuguaaucccgaauaucggaucuagacccuggguaaggggugucuccagcagaauaagcaucuauuggacaauaguaaaaccgggagacauacuuuugauuaacugcacagggaaucuaauugcuccucgggguuacuucaaaauacgaagugggaaaagcucaauaaugaggucagaugcauccauuggcaaaugcaauucugaaugcaucacuccaaauggaagcauucccaaugacaaaccauuucaaaauguaaacaggaucacauauggggccugucccagauauguuaagcaaaacacucugaaauuggcaacagggaugcggaauguaccagagaaacaaacuagaggcauauucggcgcaaucgcggguuucauagaaaaugguugggagggaaugguggacgguugguacgguuucaggcaucaaaauucugagggcacaggacaagcagcagaucucaaaagcacucaagcagcaaucaaccaaaucaacgggaaacugaauagguuaaucgagaaaacgaacgagaaauuccaucaaauugaaaaagaauucucagaaguggaagggagaauucaggaccucgagaaauauguugaggacacuaaaauagaucucuggucguacaacgcggagcuucuuguugcccuggagaaccagcauacaauugaucuaacugacucagaaaugaacaaacuguuugaaagaacaaagaagcaacugagggaaaaugcugaggauaugggcaaugguuguuucaaaauauaccacaaaugugacaaugccugcauagggucaaucagaaaugggacuuaugaccaugauguauacagagacgaagcauuaaacaaccgguuccagaucaaagguguugagcugaagucaggauacaaagauuggauccuauggauuuccuuugccauaucauguuuuuugcuuuguguugucuugcugggauucaucaugugggccugccaaaaaggcaacauuaggugcaacauuugcauuuga

SEQ ID NO: 33722 - RNA, 1701 nt, Artificial Sequence
  derived and/or modified CDS sequence (wt) from hemagglutinin__InfluenzaA__ABS50009
augaagacuaucauugcuuugagcuacauuuuaugucugguuuucgcucaaaaacuucccggaaaugacaacagcacggcaacgcugugccuggggcaccaugcagugccaaacggaacgcuagugaaaacaaucacgaaugaccaaauugaagugacuaaugcuacugagcugguucagaguuccucaacagguggaauaugcgacaguccucaccaaauccuugauggagaaaacugcacacuaauagaugcucuauugggagacccucauugugauggcuuccaaaauaaggaaugggaccuuuuuguugaacgcagcaaagccuacagcaacuguuacccuuaugaugugccggauuaugccucccuuaggucacuaguugccucauccggcacacuggaguuuaacaaugaaagcuucaauuggacuggagucgcucagaauggaacaagcucugcuugcaaaaggagaucuaauaaaaguuucuuuaguagauugaauugguugcaccaauuaaaauacaaauacccagcacugaacgugacuaugccaaacaaugaaaaauuugacaaauuguacauuugggggguucaccacccgaguacggacagugaccaaaucagccuauaugcucaagcaccagggagagucacagucucuaccaaaagaagccaacaaacuguaaucccgaauaucggaucuagacccuggguaaggggugucuccagcaaaauaagcaucuauuggacaauaguaaaaccgggagacauacuuuugauuaacugcacagggaaucuaauugcuccucgggguuacuucaaaauacgaagugggaaaagcucaauaaugaggucagaugcauccauuggcaaaugcaauucugaaugcaucacuccaaauggaagcauucccaaugacaaaccauuucaaaauguaaacaggaucacauauggggccugucccagauauguuaagcaaaacacucugaaauuggcaacagggaugcggaauguaccagagaaacaaacuagaggcauauucggcgcaaucgcggguuucauagaaaaugguugggagggaaugguggacgguugguacgguuucaggcaucaaaauucugagggcacaggacaagcagcagaucucaaaagcacucaagcagcaaucaaccaaaucaacgggaaacugaauagguuaaucgagaaaacgaacgagaaauuccaucaaauugaaaaagaauucucagaaguggaagggagaauucaggaccucgagaaauauguugaggacacuaaaauagaucucuggucguacaacgcggagcuucuuguugcccuggagaaccagcauacaauugaucuaacugacucagaaaugaacaaacuguuugaaagaacaaagaagcaacugagggaaaaugcugaggauaugggcaaugguuguuucaaaauauaccacaaaugugacaaugccugcauagggucaaucagaaaugggacuuaugaccaugauguauacagagacgaagcauuaaacaaccgguuccagaucaaagguguugagcugaagucaggauacaaagauuggauccuauggauuuccuuugccauaucauguuuuuugcuuuguguugucuugcugggauucaucaugugggccugccaaaaaggcaacauuaggugcaacauuugcauuuga

SEQ ID NO: 33723 - RNA, 1701 nt, Artificial Sequence
  derived and/or modified CDS sequence (wt) from hemagglutinin__InfluenzaA__ABS50020
augaagacuaucauugcuuugagcuacauuuuaugucugguuuucgcucaaaaacuucccguaaaugacaacagcacggcaacgcugugccugggacaccaugcagugccaaacggaacgcuagugaaaacaaucacgaaugaccacauugaagugacuaaugcuacugaguugguucagaguuccucaacagguagaauaugcgacaguccucaccaaauccuugauggagaaaacugcacacuaauagaugcucuauugggagacccgcauugugauggcuuccaaaauaaggaaugggaccuuuuuguugaacgcagcacagccuacagcaacuguuacccuuaugaugugccggauuaugccucccuuaggucacuaguugccucauccggcacacuggaguuuaacaaugaaagcuucaauuggacuggagucgcucagaauggaacaagcucugcuugcaaaaggagaucuauuaaaaguuucuuuaguagauugaauugguugcaccaauuaaaauacaaauauccagcacugaacgugacuaugccaaacaaugaaaaauuugacaaauuguacauuugggggguucaccacccgaguacggacagugaccaaaucagccuauaugcucaagcaucagggagagucacagucucuaccaaaagaagccaacaaacuguaaucccgaauaucgggucuagacccuggguaaggggugucuccagcagaauaagcaucuauuggacaauaguaaaaccgggagacauacuuuugauuaacagcacagggaaucuaauugcuccucgggguuacuuuaaaauacgaagugggaaaagcucaauaaugaggucaaaugcacccauuggcaaaugcaauucugaaugcaucacuccaaauggaagcauucccaaugacaaaccauuucaaaauguaaacaggaucacauauggggccugucccagauauguuaagcaaaacacucugaaauuggcaacaggaaugcggaauguaccagagaaacaaacuagaggcauauucggcgcaaucgcggguuucauagaaaaugguugggagggaaugguagacgguugguacgguuucaggcaucaaaauucugagggcacaggacaagcagcagaucuuaaaagcacucaagcagcaaucaaccaaaucaacgggaaacugaauagguuaaucgagaaaacaaacgagaaauuccaucaaauugaaaaagaauucucagaaguagaagggagaauucaggaccucgagaaauauguugaggacacuaaaauagaucucuggucguacaacgcggagcuucuuguugcccuggagaaccaacauacaauugaucuaacugacucagaaaugaacaaacuguuugaaagaacaaggaagcaacugagggaaaaugcugaggagaugggcaaugguuguuucaaaauauaccacaaaugugacaaugccugcauagggucaaucagaaauggaacuuaugaccaugauguauacagagacgaagcauuaaacaaccgguuccagaucaaagguguugagcugaagucaggauacaaagauuggauccuauggauuuccuuugccauaucauguuuuuugcuuuguguuguuuugcugggguucaucaugugggccugccaaaaaggcaacauuaggugcaacauuugcauuuga

SEQ ID NO: 33724 - RNA, 1701 nt, Artificial Sequence
  derived and/or modified CDS sequence (wt) from hemagglutinin__InfluenzaA__ABS50031
augaagacuaucauugcuuugagcuacauguuaugucugguuuucgcucaaaaacuucccggaaaugacaacagcacggcaaugcugugccuggggcaccaugcagugccaaacggaacgcuagugaaaacaaucacgaaugaccaaauugaagugacuaaugcuacugagcugguucagaguuccucaacagguggaauaugcgacaguccucaccaaauccuugauggagaaaacugcacacuaauagaugcucuauugggagacccucauugugauggcuuccaaaauaaggaaugggaccuuuuuguugaacgcagcaaagccuacagcaacuguuacccuuaugaugugccggauuaugccucccuuaggucacuaguugccucauccggcacacuggaguuuaacaaugaaagcuucaauuggacuggagucgcucagaauggaacaagcucugcuugcaaaaggagaucuaauaaaaguuucuuuaguagauugaauugguugcaccaauuaaaauacaaauacccagcacugaacgugacuaugccaaacaaugaaaaauuugacaaauuguacauuugggggguucaccacccgaguacggacagugaccaaaucagccuauaugcucaagcaccagggagagucacagucucuaccaaaagaagccaacaaacuguaaucccgaauaucggaucuggacccuggguaaggggugucuccagcagaauaagcaucuauuggacaauaguaaaaccgggagacauacuuuugauuaacugcacagggaaucuaauugcuccucgggguuacuucaaaauacgaagugggaaaagcucaauaaugaggucagaugcauccauuggcaaaugcaauucugaaugcaucacuccaaauggaagcauucccaaugacaaaccauuucaaaauguaaacaggaucacauauggagccugucccagauauguuaagcaaaacacucugaaauuggcaacagggaugcggaauguaccagagaaacaaacuagaggcauauucggcgcaaucgcggguuucauagaaaaugguugggagggaaugguggacgguugguacgguuucaggcaucaaaauucugagggcacaggacaagcagcagaucucaaaagcacucaagcagcaaucaaccaaaucaacgggaaacugaauagguuaaucgagaaaacgaacgagaaauuccaucaaauugaaaaagaauucucagaaguggaagggagaauucaggaccucgagaaauauguugaggacacuaaaauagaucucuggucguacaacgcggagcuucuuguugcccuggagaaccagcauacaauugaucuaacugacucagaaaugaacaaacuguuugagagaacaaagaagcaacugagggaaaaugcugaggauaugggcaaugguuguuucaaaauauaccacaaaugugacaaugccugcauagggucaaucagaaaugggacuuaugaccaugauguauacagagacgaagcauuaaacaaccgguuccagaucaaagguguugagcugaagucaggauacaaagauuggauccuauggauuuccuuugccauaucauguuuuuugcuuuguguugucuugcugggguucaucaugugggccugccaaaaaggcaacauuaggugcaacauuugcauuuga

SEQ ID NO: 33725 - RNA, 1701 nt, Artificial Sequence; identical to SEQ ID NO: 33455
  derived and/or modified CDS sequence (wt) from hemagglutinin__InfluenzaA__ABS50042

SEQ ID NO: 33726 - RNA, 1701 nt, Artificial Sequence
  derived and/or modified CDS sequence (wt) from hemagglutinin__InfluenzaA__ABS50053
augaagacuaucauugcuuugagcuacauuuuaugucugguuuucgcucaaaaacuucccggaaaugacaacagcacggcaacgcugugccuggggcaccaugcagugccaaacggaacgcuagugaaaacaaucacgaaugaccaaauugaagugacuaaugcuacugagcugguucagaguuccucaacagguagaauaugcgacaguccucaccaaauccuugauggagaaaacugcacacuaauagaugcucuauugggagacccucauugugauggcuuccaaaauaaggaaugggaccuuuuuguugaacgcagcaaagccuacagcaacuguuacccuuaugaugugccggauuaugucucccuuaggucacuaguugccucaucaggcacgcuggaguuuaacaaugaaagcuucaauuggacuggagucgcucagaauggaacaagcucugcuugcaaaaggagaucugauaaaaguuucuuuaguagauugaauugguugcaccaauuaaaauacaaauauccagcacugaacgugacuaugccaaacaaugaaaaauuugacaaauuguacauuugggggguucaccacccggguacagacagugaccaaaucagccuauaugcucaagcaucagggagagucacagucucuaccaaaagaagccaacaaacuguaaucccgaauaucggaucuagacccuggguaagggguaucuccagcagaauaagcaucuauuggacaauaguaaaaccgggagacauacuuuugauuaacagcacagggaaucuaauugcuccucgggguuacuucaaaauacgaagugggaaaagcucaauaaugaggucagaugcacccauuggcaaaugcaauucugaaugcaucacuccaaauggaagcauucccaaugacaaaccauuucaaaauguaaacaggaucacauaugggcccugucccagauauguuaagcaaaacacucugaaauuggcaacagggaugcggaaugugccagagaaacaaacuagaggcauauucggugcaaucgcgggcuucauagaaaaugguugggagggaaugauggacgguugguacgguuucaggcaucaaaauucugagggcacagggcaagcagcagaucuuaaaagcacucaagcagcaaucaaccaaaucaacgggaaacugaauagguuaaucgagaaaacgaacgagaaauuccaucaaauugaaaaagaauucucagaaguagaagggagaauucaggaccucgagaaauauguugaggacacuaaaauagaucucuggucguacaaugcggagcuucuuguugcccuggagaaccaacauacaauugaucuaacugacucagaaaugaacaaacuguuugaaagaacaaagaagcaacugagggaaaaugcugaggauaugggcaaugguuguuucaaaauauaccacaaaugugacaaugccugcauagggucaaucagaaauggaacuuaugaccaugauguauacagagacgaagcauugaacaaccgguuccagaucaaagguguugagcugaagucaggauacaaagauuggauccuauggauuuccuuugccauaucauguuuuuugcuuuguauuguuuugcugggguucaucaugugggccugccaaaaaggcaacauuaggugcaacauuugcauuuga

SEQ ID NO: 33727 - RNA, 1701 nt, Artificial Sequence
  derived and/or modified CDS sequence (wt) from hemagglutinin__InfluenzaA__ABS50064
augaagacuaucauugcuuugagcuacauuuuaugucugguuuucgcucaaaaacuucccggaaaugacaacagcacggcaacgcugugccuggggcaccaugcagugccaaacggaacgcuagugaaaacaaucacgaaugaccaaauugaagugacuaaugcuacugagcugguucagaguuccucaacagguagaauaugcgacaguccucaccaaauccuugauggagaaaacugcacacuaauagaugcucuauugggagacccucauugugauggcuuccaaaauaaggaaugggaccuuuuuguugaacgcagcaaagccuacagcaacuguuacccuuaugaugugccggauuaugucucccuuaggucacuaguugccucaucaggcacgcuggaguuuaacaaugaaagcuucaauuggacuggagucgcucagaauggaacaagcucugcuugcaaaaggagaucugauaaaaguuucuuuaguagauugaauugguugcaccaauuaaaauacaaauauccagcacugaacgugacuaugccaaacaaugaaaaauuugacaaauuguacauuugggggguucaccacccggguacagacagugaccaaaucagccuauaugcucaagcaucagggagagucacagucucuaccaaaagaagccaacaaacuguaaucccgaauaucggaucuagacccuggguaaggggugucuccagcagaauaagcaucuauuggacaauaguaaaaccgggagacauacuuuugauuaacagcacagggaaucuaauugcuccucgggguuacuucaaaauacgaagugggaaaagcucaauaaugaggucagaugcacccauuggcaaaugcaauucugaaugcaucacuccaaauggaagcauucccaaugacaaaccauuucaaaauguaaacaggaucacauaugggcccugucccagauauguuaagcaaaccacucugaaauuggcaacagggaugcggaaugugccagagaaacaaacuagaggcauauucggugcaaucgcgggcuucauagaaaaugguugggagggaaugauggacgguugguacgguuucaggcaucaaaauucugagggcacagggcaagcagcagaucuuaaaagcacucaagcagcaaucaaccaaaucaacgggaaacugaauagguuaaucgaaaaaacgaacgagaaauuccaucaaauugaaaaagaauucucagaaguagaagggagaauucaggaccucgagaaauauguugaggacacuaaaauagaucucuggucguacaaugcggagcuucuuguuucccuggagaaccaacauacaauugaucuaacugacucagaaaugaacaaacuguuugaaagaacaaagaagcaacugagggaaaaugcugaggauaugggcaaugguuguuucaaaauauaccacaaaugugacaaugccugcauagggucaaucagaaauggaacuuaugaccaugauguauacagagacgaagcauugaacaaccgguuccagaucaaagguguugagcugaagucaggauacaaagauuggauccuauggauuuccuuugccauaucauguuuuuugcuuuguauuguuuugcugggguucaucaugugggccugccaaaaaggcaacauuaggugcaacauuugcauuuga

SEQ ID NO: 33728 - RNA, 1701 nt, Artificial Sequence
  derived and/or modified CDS sequence (wt) from hemagglutinin__InfluenzaA__ABS50075
augaagacuaucauugcuuugagcuacauucuaugucugguuuucgcucaaaaacuucccggaaaugacaacagcacggcaacgcugugccuugggcaccaugcaguaccaaacggaacgauagugaaaacaaucacgaaugaccaaauugaaguuacuaaugcuacugagcugguucagaguuccucaacagguggaauaugcgacaguccucauaagauccuugauggagaaaacugcacacuaauagaugcucuauugggagacccucagugugauggcuuccaaaauaagaaaugggaccuuuuuguugaacgcagcaaagccuacagcaacuguuacccuuaugaugugccggauuaugccucccuuaggucacuaauugccucauccggcacacuggaguuuaacaaugaaagcuucaauuggacuggagucacucaaaauggaacaagcucugcuugcaaaaggagaucuaauagcaguuucuuuaguagauugaauugguugacccacuuaaaauucaaauacccagcauugaacgugacuaugccaaacaaugaagaauuugacaaauuguacauuugggggguucaccacccggguacauacaaugaccaaaucagccuauaugcucaagcaucaggaagaaucacagucucuaccaaaagaagccaacaaacuguaaucccgaauaucgggucuagacccaggguaagggauauccccagcagaauaagcaucuauuggacaauaguaaaaccgggagacauacuuuugauuaacagcacagggaaucuaauugcuccucgggguuacuucaaaauacgaagugggaaaagcucaauaaugagaucagaugcacccauuggcaaaugcaauucugaaugcaucacuccaaauggaagcauucccaaugacaaaccauuucaaaauguaaacaggaucacauauggggccugucccagauauguuaagcaaaacacucugaaauuggcaacagggaugcgaaauguaccagagaaacaaacuagaggcauauuuggcgcaaucgcggguuucauagaaaaugguugggagggaaugguggaugguugguacgguuucaggcaucaaaauucugagggaauaggacaagcagcagaucucaaaagcacucaagcagcaaucgaccaaaucaaugggaagcugaauagguugaucgggaaaaccaacgagaaauuccaucagauugaaaaagaauucucagaaguagaagggagaauucaggaccucgagaaauauguugaggacacuaaaauagaucucuggucauacaacgcggagcuucuuguugcccuggagaaccaacauacaauugaucuaacugacucagaaaugaacaaacuguuugaaagaacaaagaagcaacugagggaaaaugcugaggauaugggcaaugguuguuucaaaauauaccacaaaugugacaaugcaugcauagggucaaucagaaauggaacuuaugaccaugauguauacagagaugaagcauuaaacaaccgguuccagaucaaagguguugagcugaagucaggauacaaagauuggauccuauggauuuccuuugccauaucauguuuuuugcuuuguguugcuuuguugggguucaucaugugggccugccaaaaaggcaacauuaggugcaacauuugcauuuga

SEQ ID NO: 33729 - RNA, 1698 nt, Artificial Sequence
  derived and/or modified CDS sequence (wt) from hemagglutinin__InfluenzaA__ABS71665
augaaaguaaaacuacugguccuguuaugcacauuuacagcuacauaugcagacacaauauguauaggcuaccaugccaacaacucaaccgacacuguugacacaguacuugagaagaaugugacagugacacacucugucaaccugcuugaggacagucacaauggaaaauuaugucuauuaaaaggaauagccccacuacaauuggguaauugcagcguugccggauggaucuuaggaaauccagaaugcgaaucacugauuuccagggaaucaugguccuacauuguagaaaaaccaaguccugagaaugggacauguuacccagggcauuucgccgacuaugaggaacuaagggagcaauugaguucaguaucuucauuugagagauucgaaauauuccccaaagaaagcucauggcccaaccacaccgcaaccggaguaucagcaucaugcucccauaauggggaaagcaguuuuuacaaaaauuugcuauggcugacggggaagaaugguuuguacccaaaccugagcaaguccuaugcaaacaacaaagagaaagaaguccuuguacuaugggguguucaucacccgcccaacauaggugaccaaagggcccucuaucauacagaaaaugcuuaugucucuguagugucuucacauuauagcagaaaauucaccccagaaauagccaaaagacccaaaguaagagaucaagaaggaagaaucagcuacuacuggacucuacuugaacccggggauacaauaauauuugaggcaaauggaaaucuaauagcgccaagauaugcuuucgcacugaguagaggcuuuggaucaggaaucaucaacucaaaugcaccaauggaugaaugugaugcgaagugccaaacaccucagggagcuauaaacagcagucuuccuuuccagaauguacacccagucacaauaggagaguguccaaaguaugucaggagugcaaaauuaaggaugguuacaggacuaaggaacaucccauccauucaauccagagguuuguuuggagccauugccgguuucauugaagggggguggacuggaaugguagaugguugguaugguuaucaucaucagaaugagcaaggaucuggcuaugcugcagaucaaaaaagcacacaaaaugccauuaaugggauuacaaacaaggugaauucuguaauugagaaaaugaacacucaauucacagcugugggcaaagaauucaacaaauuggaaagaaggauggaaaacuuaaauaaaaaaguugaugauggguuuauagacauuuggacauauaaugcagaauuguugguucuacuggaaaaugaaaggacuuuggauuuccaugacuccaaugugaagaaucuguaugagaaaguaaaaagccaauuaaagaauaaugccaaagaaauaggaaauggguguuuugaauucuaucacaaguguaacgaugaaugcauggagaguguaaaaaauggaacuuaugacuauccaaaauauuccgaagagucaaaguuaaacagggagaaaauugauggagugaaauuggaaucaaugggagucuaucagauucuggcgaucuacucaacagucgccaguucucugguucuuuuggucucccugggggcaaucagcuucuggauguguuccaaugggucuuugcaguguagaauaugcaucuaa

SEQ ID NO: 33730 - RNA, 1698 nt, Artificial Sequence
  derived and/or modified CDS sequence (wt) from hemagglutinin__InfluenzaA__ABS71666
augaaaguaaaacuacugguccuguuaugcacauuuacagcuacauaugcagacacaauauguauaggcuaccaugccaacaacucaaccgacacuguugacacaguacuugagaagaaugugacagugacacacucugucaaccugcuugaggacagucacaauggaaaauuaugucuauuaaaaggaauagccccacuacaauuggguaauugcagcguugccggauggaucuuaggaaauccagaaugcgaaucacugauuuccagggaaucaugguccuacauuguagaaaaaccaaguccugagaaugggacauguuacccagggcauuucgccgacuaugaggaacuaagggagcaauugaguucaguaucuucauuugagagauucgaaauauuccccaaagaaagcucauggcccaaccacaccgcaaccggaguaucagcaucaugcucccauaaugggaaaagcaguuuuuacaaaaauuugcuauggcugacggggaagaaugguuuguacccaaaccugagcaaguccuaugcaaacaacaaagagaaagaaguccuuguacuaugggguguucaucacccgcccaacauaggugaccaaagggcccucuaucauacagaaaaugcuuaugucucuguagugucuucacauuauagcagaaaauucaccccagaaauagccaaaagacccaaaguaagagaucaagaaggaagaaucagcuacuacuggacucuacuugaacccggggauacaauaauauuugaggcaaauggaaaucuaauagcgccaagauaugcuuucgcacugaguagaggcuuuggaucaggaaucaucaacucaaaugcaccaauggaugaaugugaugcgaagugccaaacaccucagggagcuauaaacagcagucuuccuuuccagaauguacacccagucacaauaggagaguguccaaaguaugucaggagugcaaaauuaaggaugguuacaggacuaaggaacaucccauccauucaauccagagguuuguuuggagccauugccgguuucauugaagggggguggacuggaaugguagaugguugguaugguuaucaucaucagaaugagcaaggaucuggcuaugcugcagaucaaaaaagcacacaaaaugccauuaaugggauuacaaacaaggugaauucuguaauugagaaaaugaacacucaauucacagcugugggcaaagaauucaacaaauuggaaagaaggauggaaaacuuaaauaaaaaaguugaugauggguuuauagacauuuggacauauaaugcagaauuguugguucuacuggaaaaugaaaggacuuuggauuuccaugacuccaaugugaagaaucuguaugagaaaguaaaaagccaauuaaagaauaaugccaaagaaauaggaaauggguguuuugaauucuaucacaaguguaacgaugaaugcauggagaguguaaaaaauggaacuuaugacuauccaaaauauuccgaagagucaaaguuaaacagggagaaaauugauggagugaaauuggaaucaaugggagucuaucagauucuggcgaucuacucaacagucgccaguucucugguucuuuuggucucccugggggcaaucagcuucuggauguguuccaaugggucuuugcaguguagaauaugcaucuaa

SEQ ID NO: 33731 - RNA, 1698 nt, Artificial Sequence
  derived and/or modified CDS sequence (wt) from hemagglutinin__InfluenzaA__ABS71667
augaaaguaaaacuacugguccuguuaugcacauuuacagcuacauaugcagacacaauauguauaggcuaccaugccaacaacucaaccgacacuguugacacaguacuugagaagaaugugacagugacacacucugucaaccugcuugaggacagucacaauggaaaauuaugucuauuaaaaggaauagccccacuacaauuggguaauugcagcguugccggauggaucuuaggaaacccagaaugcgaaucacugauuuccagggaaucaugguccuacauuguagaaaaaccaaguccugagaaugggacauguuacccagggcauuucgccgacuaugaggaacuaagggagcaauugaguucaguaucuucauuugagagauucgaaauauuccccaaagaaagcucauggcccaaccacaccgcaaccggaguaucagcaucaugcucccauaaugggaaaagcaguuuuuacaaaaauuugcuauggcugacggggaagaaugguuuguacccaaaccugagcaaguccuaugcaaacaacaaagagaaagaaguucuuguacuaugggguguucaucacccgcccaacauaggugaccaaagggcccucuaucauacagaaaaugcuuauaucucuguagugucuucacauuauagcagaaaauucaccccagaaauagccaaaagacccaaaguaagagaucaagaaggaagaaucagcuacuacuggacucuacuugaacccggggauacaauaauauuugaggcaaauggaaaucuaauagcgccaagauaugcuuucgcacugaguagaggcuuuggaucaggaaucaucaacucaaaugcaccaauggaugaaugugaugcgaagugccaaacaccucagggagcuauaaacagcagucuuccuuuccagaauguacacccagucacaauaggagaguguccaaaguaugucaggagugcaaaauuaaggaugguuacaggacuaaggaacaucccauccauucaauccagagguuuguuuggagccauugccgguuucauugaagggggguggacuggaaugguagaugguugguaugguuaucaucaucagaaugagcaagggucuggcuaugcugcagaucaaaaaagcacacaaaaugccauuaaugggauuacaaacaaggugaauucuguaauugagaaaaugaacacucaauucacagcugugggcaaagaauucaacaaauuggaaagaaggauggaaaacuuaaauaaaaaaguugaugauggguuuauagacauuuggacauauaaugcagaauuguugguucuacuggaaaaugaaaggacuuuggauuuccaugacuccaaugugaagaaucuguaugagaaaguaaaaagccaauuaaagaauaaugccaaagaaauaggaaauggguguuuugaauucuaucacaaguguaacgaugaaugcauggagaguguaaaaaauggaacuuaugacuauccaaaauauuccgaagagucaaaguuaaacagggagaaaauugauggagugaaauuggaaucaaugggagucuaucagauucuggcgaucuacucaacagucgccaguucucugguucuuuuggucucccugggggcaaucagcuucuggauguguuccaaugggucuuugcaguguagaauaugcaucuaa

SEQ ID NO: 33732 - RNA, 1698 nt, Artificial Sequence
  derived and/or modified CDS sequence (wt) from hemagglutinin__InfluenzaA__ABS71668
augaaaguaaaacuacugguccuguuaugcacauuuacagcuacauaugcagacacaauauguauaggcuaccaugccaacaacucaaccgacacuguugacacaguacuugagaagaaugugacagugacacacucugucaaccugcuugaggacagucacaauggaaaauuaugucuauuaaaaggaauagccccacuacaauuggguaauugcagcguugccggauggaucuuaggaaacccagaaugcgaaucacugauuuccagggaaucaugguccuacauuguagaaaaaccaaguccugagaauggaacauguuacccagggcauuucgccgacuaugaggaacugagggagcaauugaguucaguaucuucauuugagagauucgaaauauuccccaaagaaagcucauggcccaaccacaccgcauccggaguaucagcaucaugcucccauaaugggaaaagcaguuuuuacaaaaauuugcuauggcugacggggaagaaugguuuguacccaaaccugagcaaguccuaugcaaacaacaaagagaaagaaguccuuguacuaugggguguucaucacccgccuaacauaggugaccaaagggcccucuaucauacagaaaaugcuuaugucucuguagugucuucacauuauagcagaaaauucaccccagaaauagccaaaagacccaaaguaagagaucaagaaggaagaaucaacuacuacuggacucuacuugaacccggggauacaauaauauuugaggcaaauggaaaucuaauagcgccaagauaugcuuucgcacugaguagaggcuuuggaucaggaaucaucaacucaaaugcaccaauggaugaaugugaugcgaagugccaaacaccucagggagcuauaaacagcagucuuccuuuccagaauguacacccagucacaauaggagaguguccaaaguaugucaggagugcaaaauuaaggaugguuacaggacuaaggaacaucccauccauucaauccagagguuuguuuggagccauugccgguuucauugaagggggguggacuggaaugguagaugguugguaugguuaucaucaucagaaugagcaaggaucuggcuaugcugcagaucaaaaaagcacacaaaaugccauuaaugggauuacaaacaaggugaauucuguaauugagaaaaugaacacucaauucacagcugugggcaaagaauucaacaaauuggaaagaaggauggaaaacuuaaauaaaaaaguugaugauggguuuauagacauuuggacauauaaugcagaauuguugguucuacuggaaaaugaaaggacuuuggauuuccaugacuccaaugugaagaaucuguaugagaaaguaaaaagccaauuaaagaauaaugccaaagaaauaggaaauggguguuuugaauucuaucacaaguguaacgaugaaugcauggagaguguaaaaaauggaacuuaugacuauccaaaauauuccgaagaaucaaaguuaaacagggagaaaauugauggagugaaauuggaaucaaugggagucuaucagauucuggcgaucuacucaacagucgccaguucucugguucuuuuggucucccugggggcaaucaguuucuggauguguuccaaugggucuuugcaguguagaauaugcaucuaa

SEQ ID NO: 33733 - RNA, 1698 nt, Artificial Sequence
  derived and/or modified CDS sequence (wt) from hemagglutinin__InfluenzaA__ABS71669
augaaaguaaaacuacugguccuguuaugcacauuuacagcuacauaugcagacacaauauguauaggcuaccaugcuaacaacucgaccgacacuguugacacaguacuugaaaagaaugugacagugacacacucugucaaccugcuugaggacagucacaauggaaaacuaugucuauuaaaaggaauagccccacuacaauuggguaauugcagcguugccggguggaucuuaggaaacccagaaugcgaauuacugauuuccaaggagucaugguccuacauuguagaaaaaccaaauccugagaauggaacauguuacccagggcauuucgcugacuaugaggaacugagggagcaauugaguucaguaucuucauuugagagguucgaaauauuccccaaagaaagcucauggcccaaccacaccguaaccggaguaucagcaucaugcucccauaauggggaaagcaguuuuuacaaaaauuugcuauggcugacggggaagaaugguuuguacccaaaccugagcaaguccuaugcaaacaacaaagaaaaagaaguccuuguacuaugggguguucaucacccgccaaacauaggugaccaaaaggcccucuaucauacagaaaaugcuuaugucucuguagugucuucacauuauagcagaaaauucaccccagaaauagccaaaagacccaaaguaagagaucaagaaggaagaaucaacuacuacuggacucugcuugaacccggggauacaauaauauuugaggcaaauggaaaucuaauagcgccaagauaugcuuucgcacugaguagaggcuuuggaucaggaaucaucaacucaaaugcaccaauggauaaaugugaugcgaagugccaaacaccucagggagcuauaaacagcagucuuccuuuccagaauguacacccagucacaauaggagaguguccaaaguaugucaggagugcaaaauuaaggaugguuacaggacuaaggaacaucccauccauucaauccagagguuuguuuggagccauugccgguuucauugaagggggguggacuggaaugguagaugguugguaugguuaucaucaucagaaugagcaaggaucuggcuaugcugcagaucaaaaaagcacacaaaaugccauuaaugggauuacaaacaaggugaauucuguaauugagaaaaugaacacucaauucacagcugugggcaaagaauucaacaaauuggaaagaaggauggaaaacuuaaauaaaaaaguugaugauggguuuauagacauuuggacauauaaugcagaauuguuaguucuacuggaaaaugaaaggacuuuggauuuccaugacuccaaugugaagaaucuguaugagaaaguaaaaagccaauuaaagaauaaugccaaagaaauaggaaauggguguuuugaauucuaucacaaguguaacgaugaaugcauggagaguguaaaaaauggaacuuaugacuauccaaaauauuccgaagaaucaaaauuaaacagggagaaaauugauggagugaaauuggaaucaaugggagucuaucagauucuggcgaucuacucaacagucgccaguucucugguucuuuuggucucccugggggcaaucagcuucuggauguguuccaaugggucuuugcaguguagaauaugcaucuaa

SEQ ID NO: 33734 - RNA, 1698 nt, Artificial Sequence
  derived and/or modified CDS sequence (wt) from hemagglutinin__InfluenzaA__ABS71671
augaaaguaaaacuacugguccuguuaugcacauuuacagcuacauaugcagacacaauauguauaggcuaccaugccaacaacucaaccgacacuguugacacaguacuugagaagaaugugacagugacacacucugucaaccugcuugaggacagucacaauggaaaacuaugucuauuaaaaggaauagccccacuacaauuggguaauugcagcguugccggguggaucuuaggaaacccagaaugcgaauuacugauuuccaaggaaucaugguccuacauuguagaaaaaccaaauccugagaauggaacauguuacccagggcauuucgcugacuaugaggaacugagggagcaauugaguucaguaucuucauuugagagguucgaaauguuccccaaagaaagcucauggcccaaccacaccguaaccggaguaucagcaucaugcucccauaaugggaaaagcaguuuuuacaaaaauuugcuauggcugacggggaagaaugguuuguacccaaaccugagcaaguccuaugcaaacaacaaagagaaagaaguccuuguacuaugggguguucaucacccgccuaacauaggugaccaaagggcccucuaucauacagaaaaugcuuaugucucuguagugucuucacauuauagcaggaaauucaccccagaaauagccaaaagacccaaaguaagagaucaagaaggaagaaucaacuacuacuggacucugcuugaacccggggauacaauaauauuugaggcaaauggaaaucuaauagcaccaagauaugcuuucgcacugaguagaggcuuuggaucaggaaucaucaacucaaaugcaccaauggaugaaugugaugcgaagugccaaacaccucagggagcuauaaacagcagucuuccuuuccagaauguacacccagucacaauaggagaauguccaaaguaugucaggagugcaaaauuaaggaugguuacaggacuaaggaacaucccauccauucaauccagagguuuguuuggagccauugccgguuucauugaagggggguggacuggaaugguagaugguugguaugguuaucaucaucagaaugagcaaggaucuggcuaugcugcagaucaaaaaagcacacaaaaugccauuaaugggauuacaaacaaggugaauucuguaauugagaaaaugaacacucaauucacagcugugggcaaagaauucaacaaauuggaaagaaggauggaaaacuuaaauaaaaaaguugaugauggguuuauagacauuuggacauauaaugcagaacuguugguucuacuggaaaaugaaaggacuuuggauuuccaugacuccaaugugaagaaucuguaugagaaaguaaaaagccaauuaaagaauaaugccaaagaaauaggaaauggguguuuugaauucuaucacaaguguaacgaugaaugcauggagaguguaaaaaauggaacuuaugacuauccaaaauauuccgaagaaucaaaauuaaacagggagaaaauugauggagugaaauuggaaucaaugggagucuaucagauucuggcgaucuacucaacagucgccaguucucugguucuuuuggucucccugggggcaaucagcuucuggauguguuccaaugggucuuugcaguguagaauaugcaucuaa

SEQ ID NO: 33735 - RNA, 1698 nt, Artificial Sequence
  derived and/or modified CDS sequence (wt) from hemagglutinin__InfluenzaA__ABS71672
augaaaguaaaacuacugguccuguuaugcacauuuacagcuacauaugcagacacaauauguauaggcuaccaugccaacaacucaaccgacacuguugacacaguacuugagaagaaugugacagugacacacucugucaaccugcuugaggacagucacaauggaaaacuaugucuauuaaaaggaauagccccacuacaauuggguaauugcagcguugccggguggaucuuaggaaacccagaaugcgaauuacugauuuccaaggaaucaugguccuacauuguagaaaaaccaaauccugagaauggaacauguuacccagggcauuucgcugacuaugaggaacugagggagcgauugaguucaguaucuucauuugagagguucgaaauguuccccaaagaaagcucauggcccaaccacaccguaaccggaguaucagcaucaugcucccauaaugggaaaagcaguuuuuacaaaaauuugcuauggcugacggggaagaaugguuuguacccaaaccugagcaaguccuaugcaaacaacaaagagaaagaaguccuuguacuaugggguguucaucacccgccuaacauaggugcccaaagggcccucuaucauacagaaaaugcuuaugucucuguagugucuucacauuauagcaggaaauucaccccagaaauagccaaaagacccaaaguaagagaucaagaaggaagaaucaacuacuacuggacucugcuugaacccggggauacaauaauauuugaggcaaauggaaaucuaauagcaccaagauaugcuuucgcacugaguagaggcuuuggaucaggaaucaucaacucaaaugcaccaauggaugaaugugaugcgaagugccaaacaccucagggagcuauaaacagcagucuuccuuuccagaauguacacccagucacaauaggagaauguccaaaguaugucaggagugcaaaauuaaggaugguuacaggacuaaggaacaucccauccauucaauccagagguuuguuuggagccauugccgguuucauugaaggaggguggacuggaaugguagaugguugguaugguuaucaucaucagaaugagcaaggaucuggcuaugcugcagaucaaaaaagcacacaaaaugccauuaaugggauuacaaacaaggugaauucuguaauugagaaaaugaacacucaauucacagcagugggcaaagaauucaacaaauuggaaagaaggauggaaaacuuaaauaaaaaaguugaugauggguuuauagacauuuggacauauaaugcagaacuguugguccuacuggaaaaugaaaggacuuuggauuuccaugacuccaaugugaagaaucuguaugagaaaguaaaaagccaguuaaagaauaaugccaaagaaauaggaaauggauguuuugaauucuaucacaaguguaacgaugaaugcauggagaguguaaagaauggaacuuaugacuauccaaaauauuccgaagaaucaaaguuaagcagggagaaaauugauggagugaaauuggaaucaaugggagucuaucagauucuggcgaucuacucaacagucgccaguucucugguucuuuuggucucccugggggcaaucagcuucuggauguguuccaaugggucuuugcaguguagaauaugcaucuaa

SEQ ID NO: 33736 - RNA, 1698 nt, Artificial Sequence
  derived and/or modified CDS sequence (wt) from hemagglutinin__InfluenzaA__ABS71673
augaaaguaaaacuacugguucuguuauguacauuuacagcuacauaugcagacacaauauguauaggcuaccaugccaacaacucaaccgacacuguugacacaguacuugagaagaaugugacagugacacacucugucaaccuacuugaggacagucacaauggaaaacuaugucuacuaaaaggaauagccccacuacaauuggguaauugcagcguugccggauggaucuuaggaaacccagaaugcgaauuacugauuuccaaggaaucaugguccuacauuguagaaacaccaaauccugagaauggaacauguuacccaggguauuucgccgacuaugaggaacugagggagcaauugaguucaguaucuucauuugagagguucgaaauauuccccaaagagagcucauggcccaaccacaccguaaccggaguaucagcaucaugcucccauaacgggagaagcaguuuuuacagaaauuuguuauggcugacggggaagaaugguuuguacccaaaccugagcaaguccuaugcaaacaacaaagagaaagaaguccuuguacuaugggguguucaucacccgccuaacauaggggaccaaagggcccucuaucauacagaaaauacuuaugucucuguagugucuucacauuauagcagaagauucaccccagaaauagccaaaagacccaaggugagagaucaggaaggaagaaucaacuacuacuggacucugcuggaacccggggauacaauaauauucgaggcaaauggaaaucuaauagcaccaagguuugcuuucgcacugaguagaggcuuuggaucaggaaucaucaccucuaaugcaccaauggaugaaugugaugcgaagugucaaacaccucaaggagcuauaaacagcagccuuccuuuccagaauguacacccagucacaauaggagaguguccaaaguaugucaggagugcaaaauuaaggauggcuacaggacuaaggaacaucccauccauucaauccagagguuuguuuggagccauugccgguuucauugaagggggguggacuggaaugguagaugguugguaugguuaucaucaucagaaugagcaaggaucuggguaugcugcagaucaaaaaagcacacaaaaugccauuaacgggauuacaaacaaggugaauucuguaauugagaaaaugaacacucaauucacagcugugggcaaagaauucagcaaauuggagagaaggauggaaaacuuaaauaagaaaguugaugauggguuucuagacauuuggacauauaaugcagaauuguugguucuacuggaaaaugaaaggacuuuggauuuccaugacuccaacgugaagaaccuguaugagaaagugaaaagccaauuaaagaauaaugccaaagaaauaggaaacgggugcuuugaauucuaucacaaguguaacgaugaaugcauggagagugugaaaaauggaacuuaugacuauccaaaauauuccgaagaaucaaaguuaaacagggagaaaauugauggugugaaauuggaaucaaugggagucuaucagauucuggcgaucuacucaacagucgccaguucccugguucuuuuggucucccugggggcaaucagcuucuggauguguuccaaugggucuuugcaguguagaauaugcaucuaa

SEQ ID NO: 33737 - RNA, 1701 nt, Artificial Sequence
  derived and/or modified CDS sequence (wt) from hemagglutinin__InfluenzaA__ABS71674
augaagacuaucauugcuuugagcuacauucuaugucugguuuucgcucaaaaacuucccggaaaugacaacagcacggcaacgcugugccuugggcaccaugcaguaccaaacggaacgauagugaaaacaaucacgaaugaccaaauugaaguuacuaaugcuacugagcugguucagaguuccucaacagguggaauaugcgacaguccucaucagauccuugauggagaaaacugcacacuaauagaugcucuauugggagacccucagugugauggcuuccaaaauaagaaaugggaccuuuuuguugaacgcagcaaagccuacagcaacuguuacccuuaugaugugccggauuaugccucccuuaggucacuaguugccucauccggcacacuggaguuuaacaaugaaagcuucaauuggacuggagucacucaaaaugggacaagcucugcuugcaaaaggagaucuaauaacaguuucuuuaguagauugaauugguugacccacuuaaaauucaaauacccagcauugaacgugacuaugccaaacaaugaaaaauuugacaaauuguacauuugggggguucaccacccggguacggacaaugaccaaaucuuccuguaugcucaagcaucaggaagaaucacagucucuaccaaaagaagccaacaaacuguaaucccgaauaucggaucuagacccagaguaaggaauauccccagcagaauaagcaucuauuggacaauaguaaaaccgggagacauacuuuugauuaacagcacagggaaucuaauugcuccuagggguuacuucaaaauacgaagugggaaaagcucaauaaugagaucagaugcacccauuggcaaaugcaauucugaaugcaucacuccaaauggaagcauucccaaugacaaaccauuucaaaauguaaacaggaucacauauggggccugucccagauauguuaagcaaaacacucugaaauuggcaacagggaugcgaaauguaccagagaaacaaacuagaggcauauuuggcgcaaucgcgggguucauagaaaaugguugggagggaaugguggaugguugguacgguuucaggcaucaaaauucugagggaauaggacaagcagcagaucucaaaagcacucaagcagcaaucaaucaaaucaaugggaagcugaauagguugaucgggaaaaccaacgagaaauuccaucaaauugaaaaagaauucucagaaguagaagggagaauucaggaccucgagaaauauguugaggacacuaaaauagaucucuggucauacaacgcggagcuucuuguugcccuggagaaccaacauacaauugaucuaacugacucagaaaugaacaaacuguuugaaagaacaaagaagcaacugagggaaaaugcugaggauaugggcaaugguuguuucaaaauauaccacaaaugugauaaugccugcauaggaucaaucagaaauggaacuuaugaccaugauguauacagagaugaagcauuaaacaaccgguuccagaucaaaggcguugagcugaagucaggauacaaagauuggauccuauggauuuccuuugccauaucauguuuuuugcuuuguguugcuuuguugggguucaucaugugggccugccaaaaaggcaacauuaggugcaacauuugcauuuga

SEQ ID NO: 33738 - RNA, 1701 nt, Artificial Sequence
  derived and/or modified CDS sequence (wt) from hemagglutinin__InfluenzaA__ABS71675
augaagacuaucauugcuuugagcuacauucuaugucugguuuucgcucaaaaacuucccggaaaugacaacagcacggcaacgcugugccuugggcaccaugcaguaccaaacggaacgauagugaaaacaaucacgaaugaccaaauugaaguuacuaaugcuacugagcugguucagaguuccucaacagguggaauaugcgacaguccucaucagauccuugauggagaaaacugcacacuaauagaugcucuauugggagacccucagugugauggcuuccaaaauaagaaaugggaccuuuuuguugaacgcagcaaagcccacagcaacuguuacccuuaugaugugccggauuaugccucccuuaggucacuaguugccucauccggcacacuggaguuuaacaaugaaagcuucaauuggacuggagucacucaaaauggaacaagcucugcuugcaaaaggagaucuaauaacaguuucuuuaguagauugaauugguugacccacuuaaaauucaaauacccagcauugaacgugacuaugccaaacaaugaaaaauuugacaaauuguacauuugggggguucaccacccggguacggacaaugaccaaaucuuccuguaugcucaagcaucaggaagaaucacagucucuaccaaaagaagccaacaaacuguaaucccgaauaucggaucuagacccagaguaagaaauauccccagcagaauaagcaucuauuggacaauaguaaaaccgggagacauacuuuugauuaacagcacagggaaucuaauugcuccuagggguuacuucaaaauacgaagugggaaaagcucaauaaugagaucagaugcacccauuggcaaaugcaauucugaaugcaucacuccaaauggaagcauucccaaugacaaaccauuucaaaauguaaacaggaucacauauggggccugucccagauauguuaagcaaaacacucugaaauuggcaacagggaugcgaaauguaccagagaaacaaacuagaggcauauuuggcgcaaucgcggguuucauagaaaaugguugggagggaaugguggaugguugguacgguuucaggcaucaaaauucugagggaauaggacaagcagcagaucucaaaagcacucaagcagcaaucaaucaaaucaaugggaagcugaauagguugaucgggaaaaccaacgagaaauuccaucagauugaaaaagaauucucagaaguagaagggagaauucaggaccucgagaaauauguugaggacacuaaaauagaucucuggucauacaacgcggagcuucuuguugcccuggagaaccaacauacaauugaucuaacugacucagaaaugaacaaacuguuugaaagaacaaagaagcaacugagggaaaaugcugaggauaugggcaaugguuguuucaaaauauaccacaaaugugacaaugccuguauaggaucaaucagaaauggaacuuaugaccaugauguauacagagaugaagcauuaaacaaccgguuccagaucaaaggcguugagcugaagucaggauacaaagauuggauccuauggauuuccuuugccauaucauguuuuuugcuuuguguugcuuuguugggguucaucaugugggccugccaaaaaggcaacauuaggugcaacauuugcauuuga

SEQ ID NO: 33739 - RNA, 1701 nt, Artificial Sequence
  derived and/or modified CDS sequence (wt) from hemagglutinin__InfluenzaA__ABS71676
augaagacuaucauugcuuugagcuacauucuaugucugguuuucgcucaaaaacuucccggaauugacaacagcacggcaacgcugugccuugggcaccaugcaguaccaaacggaacgauagugaaaacaaucacgaaugaccaaauugaaguuacuaaugcuacugagcugguucagaauuccucaacagguggaauaugcgacaguccucaucagauccuugauggagaaaacugcacacuaauagaugcucuauugggagacccucagugugauggcuuccaaaauaagaaaugggaccuuuuuguugaacgcagcaaagccuacagcaacuguuacccuuaugaugugccggauuaugccucccuuaggucacuaguugccucauccggcacacuggaguuuaacaaugaaagcuucaauuggacuggagucacucaaaauggaacaagcucugcuugcaaaaggggaucuaauaacaguuucuuuaguagauugaauugguugacccacucaaaauucaaauacccagcauugaacgugacuaugccaaacaaugaagaauuugacaaauuguacauuugggggguucaccacccggguacggacaaugaccaaaucuuccuguaugcucaagcaucaggaagaaucacagucucuaccaaaagaagccaacaaacuguaaucccgaauaucggaucuagacccagaguaaggaauauccccagcagaauaagcaucuauuggacaauaguaaaaccgggagacauacuuuugauuaacagcacagggaaucuaauugcuccuagggguuacuucauaauacgaagugggaaaagcucaauaaugagaucagaugcacccauuggcaaaugcaauucugaaugcaucacuccaaauggaagcauucccaaugacaaaccauuucaaaauguaaacaggaucacauacggggccugucccagauauguuaagcaaaacacucugaaauuggcaacagggaugcgaaauguaccagagaaacaaacuagaggcauauuuggcgcaaucgcggguuucauagaaaaugguugggagggaaugguggaugguugguacgguuucaggcaucaaaauucugagggaauaggacaagcagcagaucucaaaagcacucaagcagcaaucgaucaaaucaaugggaagcugaauagguugaucgggaaaaccaacgagaaauuccaccagauugaaaaagaauucucagaaguagaagggagaauucaggaccucgagaaauauguugaggacacuaaaauagaucucuggucauacaacgcggagcuucuuguugcccuggagaaccaacauacaauugaucuaacugacucagaaaugaacaaacuguuugaaaagacaaagaagcaacugagggaaaaugcugaggauaugggcaaugguuguuucaaaauauaccacaaaugugacaaugccugcauaggaucaaucagaaauggaacuuaugaccaugauguauacagagaugaagcauuaaacaaccgguuucagaucaagggcguugagcugaagucaggauacaaagauuggauccuauggauuuccuuugccauaucauguuuuuugcuuuguguugcuuuguugggguucaucaugugggccugccaaaaaggcaacauuaggugcaacauuugcauuuga

SEQ ID NO: 33740 - RNA, 1701 nt, Artificial Sequence
  derived and/or modified CDS sequence (wt) from hemagglutinin__InfluenzaA__ABS71677
augaagacuaucauugcuuugagcuacauucuaugucugguuuucgcucaaaaacuucccggaauugacaacagcacggcaacgcugugccuugggcaccaugcaguaccaaacggaacgauagugaaaacaaucacggaugaccaaauugaaguuacuaaugcuacugagcugguucagaauuccucaacagguggaauaugcgacaguccucaucagauccuugauggagaaaacugcacacuaauagaugcucuauugggagacccucagugugauggcuuccaaaauaagaaaugggaccuuuuuguugaacgcagcaaagccuacagcaacuguuacccuuaugaugugccggauuaugccucccuuaggucacuaguugccucauccggcacacuggaguuuaacaaugaaagcuucaauuggacuggagucacucaaaauggaacaagcucugcuugcaaaaggggaucuaauaacaguuucuuuaguagauugaauugguugacccacucaaaauucaaauacccagcauugaacgugacuaugccaaacaaugaagaauuugacaaauuguacauuugggggguucaccacccggguacggacaaugaccaaaucuuccuguaugcucaagcaucaggaagaaucacagucucuaccaaaagaagccaacaaacuguaaucccgaauaucggaucuagacccagaguaaggaauauccccagcagaauaagcaucuauuggacaauaguaaaaccgggagacauacuuuugauuaacagcacagggaaucuaauugcuccuagggguuacuucaaaauacgaagugggaaaagcucaauaaugagaucagaugcacccauugacaaaugcaauucugaaugcaucacuccaaauggaagcauucccaaugacaaaccauuucaaaaugugaacagaaucacauacggggccugucccagauauguuaagcaaaacacucugaaauuggcaacagggaugcgaaauguaccagagaaacaaacuagaggcauauuuggcgcaaucgcggguuucauagaaaaugguugggagggaaugguggaugguugguacgguuucaggcaucaaaauucugagggaauaggacaagcagcagaucucaagagcacucaagcagcaaucgaucaaaucaaugggaagcugaauagguugaucgggaaaaccaacgagaaauuccaccagauugaaaaagaauucucagaaguagaagggagaauucaggaccucgagaaauauguugaggacacuaaaauagaucucuggucauacaacgcggagcuucuuguugcccuggagaaccaacauacaauugaucuaacugacucagaaaugaacaaacuguuugaaaagacaaagaagcaacugagggaaaaugcugaggauaugggcaaugguuguuucaaaauauaccacaaaugugacaaugccugcauaggaucaaucagaaauggaacuuaugaccaugauguauacagagaugaagcauuaaacaaccgguuucagaucaagggcguugagcugaagucaggauacaaagauuggauccuauggauuuccuuugccauaucauguuuuuugcuuuguguugcuuuguugggguucaucaugugggccugccaaaaaggcaacauuaggugcaacauuugcauuuga

SEQ ID NO: 33741 - RNA, 1701 nt, Artificial Sequence
  derived and/or modified CDS sequence (wt) from hemagglutinin__InfluenzaA__ABS71679
augaagacuaucauugcuuugagcuacauucuaugucugguuuucgcucaaaaacuucccggaauugacaacagcacggcaacgcugugccuugggcaccaugcaguaccaaacggaacgauagugaaaacaaucacgaaugaccaaauugaaguuacuaaugcuacugagcugguucagaguuccucaacagguggaauaugcgacaguccucaucagauccuugauggagaaaacugcacacuaauagaugcucuauugggagacccucagugugauggcuuccaaaauaagaaaugggaccuuuuuguugaacgcagcaaagccuacagcaacuguuacccuuaugaugugccggauuaugccucccuuaggucacuaguugccucauccggcacacuggaguuuaacaaugaaagcuucaauuggacuggagucacucaaaauggaacaagcucugcuugcaaaaggggaucuaauaacaguuucuuuaguagauugaauugguugacccacucaaaauucaaauacccagcauugaacgugacuaugccaaacaaugaagaauuugacaaauuguacauuugggggguucaccacccggguacggacaaugaccaaaucuuccuguaugcucaagcaucaggaagaaucacagucucuaccaaaagaagccaacaaacuguaaucccgaauaucggaucuagacccagaguaaggaauauccccagcagaauaagcaucuauuggacaauaguaaaaccgggagacauacuuuugauuaacagcacagggaaucuaauugcuccuagggguuacuucaaaauacgaagugggaaaagcucaauaaugagaucagaugcacccauuggcaaaugcaauucugaaugcaucacuccaaauggaagcauucccaaugacaaaccauuucaaaauguaaacaggaucacauacggggccugucccagauauguuaagcaaaacacucugaaauuggcaacagggaugcgaaauguaccagagaaacaaacuagaggcauauuuggcgcaaucgcggguuucauagaaaaugguugggagggaaugguggaugguugguacgguuucaggcaucaaaauucugagggaauaggacaagcagcagaucucaaaagcacucaagcagcaaucgaucaaaucaaugggaagcugaauagguugaucgggaaaaccaacgagaaauuccaccagauugaaaaagaauucucagaaguagaagggagaauucaggaccucgagaaauauguugaggacacuaaaauagaucucuggucauacaacgcggagcuucuuguugcccuggagaaccaacauacaauugaucuaacugacucagaaaugaacaaacuguuugaaaagacaaagaagcaacugagggaaaaugcugaggauaugggcaaugguuguuucaaaauauaccacaaaugugacaaugccugcauaggaucaaucagaaauggaacuuaugaccaugauguauacagagaugaagcauuaaacaaccgguuucagaucaagggcguugagcugaagucaggauacaaagauuggauccuauggauuuccuuugccauaucauguuuuuugcuuuguguugcuuuguugggguucaucaugugggccugccaaaaaggcaacauuaggugcaacauuugcauuuga

SEQ ID NO: 33742 - RNA, 1701 nt, Artificial Sequence
  derived and/or modified CDS sequence (wt) from hemagglutinin__InfluenzaA__ABS71680
augaagacuaucauugcucugagcuacauccuaugucugguuuucgcucaaaaacuucccggaauugacaacagcacggcaacgcugugccuugggcaccaugcaguaccaaacggaacgauagugaaaacaaucacgaaugaccaaauugaaguuacuaaugcuacugagcugguucagaguuccucaacagguggaauaugcgacaguccucaucagauccuugauggagaaaacugcacacuaauagaugcucuauugggagacccucagugugauggcuuccaaaauaagaaaugggaccuuuuuguugaacgcagcaaagccuacagcaacuguuacccuuaugaugugccggauuaugccucccuuaggucacuaguugccucauccggcacacuggaguuuaacaaugaaagcuucaauuggacuggagucacucaaaauggaacaagcucugcuugcaaaaggggaucuaauaacaguuucuuuaguagauugaauugguugacccacucaaaauucaaauacccagcauugaacgugacuaugccaaacaaugaagaauuugacaaauuguacauuugggggguucaccacccggguacggacaaugaccaaaucuuccuguaugcucaagcaucaggaagaaucacagucucuaccaaaagaagccaacaaacuguaaucccgaauaucggaucuagacccagaguaaggaauauccccagcagaauaagcaucuauuggacaauaguaaaaccgggagacauacuuuugauuaacagcacagggaaucuaauugcuccuagggguuacuucaaaauacgaagugggaaaagcucaauaaugagaucagaugcacccauuggcaaaugcaauucugaaugcaucacuccaaauggaagcauucccaaugacaaaccauuucaaaauguaaacaggaucacauacggggccugucccagauauguuaagcaaaacacucugaaauuggcaacagggaugcgaaauguaccagagaaacaaacuagaggcauauuuggcgcaaucgcggguuucauagaaaaugguugggagggaaugguggaugguugguacgguuucaggcaucaaaauucugagggaauaggacaagcagcagaucucaaaagcacucaagcagcaaucgaucaaaucaaugggaaacugaauagguugaucgggaaaaccaacgagaaauuccaccagauugaaaaagaauucucagaaguagaagggagaauucaggaccucgagaaauauguugaggacacuaaaauagaucucuggucauacaacgcggagcuucuuguugcccuggagaaccaacauacaauugaucuaacugacucagaaaugaacaaacuguuugaaaagacaaagaagcaacugagggaaaaugcugaggauaugggcaaugguuguuucaaaauauaccacaaaugugacaaugccugcauaggaucaaucagaaauggaacuuaugaccaugauguauacagagaugaagcauuaaacaaccgguuucagaucaagggcguugagcugaagucaggauacaaagauuggauccuauggauuuccuuugccauaucauguuuuuugcuuuguguugcuuuguugggguucaucaugugggccugccaaaaaggcaacauuaggugcaacauuugcauuuga

SEQ ID NO: 33743 - RNA, 1701 nt, Artificial Sequence
  derived and/or modified CDS sequence (wt) from hemagglutinin__InfluenzaA__ABS71682
augaagacuaucauugcuuugagcuacauucuaugucugguuuucgcucaaaaacuucccggaaaugacaacagcacggcaacgcugugccuugggcaccaugcaguaccaaacggaacgauagugaaaacaaucacgaaugaccaaauugaaguuacuaaugcuacugagcugguucagaguuccucaacagguggaauaugcgacaguccucaucagauccuugauggagaaaacugcacacuaauagaugcucuauugggagacccucagugugauggcuuccaaaauaagaaaugggaccuuuuuguugaacgcagcaaagccuacagcaacuguuacccuuaugaugugccggauuaugccucccuuaggucacuaauugccucauccggcacacuggaguuuaacaaugaaagcuucaauuggacuggagucacucaaaacggaacaagcucugcuugcaaaaggagaucuaauaacaguuucuuuaguagauugaauugguugacccacuuaaaauucaaauacccagcauugaacgugacuaugccaaacaaugaaaaauuugacaaauuguacauuugggggguucaccacccggguacggacaaugaccaaaucuuccuguaugcucaagcaucaggaagaaucacagucucuaccaaaagaagucaacaaacuguaaucccgaauaucggaucuagacccagaguaaggaauauccccagcagaauaagcaucuauuggacaauaguaaaaccgggagacauacuuuugauuaacagcacagggaaucuaauugcuccuagggguuacuucaaaauacgaagugggaaaagcucaauaaugagaucagaugcacccauuggcaaaugcaauucugaaugcaucacuccaaauggaagcauucccaaugacaaaccauuucaaaauguaaacaggauaacauacggggccugucccagauauguuaagcaaaacacucugaaauuggcaacagggaugcgaaacguaccagagaaacaaacuagaggcauauuuggugcaaucgcggguuucauagaaaaugguugggagggaaugguggaugguugguacgguuucaggcaucaaaauucugagggaauaggacaagcagcagaucucaaaagcacucaagcagcaaucgaucaaaucaaugggaagcugaauagguugaucgggaaaaccaacgagaaauuccaucagauugaaaaagaauucucagaaguagaagggagaauucaggaccucgagaaauauguugaggacacuaaaauagaucucuggucauacaaugcggagcuucuuguugcccuggagaaccaacauacaauugauuuaacugacucagaaaugaacaaacuguuugaaaaaacaaagaagcaacugagggaaaaugcugaggauaugggcaaugguuguuucaaaauauaccacaaaugugacaaugccugcauaggaucaaucagaaauggaacuuaugaccaugauguauacagagaugaagcauuaaacaaccgguuccagaucaagggcguugagcugaagucaggauacaaagauuggauccuauggauuuccuuugccauaucauguuuuuugcuuuguguuguuuuguugggguucaucaugugggccugccaaaaaggcaacauuaggugcaacauuugcauuuga

SEQ ID NO: 33744 - RNA, 1701 nt, Artificial Sequence
  derived and/or modified CDS sequence (wt) from hemagglutinin__InfluenzaA__ABU80177
augaagacuaucauugcuuugagcuacauuuuaugucugguuuucgcucaaaaacuucccguaaaugacaacagcacggcaacgcugugccuggggcaccaugcagugccaaacggaacgcuagugaaaacaaucacgaaugaccacauugaagugacuaaugcuacugagcugguucagaguuccucaacagguagaauaugcgacaguccucaccaaauccuugauggagaaaacugcacacuaauagaugcucuauugggagacccucauugugauggcuuccaaaauaaggaaugggaccuuuuuguugaacgcagcacagccuacagcaacuguuacccuuaugaugugccggauuaugccucccuuaggucacuaguugcuucauccggcacacuggaguuuaacaaugaaagcuucaauuggacuggagucgcucagaauggaacaagcucuucuugcaaaaggagaucuauuaaaaguuucuuuaguagauugaauugguugcaccaauuaaaauacaaauauccagcacugaacgugacuaugccaaacaaugaaaaauuugacaaauuguacauuugggggguucaccacccgaguacggacagugaccaaaucagccuauaugcucaagcaucagggagagucacagucucuaccaaaagaagccaacaaacuguaaucccgaauaucggaucuagacccuggguaaggggugucuccagcagaauaagcaucuauuggacaauaguaaaaccgggagacauacuuuugauuaacagcacagggaaucuaauugcuccucgggguuacuucaaaauacgaagugggaaaagcucaauaaugaggucaaaugcacccauuggcaaaugcaauucugaaugcaucacuccaaauggaagcauucccaaugacaaaccauuucaaaauguaaacaggaucacauauggggccugucccagauauguuaagcaaaacacucugaaauuggcaacagggaugcggaauguaccagagaaacaaacuagaggcauauucggugcaaucgcggguuucauagaaaaugguugggaaggaaugguggacgguugguacgguuucaggcaucaaaauucugagggcacaggacaagcagcagaucuuaaaagcacucaagcagcaaucaaccaaaucaacgggaaacugaauagguuaaucgagaaaacaaacgagaaauuccaucaaauugaaaaagaauucucagaaguagaagggagaauucaggaccucgagaaauauguugaggacacuaaaauagaucucuggucguacaacgcggagcuucuuguugcccuggagaaccaacauacaauugaucuaacugacucagaaaugaacaaacuguuugaaagaacaaggaagcaacugagggaaaaugcugaggauaugggcaaugguuguuucaaaauauaccacaaaugugacaaugccugcauagggucaaucagaaauggaacuuaugaccaugauguauacagagacgaagcauuaaacaaccgguuucagaucaaagguguugagcugaagucaggauacaaagauuggauccuauggauuuccuuugccauaucauguuuuuugcuuuguguuguuuugcugggguucaucaugugggccugccaaaaaggcaacauuaggugcaacauuugcauuuga

SEQ ID NO: 33745 - RNA, 1698 nt, Artificial Sequence
  derived and/or modified CDS sequence (wt) from hemagglutinin__InfluenzaA__ABU80298
augaaaguaaaacuacugguccuguuauguacauuuacagcuacauaugcagacacaauauguauaggguaccaugccaacaacucaaccgacacuguugacacaguacuugagaagaaugugacagugacacacucugucaaccuacuugaggacagucacaauggaaaacuaugucuacuaaaaggaauagccccacuacaauuggguaauugcagcguugccggauggaucuuaggaaacccagaaugcgaauuacugauuuccaaggaaucaugguccuacauuguagaaacaccaaauccugagaauggaacauguuacccaggguauuucgccgacuaugaggaacugagggagcaauugaguucaguaucuucauuugagagauucgaaauauuccccaaagaaagcucauggcccaaccacaccguaaccggaguaucagcaucaugcucccauaaugggaaaagcaguuuuuacagaaauuugcuauggcugacggggaagaaugguuuguacccaaaccugagcaaguccuaugcaaacaacaaagagaaagaaguccuuguacuaugggguguucaucacccgccuaacauaggggaccaaagggcccucuaucauacagaaaaugcuuaugucucuguagugucuucacauuauagcagaagauucaccccagaaauagccaaaagacccaaaguaagagaucaggaaggaagaaucaacuacuacuggacucugcuggaacccggggauacaauaauauuugaggcaaauggaaaucuaauagcgccacgguaugcuuucgcacugaguagaggcuuuggaucaggaaucaucaccucaaaugcaccaauggaugaaugugaugcgaagugucaaacaccucagggagcuauaaacagcagucuuccuuuccagaacguacacccagucacaauaggagaguguccaaaguaugucaggagugcaaaauuaaggauggcuacaggacuaaggaacaucccauccauucaauccagagguuuguuuggagccauugccgguuucauugaagggggguggacuggaaugguagaugggugguaugguuaucaucaucagaaugagcaaggaucuggcuaugccgcagaucaaaaaagcacacaaaaugccauuaacgggauuacaaacaaggugaauucuguaauugagaaaaugaacacucaauucacagcugugggcaaagaauucaacaaauuggaaagaaggauggaaaacuuaaauaaaaaaguugaugauggguuucuagacauuuggacauauaaugcagaauuguugguucuacuggaaaaugaaaggacuuuggauuuccaugacuccaaugugaagaaucuguauaagaaaguaaaaagccaauuaaagaauaaugccaaagaaauaggaaacggguguuuugaauucuaucacaaguguaacaaugaaugcauggagagugugaaaaauggaacuuaugacuauccaaaauauuccgaagaaucaaaguuaaacagggagaaaauugauggagugaaauuggaaucaaugggagucuaucagauucuggcgaucuacucaacugucgccaguucccugguucuuuuggucucccugggggcaaucagcuucuggauguguuccaaugggucuuugcaguguagaauaugcaucuga

SEQ ID NO: 33746 - RNA, 1701 nt, Artificial Sequence
  derived and/or modified CDS sequence (wt) from hemagglutinin__InfluenzaA__ABU80320
augaagacuaucauugcuuugagcuacauuuuaugucugguuuucgcucaaaaacuucccggaaaugacaacagcacggcaacgcugugccuggggcaccaugcagugccaaacggaacgcuagugaaaacaaucacgaaugaccaaauugaagugacuaaugcuacugagcugguucagaguuccucaacagguggaauaugcgacaguccucaccaaauccuugauggagaaaacugcacacuaauagaugcucuauugggagacccucauugugauagcuuccaaaauaaggaaugggaccuuuuuguugaacgcagcaaagccuacagcaacuguuacccuuaugaugugccggauuaugccucccuuaggucacuaguugccucauccggcacacuggaguuuaacaaugaaagcuucaauuggacuggagucgcucagaauggaacaagcucugcuugcaaaaggagaucuaauaaaaguuucuuuaguagauugaauugguugcaccaauuaaaauacaaauacccagcacugaacgugacuaugccaaacaaugaaaaauuugacaaauuguacauuugggggguucaccacccgaguacggacagugaccaaaucagccuauaugcucaagcaccagggagagucacagucucuaccaaaagaagccaacaaacuguaaucccgaauaucggaucuagacccuggguaaggggugucuccagcauaauaagcaucuauuggacaauaguaaaaccgggagacauacuuuugauuaacugcacagggaaucuaauugcuccucgggguuacuucaaaauacgaagugggaaaagcucaauaaugaggucagaugcauccauuggcaaaugcaauucugaaugcaucacuccaaauggaagcauucccaaugacaaaccauuucaaaauguaaacaggaucacauauggggccugucccagauauguuaagcaaaacacucugaaauuggcaacagggaugcggaauguaccagagaaacaaacuagaggcauauucggcgcaaucgcggguuucauagaaaaugguugggagggaaugguggacgguugguacgguuucaggcaucaaaauucugagggcacaggacaagcagcagaucucaaaagcacucaagcagcaaucaaccaaaucaacgggaaacugaauagguuaaucgagaaaacgaacgagaaauuccaucaaauugaaaaagaauucucagaaguggaagggagaauucaggaccucgagaaauauguugaggacacuaaaauagaucucuggucguacaacgcggagcuucuuguugcccuggagaaccagcauacaauugaucuaacugacucagaaaugaacaaacuguuugaaagaacaaagaagcaacugagggaaaaugcugaggauaugggcaaugguuguuucaaaauauaccacaaaugugacaaugccugcauagggucaaucagaaaugggacuuaugaccaugauguauacagagacgaagcauuaaacaaccgguuccagaucaaagguguugagcugaagucaggauacaaagauuggauccuauggauuuccuuugccauaucauguuuuuugcuuuguguugucuugcugggguucaucaugugggccugccaaaaaggcaacauuaggugcaacauuugcauuuga

SEQ ID NO: 33747 - RNA, 1701 nt, Artificial Sequence
  derived and/or modified CDS sequence (wt) from hemagglutinin__InfluenzaA__ABU80331
augaagacuaucauugcuuugagcuacauuuuaugucugguuuucgcucaaaaacuucccggaaaugacaacagcacggcaacgcugugccuggggcaccaugcagugccaaacggaacgcuagugaaaacaaucacgaaugaccaaauugaagugacuaaugcuacugagcugguucagaguuccucaacagguagaauaugcgacaguccucaccaaauccuugauggagaaaacugcacacuaauagaugcucuauugggagacccucauugugauggcuuccaaaauaaggaaugggaccuuuuuguugaacgcagcagagccuacagcaacuguuacccuuaugaugugccggauuaugucucccuuaggucacuaguugccucaucaggcacgcuggaguuuaacaaugaaagcuucaauuggacuggagucgcucagaauggaacaagcucugcuugcaaaaggagaucugauaaaaguuucuuuaguagauugaauugguugcaccaauuaaaauacaaauauccagcacugaacgugacuaugccaaacaaugaaaaauuugacaaauuguacauuugggggguucaccacccggguacagacagugaccaaaucagccuauaugcucaagcaucagggagagucacagucucuaccaaaagaagccaacaaacuguaauuccgaauaucggaucuagacccuggguaaggggugucuccagcagaauaagcaucuauuggacaauaguaaaaccgggagacauacuuuugauuaacagcacagggaaucuaauugcuccuagggguuacuucaaaauacgaagugggaaaagcucaauaaugaggucagaugcacccauuggcaagugcaauucugaaugcaucacuccaaauggaagcauucccaaugacaaaccauuucaaaauguaaacaggaucacauaugggcccugucccagauauguuaagcaaaacacucugaaauuggcaacagggaugcggaaugugccagagaaacaaacuagaggcauauucggugcaaucgcgggcuucauagaaaaugguugggagggaaugauggacgguugguacgguuucaggcaucaaaauucugagggcacagggcaagcagcagaucuuaaaagcacucaagcagcaaucaaccaaaucaacgggaaacugaauagguuaaucgagaaaacgaacgagaaauuccaucaaauugaaaaagaauucucagaaguagaagggagaauucaggaccucgagaaauauguugaggacacuaaaauagaucucuggucguacaaugcggagcuucuuguugcccuggagaaccaacauacaauugaucuaacugacucagaaaugaacaaacuguuugaaagaacaaagaagcaacugagggaaaaugcugaggauaugggcaaugguuguuucaaaauauaccacaaaugugacaaugccugcauagggucaauuagaaauggaacuuaugaccaugauguauacagagacgaagcauuaaacaaccgguuccagaucaaagguguugagcugaagucaggauacaaagauuggauccuauggauuuccuuugccauaucauguuuuuugcuuuguauuguuuugcugggguucaucaugugggccugccaaaaaggcaacauuaggugcaacauuugcauuuga

SEQ ID NO: 33748 - RNA, 1701 nt, Artificial Sequence
  derived and/or modified CDS sequence (wt) from hemagglutinin__InfluenzaA__ABU80400
augaaggcaauacuauuagucuugcuauauacauuuacagccgcaaaugcagacacauuauguauagguuaccaugcaaauaauucaacugacacuguugauacaguacuagaaaagaauguaacaguaacacacucuguuaaccuucuagaagacagacauaacggaaaacuauguaaacuaagggggguagccccauugcauuuggguaaauguaacauugcuggauggcuccugggaaacccagaaugugaauuacuauucacagcaagcucauggucuuacauuguggaaacaucuaacucagacaaugggacauguuacccaggagauuucaucaauuacgaagagcuaagagagcaauugagcucagugucaucauuugaaagauuugagauauuccccaaggcaaguucauggcccaaucaugaaacgaacagaggugugacggcagcaugcccuuaugcuggagcaaacagcuucuacagaaauuuaauauggcugguaaaaaaaggaaauucauacccaaagcucagcaaauccuauguuaacaauaaggagaaggaaguccucgugcuauggggcauucaccauccaccuaccaguacugaccaacaaagucucuaccagaaugcagaugcuuauguuuuuguggggucaucaaaguacaacaagaaauucaagccagaaauagcaacaagacccaaggugagaggucaagcagggagaaugaacuauuacuggacacuaguagagccuggagacacaauaacauucgaagcaacuggaaaucuagugguaccaagauaugccuucgcaaugaaaagagguucuggaucugguauuaucauuucagauacaccaguccacgauuguaauacgacuugucaaacacccaaaggugcuauaaacaccagccucccauuucagaauauacauccagucacaauuggagaauguccaaaguaugucaaaagcacaaaauugagaauggcuacaggacuaaggaauaucccgucuauucaaucuagaggucuguuuggagccauugcuggcuuuauugaggggggauggacaggaaugauagauggaugguacgguuaucaccaucaaaaugagcagggaucaggauaugcagcugaccgaaagagcacacagaaugccauugacgggaucacuaacaaaguaaacucuguuauugaaaagaugaacacacaauucacagcaguggguaaagaauucaaccaccuggaaaaaagaauagagaauuuaaacagaaagguugaugaugguuuucuggauauuuggacuuacaaugccgaacuguugguucuauuggaaaaugaaagaacuuuagauuaccaugacucaaaugugaagaaccuauaugagaaagugagaagccagcuaaaaaacaaugccaaggaaauuggaaauggcugcuuugaauuuuaccacaaaugugaugacacgugcauggagagcgucaaaaaugggacuuaugauuacccaaaauacucagaagaaucaaaacuaaacagagaggaaauagaugggguaaagcuggaaucaacaaggauuuaccagaucuuggcgaucuauucaacugucgccaguucauugguacuguuagucucccugggggcaaucaguuucuggaugugcuccaaugggucuuuacagugcagaauauguauuuaa

SEQ ID NO: 33749 - RNA, 1701 nt, Artificial Sequence
  derived and/or modified CDS sequence (wt) from hemagglutinin__InfluenzaA__ABU92572
augaagacuaucauugcuuugagcuacauuuuaugucugguuuucacucaaaaacuucccggaaaugacaacagcacggcaacgcugugccuggggcaccaugcagugccaaacggaacgcuagugaaaacaaucacgaaugaccaaauugaagugacuaaugcuacugagcugguucagaguuccucaacagguagaauaugcgacaguccucaccaaauccuugauggagaaaacugcacacuaauagaugcucuauugggagacccucauugugauggcuuccaaaauaaggaaugggaccuuuuuguugaacgcagcaaagccuacagcaacuguuacccuuaugaugugccggauuaugucucccuuaggucacuaguugccucaucaggcacgcuggaguuuaacaaugaaagcuucaauuggacuggagucgcucagaauggaacaagcucugcuugcaaaaggagaucugauaaaaguuucuuuaguagauugaauugguugcaccaauuaaaauacaaauauccagcacugaacgugacuaugccaaacaaugaaaaauuugacaaauuguacauuugggggguucaccacccggguacagacagugaccaaaucagccuauaugcucaagcaucagggagagucacagucucuaccaaaagaagccaacaaacuguaaucccgaauaucggaucuagacccuggguaaggggugucuccagcagaauaagcaucuauuggacaauaguaaaaccgggagacauacuuuugauuaacagcacagggaaucuaauugcuccucgggguuauuucaaaauacgaagugggaaaagcucaauaaugaggucagaugcacccauuggcaaaugcaauucugaaugcaucacuccaaauggaagcauucccaaugacaaaccauuucaaaauguaaacaggaucacauaugggcccugucccagauauguuaagcaaaacacucugaaauuggcaacagggaugcggaaugugccagagaaacaaacuagaggcauauucggugcaaucgcgggcuucauagaaaaugguugggagggaaugauggacgguugguacgguuucaggcaucaaaauucugagggcacagggcaagcagcagaucuuaaaagcacucaagcagcaaucaaccaaaucaacgggaaacugaauagguuaaucgagaaaacgaacgagaaauuccaucaaauugaaaaagaauucucagaaguagaagggagaauucaggaccucgagaaauauguugaggacacuaaaauagaucucuggucguacaaugcggagcuucuuguugcccuggagaaccaacauacaauugaucuaacugacucagaaaugaacaaacuguuugaaagaacaaagaagcaacugagggaaaaugcugaggauaugggcaaugguuguuucaaaauauaccacaaaugugacaaugccugcauagggucaaucagaaauggaacuuaugaccaugauguauacagagacgaagcauugaacaaccgguuccagaucaaagguguugagcugaagucaggauacaaagauuggauccuauggauuuccuuugccauaucauguuuuuugcuuuguauuguuuugcugggguucaucaugugggccugccaaaaaggcaacauuaggugcaacauuugcauuuga

SEQ ID NO: 33750 - RNA, 1701 nt, Artificial Sequence
  derived and/or modified CDS sequence (wt) from hemagglutinin__InfluenzaA__ABU92573
augaagacuaucauugcuuugagcuacauuuuaugccugguuuucgcucaaaaacuucccggaaaugacaacagcacggcaacgcugugccuggggcaccaugcagugccaaacggaacgcuagugaaaacaaucacgaaugaccaaauugaaguaacuaaugcuacugagcugguucagaguuccucaacagguagaauaugcgacaguccucaccaaauccuugauggagaaaacugcacacuaauagaugcucuauugggagacccucauugugauggcuuccaaaauaaggaaugggaccuuuuuguugaacgcagcaaagccuacagcaacuguuacccuuaugaugugccggauuaugucucccuuaggucacuaguugccucaucaggcacgcuggaguuuaacaaugaaagcuucaauuggacuggagucgcucagaauggaacaagcucugcuugcaaaaggagaucugauaaaaguuucuuuaguagauugaauugguugcaccaauuaaaauacaaauauccagcacugaacgugacuaugccaaacaaugaaaaauuugacaaauuguacauuugggggguucaccacccggguacagacagugaccaaaucagccuauaugcucaagcaucagggagagucacagucucuaccaaaagaagccaacaaacuguaaucccgaauaucggaucuagacccuggguaaggggugucuccagcagaauaagcaucuauuggacaauaguaaaaccgggagacauacuuuugauuaacagcacagggaaucuaauugcuccucgggguuacuucaaaauacgaagugggaaaagcucaauaaugaggucagaugcacccauuggcaaaugcaauucugaaugcaucacuccaaauggaagcauucccaauggcaaaccauuucaaaauguaaacaggaucacauauggggccugucccagauauguuaagcaaaacacucugaaauuggcaacagggaugcggaaugugccagagaaacaaacuagaggcauauucggugcaaucgcgggcuucauagaaaaugguugggagggaaugauggacgguugguacgguuucaggcaucagaauucugagggcacagggcaagcagcagaucuuaaaagcacucaagcagcaaucaaccaaaucaacgggaaacugaauagguuaaucaagaaaacgaacgagaaauuccaucaaauugaaaaagaauucucagaaguagaagggagaauucaggaccucgagaaauaugucgaggacacuaaaauagaucucuggucguacaaugcggagcuucuuguugcccuggagaaccaacauacaauugaucuaacugacucagaaaugaacaaacuguuugaaagaacaaagaagcaacugagggaaaaugcugaggauaugggcaaugguuguuucaaaauauaccacaaaugugacaaugccugcauagggucaaucagaaauggaacuuaugaccaugauguauacagagacgaagcauugaacaaccgguuccagaucaaagguguugagcugaagucaggauacaaagauuggauccuauggauuuccuuugccauaucauguuuuuugcuuuguauuguuuuacugggguucaucaugugggccugccaaaaaggcaacauuaggugcaacauuugcauuuga

SEQ ID NO: 33751 - RNA, 1701 nt, Artificial Sequence
  derived and/or modified CDS sequence (wt) from hemagglutinin__InfluenzaA__ABU92575
augaagacuaucauugcuuugagcuacauuuuaugucugguuuucgcucaaaaacuucccggaaaugacaacagcacggcaacgcugugccuggggcaccaugcagugccaaacggaacgcuagugaaaacaaucacgaaugaccaaauugaagugacuaaugcuacugagcugguucagaguuccucaacagguagaauaugcgacaguccucaccaaauccuugauggagaaaacugcacacuaauagaugcucuauugggagacccucauugugauggcuuccaaaauaaggaaugggaccuuuuuguugaacgcagcaaagccuacagcaacuguuacccuuaugaugugccggauuaugucucccuuaggucacuaguugccucaucaggcacgcuggaguuuaacaaugaaagcuucaauuggacuggagucgcucagaauggaacaagcucugcuugcaaaaggagaucugauaaaaguuucuuuaguagauugaauugguugcaccaauuaaaauacaaauauccagcacugaacgugacuaugccaaacaaugaaaaauuugacaaauuguacauuugggggguucaccacccggguacagacagugaccaaaucagccuauaugcucaagcaucagggagagucacagucucuaccaaaagaagccaacaaacuguaaucccgaauaucggaucuaaacccuggguaaggggugucuccagcagaauaagcaucuauuggacaauaguaaaaccgggagacauacuuuugauuaacagcacagggaaucuaauugcuccucgggguuacuucaaaauacgaagugggaaaagcucaauaaugaggucagaugcacccauuggcaaaugcaauucugaaugcaucacuccaaauggaagcauucccaaugacaaaccauuucaaaauguaaacaggaucacauaugggcccugucccagauauguuaagcaaaacacucugaaauuggcaacagggaugcggaaugugccagagaaacaaacuagaggcauauucggugcaaucgcgggcuucauagaaaaugguugggagggaaugauggacgguugguacgguuucaggcaucaaaauucugagggcacagggcaagcagcagaucuuaaaagcacucaagcagcaaucaaccaaaucaacgggaaacugaauagguuaaucgagaaaacgaacgagaaauuccaucaaauugaaaaagaauucucagaaguagaagggagaauucaggaccucgagaaauauguugaggacacuaaaauagaucucuggucguacaaugcggagcuucuuguugcccuggagaaccaacauacaauugaucuaacugacucagaaaugaacaaacuguuugaaagaacaaagaagcaacugagggaaaaugcugaggauaugggcaaugguuguuucaaaauauaccacaaaugugacaaugccugcauagggucaaucagaaauggaacuuaugaccaugauguauacagagacgaagcauugaacaaccgguuccagaucaaagguguugagcugaagucaggauacaaagauuggauccuauggauuuccuuugccauaucauguuuuuugcuuuguauuguuuugcugggguucaucaugugggccugccaaaaaggcaacauuaggugcaacauuugcauuuga

SEQ ID NO: 33752 - RNA, 1701 nt, Artificial Sequence
  derived and/or modified CDS sequence (wt) from hemagglutinin__InfluenzaA__ABU92576
augaagacuaucauugcuuugagcuacauuuuaugucugguuuucgcucaaaaacuucccggaaaugacaacagcacggcaacgcugugccuggggcaccaugcagugccaaacggaacgcuagugaaaacaaucacgaaugaccaaauugaagugacuaaugcuacugagcugguucagaguuccucaacagguagaauaugcgacaguccucaccaaauccuugauggagaaaacugcacacuaauagaugcucuauugggagacccucauugugauggcuuccaaaauaaggaaugggaccuuuuuguugaacgcagcaaagccuacagcaacuguuacccuuaugaugugccggauuaugucucccuuaggucacuaguugccucaucaggcacgcuggaguuuaacaaugaaagcuucaauuggacuggagucgcucagaauggaacaagcucugcuugcaaaaggagaucugauaaaaguuucuuuaguagguugaauugguugcaccaauuaaaauacaaauauccagcacugaacgugacuaugccgaacaaugaaaaauuugacaaauuguacauuugggggguucaccacccggguacagacagugaccaaaucagccuauaugcucaagcaucagggagagucacagucucuaccaaaagaagccaacaaacuguaaucccgaauaucggaucuagacccuggguaaggggugucuccagcagaauaagcaucuauuggacaauaguaaaaccgggagacauacuuuugauuaacagcacagggaaucuaauugcuccucgggguuacuucaaaauacgaagugggaaaagcucaauaaugaggucagaugcacccauuggcaaaugcaauucugaaugcaucacuccaaauggaagcauucccaaugacaaaccauuucaaaauguaaacaggaucacauaugggcccuguccuagauauguuaagcaaaacacucugaaauuggcaacagggaugcggaaugugccagagaaacaaacuagaggcauauucggugcaaucgcgggcuucauagaaaaugguugggagggaaugauggacgguugguacgguuucaggcaucaaaauucugagggcacagggcaagcagcagaucuuaaaagcacucaagcagcaaucaaccaaaucaacgggaaacugaauagguuaaucgagaaaacgaacgagaaauuccaucaaauugaaaaagaauucucagaaguagaagggagaauucaggaccucgagaaauauguugaggacacuaaaauagaucucuggucguacaaugcggagcuucuuguugcccuggagaaccaacauacaauugaucuaacugacucagaaaugaacaaacuguuugaaagaacaaagaagcaacugagggaaaaugcugaggauaugggcaaugguuguuucaaaauauaccacaaaugugacaaugccugcauagggucaaucagaaauggaacuuaugaccaugauguauacagagacgaagcauugaacaaccgguuccagaucaaagguguugagcugaagucaggauacaaagauuggauccuauggauuuccuuugccauaucauguuuuuugcuuuguauuguuuugcugggguucaucaugugggccugccaaaaaggcaacauuaggugcaacauuugcauuuga

SEQ ID NO: 33753 - RNA, 1701 nt, Artificial Sequence
  derived and/or modified CDS sequence (wt) from hemagglutinin__InfluenzaA__ABU92577
augaagacuaucauugcuuugagcuacauuuuaugucugguuuucgcucaaaaacuucccggaaaugacaacagcacggcaacgcugugccuggggcaccaugcagugccaaacggaacgcuagugaaaacaaucacgaaugaccaaauugaagugacuaaugcuacugagcugguucagaguuccucaacagguagaauaugcgacaguccucaccaaauccuugauggagaaaacugcacacuaauagaugcucuauugggagacccucauugugauggcuuccaaaauaaggaaugggaccuuuuuguugaacgcagcaaagccuacagcaacuguuacccuuaugaugugccggauuaugucucccuuaggucacuaguugccucaucaggcacgcuggaguuuaacaaugaaagcuucaauuggacuggagucgcucagaauggaacaagcucugcuugcaaaaggagaucugauaaaaguuucuuuaguagauugaauugguugcaccaauuaaaauacaaauauccagcacugaacgugacuaugccaaacaaugaaaaauuugacaaauuguacauuugggggguucaccacccggguacagacagugaccaaaucagccuauaugcucaagcaucagggagagucacagucucuaccaaaagaagccaacaaacuguaaucccgaauaucggaucuagacccuggguaaggggugucuccagcagaauaagcaucuauuggacaauaguaaaaccgggagacauacuuuugauuaacagcacagggaaucuaauugcuccucgggguuacuucaaaauacgaagugggaaaagcucaauaaugaggucagaugcacccauuggcaaaugcaauucugaaugcaucacuccaaauggaagcauucccaaugacaaaccauuucaaaauguaaacaggaucacauaugggcccugucccagauauguuaagcaaaacacucugaaauuggcaacagggaugcggaaugugccagagaaacaaacuagaggcauauucggugcaaucgcgggcuucauagaaaaugguugggagggaaugauggacgguugguacgguuucaggcaucaaaauucugagggcacagggcaagcagcagaucuuaaaagcacucaagcagcaaucaaccaaaucaacgggaaacugaauagguuaaucgagaaaacgaacgagaaauuccaucaaauugaaaaagaauucucagaaguagaagggagaauucaggaccucgagaaauauguugaggauacuaaaauagaucucuggucguacaaugcggagcuucuuguugcccuggagaaccaacauacaauugaucuaacugacucagaaaugaacaaacuguuugaaagaacaaagaagcaacugagggaaaaugcugaggauaugggcaaugguuguuucaaaauauaccacaaaugugacaaugccugcauagggucaaucagaaauggaacuuaugaccaugauguauacagagacgaagcauugaacaaccgguuccagaucaaagguguugagcugaagucaggauacaaagauuggauccuauggauuuccuuugccauaucauguuuuuugcuuuguauuguuuugcugggguucaucaugugggccugccaaaaaggcaacauuaggugcaacauuugcauuuga

SEQ ID NO: 33754 - RNA, 1701 nt, Artificial Sequence; identical to SEQ ID NO: 32084
  derived and/or modified CDS sequence (wt) from hemagglutinin__InfluenzaA__ABU92578

SEQ ID NO: 33755 - RNA, 1701 nt, Artificial Sequence
  derived and/or modified CDS sequence (wt) from hemagglutinin__InfluenzaA__ABU92579
augaagacuaucauugcuuugagcuacauuuuaugucugguuuucgcucaaaaacuucccguaaaugacaacagcacggcaacgcugugccugggacaccaugcagugccaaacggaacgcuagugaaaacaaucacgaaugaccacauugaagugacuaaugcuacugagcugguucagaguuccucaacagguagaauaugcgacaguccucaccaaauccuugauggagaaaacugcacacuaauagaugcucuauugggagacccucauugugauggcuuccaaaauaaggaaugggaccuuuuuguugaacgcagcacagccuacagcaacuguuacccuuaugaugugccggauuaugccucccuuaggucacuaguugccucauccggcacacuggaguuuaacaaugaaagcuucaauuggacuggagucgcucagaauggaacaagcucugcuugcaaaaggagaucuauuaaaaguuucuuuaguagauugaauugguugcaccaauuaaaauacaaauauccagcacugaacgugacuaugccaaacaaugaaaaauuugacaaauuguacauuugggggguucaccacccgaguacggacagugaccaaaucagccuauaugcucaagcaucagggagagucacagucucuaccaaaagaagccaacaaacuguaaucccgaauaucggaucuagacccuggguaaggggugucuccagcagaauaagcaucuauuggacaauaguaaaaccgggagacauacuuuugauuaacagcacagggaaucuaauugcuccucgggguuacuucaaaauacgaagugggaaaagcucaauaaugaggucaaaugcacccauuggcaaaugcaauucugaaugcaucacuccaaauggaagcauucccaaugacaaaccauuucaaaauguaaacaggaucacauauggggccugucccagauauguuaagcaaaacacucugaaauuggcaacagggaugcggaauguaccagagaaacaaacuagaggcauauucggcgcaaucgcggguuucauagaaaaugguugggaaggaaugguggacgguugguacgguuucaggcaucaaaauucugagggcacaggacaagcagcagaucuuaaaagcacucaagcagcaaucaaccaaaucaacgggaaacugaauagguuaaucgagaaaacaaacgagaaauuccaucaaauugaaaaagaauucucagaaguagaagggagaauucaggaccucgagaaauauguugaggacacuaaaauagaucucuggucguacaacgcggagcuucuuguugcccuggagaaccaacauacaauugaucuaacugacucagaaaugaacaaacuguuugaaagaacaaggaagcaacugagggaaaaugcugaggauaugggcaaugguuguuucaaaauauaccacaaaugugacaaugccugcauagggucaaucagaaauggaacuuaugaccaugauguauacagagacgaagcauuaaacaaccgguuucagaucaaagguguugagcugaagucaggauacaaagauuggauccuguggauuuccuuugccauaucauguuuuuugcuuuguguuguuuugcugggguucaucaugugggccugccagaaaggcaacauuaggugcaacauuugcauuuga

SEQ ID NO: 33756 - RNA, 1701 nt, Artificial Sequence; identical to SEQ ID NO: 32084
  derived and/or modified CDS sequence (wt) from hemagglutinin__InfluenzaA__ABU92580

SEQ ID NO: 33757 - RNA, 1701 nt, Artificial Sequence; identical to SEQ ID NO: 33749
  derived and/or modified CDS sequence (wt) from hemagglutinin__InfluenzaA__ABU92581

SEQ ID NO: 33758 - RNA, 1701 nt, Artificial Sequence
  derived and/or modified CDS sequence (wt) from hemagglutinin__InfluenzaA__ABU92582
augaagacuaucauugcuuugagcuacauuuuaugccugguuuucgcucaaaaacuucccggaaaugacaacagcacggcaacgcugugccuggggcaucaugcagugccaaacggaacgcuagugaaaacaaucacgaaugaccaaauugaaguaacuaaugcuacugagcugguucagaguuccucaacagguagaauaugcgacaguccucaccaaauccuugauggagaaaacugcacacuaauagaugcucuauugggagacccucauugugauggcuuccaaaauaaggaaugggaccuuuuuguugaacgcagcaaagccuacagcaacuguuacccuuaugaugugccggauuaugucucccuuaggucacuaguugccucaucaggcacgcuggaguuuaacaaugaaagcuucaauuggacuggagucgcucagaauggaacaagcucugcuugcaaaaggagaucugauaaaaguuucuuuaguagauugaauugguugcaccaauuaaaauacaaauauccagcacagaacgugacuaugccaaacaaugaaaaauuugacaaauuguacauuugggggguucaccacccggguacagacagugaccaaaucagccuauaugcucaagcaucagggagagucacagucucuaccaaaagaagccaacaaacuguaaucccgaauaucggaucuagacccuggguaaggggugucuccagcagaauaagcaucuauuggacaauaguaaaaccgggagacauacuuuugauuaacagcacagggaaucuaauugcuccucgggguuacuucaaaauacgaagugggaaaagcucaauaaugaggucagaugcacccauuggcaaaugcaauucugaaugcaucacuccaaauggaagcauucccaaugacaaaccauuucaaaauguaaacaggaucacauauggggccugucccagauauguuaagcaaaacacucugaaauuggcaacagggaugcggaaugugccagagaaacaaacuagaggcauauucggugcaaucgcaggcuucauagaaaaugguugggagggaaugauggacgguugguacgguuucaggcaucaaaauucugagggcacagggcaagcagcagaucuuaaaagcacucaagcagcaaucaaccaaaucaacgggaaacugaauagguuaaucgagaaaacgaacgagaaauuccaucaaauugaaaaagaauucucagaaguagaagggagaauucaggaccucgagaaauauguugaggacacuaaaauagaucucuggucguacaaugcggagcuucuuguugcccuggagaaccaacauacaauugaucuaacugacucagaaaugaacaaacuguuugaaagaacaaagaagcaacugagggaaaaugcugaggauaugggcaaugguuguuucaaaauauaccacaaaugugacaaugccugcauagggucaaucagaaauggaacuuaugaccaugauguauacagagacgaagcauugaacaaccgguuccagaucaaagguguugagcugaagucaggauauaaagauuggauccuauggauuuccuuugccauaucauguuuuuugcuuuguauuguuuugcugggguucaucaugugggccugccaaaaaggcaacauuaggugcaacauuugcauuuga

SEQ ID NO: 33759 - RNA, 1701 nt, Artificial Sequence; identical to SEQ ID NO: 33758
  derived and/or modified CDS sequence (wt) from hemagglutinin__InfluenzaA__ABU92583

SEQ ID NO: 33760 - RNA, 1701 nt, Artificial Sequence
  derived and/or modified CDS sequence (wt) from hemagglutinin__InfluenzaA__ABU92584
augaagacuaucauugcuuugagcuacauuuuaugccugguuuucgcucaaaaacuucccggaaaugacaacagcacggcaacgcugugccuggggcaccaugcagugccaaacggaacgcuagugaaaacaaucacgaaugaccaaauugaaguaacuaaugcuacugagcugguucagaguuccucaacagguagaauaugcgacaguccucaccaaauccuugauggagaaaacugcacacuaauagaugcucuauugggagacccucauugugauggcuuccaaaauaaggaaugggaccuuuuuguugaacgcagcaaagccuacagcaacuguuacccuuaugaugugccggauuaugucucccuuaggucacuaguugccucaucaggcacgcuggaguuuaacaaugaaagcuucaauuggacuggagucgcucagaauggaacaagcucugcuugcaaaaggagaucugauaaaaguuucuuuaguagauugaauugguugcaccaauuaagauacaaauauccagcacugaacgugacuaugccaaacaaugaaaaauuugacaaauuguacauuugggggguccaccacccggguacagacagugaccaaaucagccuauaugcucaagcaucagggagagucacagucucuaccaaaagaagccaacaaacuguaaucccgaauaucggaucuagacccuggguaaggggugucuccagcagaauaagcaucuauuggacaauaguaaaaccgggagacauacuuuugauuaacagcacagggaaucuaauugcuccucgggguuacuucaaaauacgaagugggaaaagcucaauaaugaggucagaugcacccauuggcaaaugcaauucugaaugcaucacuccaaauggaagcauucccaaugacaaaccauuucaaaauguaaacaggaucacauauggggccugucccagauauguuaagcaaaaaacucugaaauuggcaacagggaugcggaaugugccagagaaacaaacuagaggcauauucggugcaaucgcgggcuucauagaaaaugguugggagggaaugauggacgguugguacgguuucaggcaucaaaauucugagggcacagggcaagcagcagaucuuaaaagcacucaagcagcaaucaaccaaaucaacgggaaacugaauagguugauugagaaaacgaacgagaaauuccaucaaauugaaaaagaauucucagaaguagaagggagaauucaggaccucgagaaauaugucgaggacacuaaaauagaucucuggucguacaaugcggagcuucuuguugcccuggagaaccaacauacaauugaucuaacugacucagaaaugaacaaacuguuugaaagaacaaagaagcaacugagggaaaaugcugaggauaugggcaaugguuguuucaaaauauaccacaaaugugacaaugccugcauagggucaaucagaaauggaacuuaugaccaugauguauacagagacgaggcauugaacaaccgguuccagaucaaagguguugagcugaagucaggauacaaagauuggauccuauggauuuccuuugccauaucauguuuuuugcuuuguauuguuuuacugggguucaucaugugggccugccaaaaaggcaacauuaggugcaacauuugcauuuga

SEQ ID NO: 33761 - RNA, 1701 nt, Artificial Sequence
  derived and/or modified CDS sequence (wt) from hemagglutinin__InfluenzaA__ABU92586
augaagacuaucauugcuuugagcuacauucuaugucugguuuucgcucaaaaacuucccggaaaugacaacagcacggcaacgcugugccuugggcaccaugcaguaccaaacggaacgauagugaaaacaaucacaaaugaccaaauugaaguuacuaaugcuacugagcugguucagaguuccucaacagguggaauaugcgacaguccucaucaaauccuugauggagaaaacugcacacuaauagaugcucuauugggagacccucagugugauggcuuccaaaauaagaaaugggaccuuuuuguugaacgcagcaaagccuacagcaacuguuacccuuaugaugugccggauuaugccucccuuaggucacuaauugccucauccggcacacuggaguuuaacaaugaaagcuucaauuggacuggagucacucaaaauggaacaagcucugcuugcaaaaggagaucuaauagcaguuucuuuaguagauugaauugguugacccacuuaaaauucaaauacccagcauugaacgugacuaugccaaacaaugaagaauuugacaaauuguacauuugggggguucaccacccggguacagacaaugaccaaaucagccuauaugcucaagcaucaggaagaaucacagucucuaccaaaagaagccaacaaacuguaaucccgaauaucggaucuagacccaggguaagggauauccccagcagaauaagcaucuauuggacaauaguaaaaccgggagacauacuuuugauuaacagcacagggaaucuaauugcuccucgggguuacuucaaaauacgaagugggaaaagcucaauaaugagaucagaugcacccauuggcaaaugcaauucugaaugcaucacuccaaauggaagcauucccaaugacaaaccauuucaaaauguaaacaggaucacauauggggccugucccagauauguuaagcaaaacacucugaaauuggcaacagggaugcgaaauguaccagagaaacaaacuagaggcauauuuggcgcaaucgcggguuucauagaaaaugguugggagggaaugguggaugguugguacgguuucaggcaucaaaauucugagggaauaggacaagcagcagaucucaaaagcacucaagcagcaaucgaccaaaucaaugggaagcugaauagguugaucgggaaaaccaacgagaaauuccaucagauugaaaaagaauucucagaaguagaagggagaauucaggaccucgagaaauauguugaggacacuaaaauagaucucuggucauacaacgcggagcuucuuguugccuuggagaaccaacauacaauugaucuaacugacucagaaaugaacaaacuguuugaaagaacaaagaagcaacugagggaaaaugcugaggauaugggcaaugguuguuucaaaauauaccacaaaugugacaaugccugcauagggucaaucagaaauggaacuuaugaccaugauguauacagagaugaagcauuaaacaaccgguuccagaucaaagguguugagcugaagucaggauacaagaauuggauccuauggauuuccuuugccauaucauguuuuuugcuuuguguugcuuuguugggguucaucaugugggccugccaaaaaggcaacauuaggugcaacauuugcauuuga

SEQ ID NO: 33762 - RNA, 1701 nt, Artificial Sequence
  derived and/or modified CDS sequence (wt) from hemagglutinin__InfluenzaA__ABU92587
augaagacuaucauugcuuugagcuacauucuaugucugguuuucgcucaaaaacuucccggaaaugacaacagcacggcaacgcugugccuugggcaccaugcaguaccaaacggaacgauagugaaaacaaucacgaaugaccaaauugaaguuacuaaugcuacugagcugguucagaguuccucaacagguggaauaugcgacaguccucaucagauccuugauggagaaaacugcacacuaauagaugcucuauugggagacccucagugugauggcuuccaaaauaagaaaugggaccuuuuuguugaacgcagcaaagccuacagcaacuguuacccuuaugaugugccggauuaugccucccuuaggucacuaauugccucauccggcacacuggaguuuaacaaugaaagcuucaauuggacuggagucacucaaaauggaacaagcucugcuugcaaaaggagaucuaauagcaguuucuuuaguagauugaauugguugacccacuuaaaauucaaauacccagcauugaacgugacuaugccaaacaaugaagaauuugacaaauuguacauuugggggguucaccacccggguacauacaaugaccaaaucagccuauaugcucaagcaucaggaagaaucacagucucuaccaaaagaagccaacaaacugcaaucccgaauaucggguccagacccaggguaagggauauccccagcagaauaagcaucuauuggacaauaguaaaaccgggagacauacuuuugauuaacagcacagggaaucuaauugcuccucgggguuacuucaaaauacgaagugggaaaagcucaauaaugagaucagaugcacccauuggcaaaugcaauucugaaugcaucacuccaaauggaagcauucccaaugacaaaccauuucaaaauguaaacaggaucacauauggggccugucccagauauguuaagcaaaacacucugaaauuggcaacagggaugcgaaauguaccagagaaacaaacuagaggcauauuuggcgcaaucgcggguuucauagaaaaugguugggagggaaugguggaugguugguacgguuucaggcaucaaaauucugagggaauaggacaagcagcagaucucaaaagcacucaagcagcaaucgaccaaaucaaugggaagcugaauagguugaucgggaaaaccaacgagaaauuccaucagauugaaaaagaauucucagaaguagaagggagaauucaggaccucgagaaauauguugaggacacuaaaauagaucucuggucauacaacgcggagcuucuuguugcccuggagaaccaacauacaauugaucuaacugacucagaaaugaacaaacuguuugaaagaacaaagaagcaacugagggaaaaugcugaggauaugggcaaugguuguuucaaaauauaccacaaaugugacaaugccugcauagggucaaucagaaauggaacuuaugaccaugauguauacagagaugaagcauuaaacaaccgguuccagaucaaagguguugagcugaagucaggauacaaagauuggauccuauggauuuccuuugccauaucauguuuuuugcuuuguguugcuuuguugggguucaucaugugggccugccaaaaaggcaacauuaggugcaacauuugcauuuga

SEQ ID NO: 33763 - RNA, 1701 nt, Artificial Sequence
  derived and/or modified CDS sequence (wt) from hemagglutinin__InfluenzaA__ABU92588
augaagacuaucauugcuuugagcuacauucuaugucugguuuucgcucaaaaacuucccggaaaugacaacagcacggcaacgcugugccuugggcaccaugcaguaccaaacggaacgauagugaaaacaaucacgaaugaccaaauugaaguuacuaaugcuacugagcugguucagaguuccucaacagguggaauaugcgacaguccucaucagauccuugauggagaaaacugcacacuaauagaugcucuauugggagacccucagugugauggcuuccaaaauaagaaaugggaccuuuuuguugaacgcagcaaagccuacagcaacuguuacccuuaugaugugccggauuaugccucccuuaggucacuaguugccucauccggcacacuggaguuuaacaaugaaagcuucaauuggacuggagucacucaaaauggaacaagcucugcuugcaaaaggaaaucuaauaacaguuucuuuaguagauugaauugguugacccacuuaaaauucaaauacccagcauugaaugugaccaugccaaacaaugaaaaauuugacaaauuguacauuugggggguucaccacccggguacggacaaugaccaaaucagccuauaugcucaagcuucaggaagaaucacagucucuaccaaaagaagccaacaaacuguaauuccgaauaucggaucuagacccaggguaagggauauccccagcagaauaagcaucuauuggacaauaguaaaaccgggagacauacuuuugauuaacagcacagggaaucuaauugcuccucgggguuacuucaaaauacgaagugggaaaagcucaauaaugagaucagaugcacccauuggcaaaugcaauucugaaugcaucacuccaaauggaagcauucccaaugacaaaccauuucaaaauguaaacaggaucacauauggggccugucccagauauguuaagcaaaacacucugaaauuggcaacagggaugcgaaauguaccagagaaacaaacuagaggcauauuuggcgcaaucgcggguuucauagaaaaugguugggagggaaugguggaugguugguacgguuucaggcaucaaaauucugagggaauaggacaagcagcagaucucaaaagcacucaagcagcaaucaaccaaaucaaugggaagcugaauagguugaucgggaaaaccaacgagaaauuccaucagauugaaaaagaauucucagaaguagaagggagaauucaggaccucgagaaauauguugaggacacuaaaauagaucucuggucauacaacgcggaguuucuuguugcccuggagaaccaacauacaauugaucuaaccgacucagaaaugaacaaacuguuugaaagaacaaagaagcaacugagggaaaaugcugaggauaugggcaaugguuguuucaaaauauaccacaaaugugacaaugccugcauagggucaaucagaaauggaacuuaugaccaugauguauacagagaugaagcauuaaacaaccgguuccagaucaaagguguugagcugaagucaggauacaaagauuggauccuauggauuuccuuugccauaucauguuuuuugcuuuguguugcuuuguugggguucaucaugugggccugccaaaaaggcaacauuaggugcaacauuugcauuuga

SEQ ID NO: 33764 - RNA, 1701 nt, Artificial Sequence
  derived and/or modified CDS sequence (wt) from hemagglutinin__InfluenzaA__ABU92590
augaagacuaucauugcuuugagcuacauucuaugucugguuuucgcucaaaaacuucccggaaaugacaacagcacggcaacgcugugccuugggcaccaugcaguaccaaacggaacgauagugaaaacaaucacgaaugaccaaauugaaguuacuaaugcuacugagcugguucagaguuccucaacagguggaauaugcgacaguccucaucagauccuugauggagaaaacugcacacuaauagaugcucuauugggagacccucagugugauggcuuccaaaauaagaaaugggaccuuuuuguugaacgcagcaaagccuacagcaacuguuacccuuaugaugugccggauuaugccucccuuaggucacuaauugccucauccggcacacuggaguuuaacaaugaaagcuucaauuggacuggagucacucaaaauggaacaagcucugcuugcaaaaggagaucuaauagcaguuucuuuaguagauugaauugguugacccacuuaaaauucaaauacccagcauugaacgugacuaugccaaacaaugaagaauuugacaaauuguacauuugggggguucaccacccggguacauacaaugaccaaaucagccuauaugcucaagcaucaggaagaaucacagucucuaccaaaagaagccaacaaacuguaaucccgaauaucgggucuagacccaggguaagggauauccccagcagaauaagcaucuauuggacaauaguaaaaccgggagacauacuuuugauuaacagcacagggaaucuaauugcuccucgggguuacuucaaaauacgaagugggaaaagcucaauaaugagaucagaugcacccauuggcaaaugcaauucugaaugcaucacuccaaauggaagcauucccaaugacaaaccauuucaaaauguaaacaggaucacauauggggccugucccagauauguuaagcaaaacacucugaaauuggcaacagggaugcgaaauguaccagagaaacaaacuagaggcauauuuggcgcaaucgcggguuucauagaaaaugguugggagggaaugguggaugguugguacgguuucaggcaucaaaauucugagggaauaggacaagcagcagaucucaaaagcacucaagcagcaaucgaccaaaucaaugggaagcugaauagguugaucgggaaaaccaacgagaaauuccaucagauugaaaaagaauucucagaaguagaagggagaauucaggaccucgagaaauauguugaggacacuaaaauagaucucuggucauacaacgcggagcuucuuguugcccuggagaaccaacauacaauugaucuaacugacucagaaaugaacaaacuguuugaaagaacaaagaagcaacugagggaaaaugcugaggauaugggcaaugguuguuucaagauauaccacaaaugugacaaugccugcauagggucaaucagaaauggaacuuaugaccaugauguauacagagaugaagcacuaaacaaccgguuccagaucaaagguguugagcugaagucaggauacaaagauuggauccuauggauuuccuuugccauaucauguuuuuugcuuuguguugcuuuguugggguucaucaugugggccugccaaaaaggcaacauuaggugcaacauuugcauuuga

SEQ ID NO: 33765 - RNA, 1701 nt, Artificial Sequence
  derived and/or modified CDS sequence (wt) from hemagglutinin__InfluenzaA__ABU92591
augaagacuaucauugcuuugagcuacauucuaugucugguuuucgcucaaaaacuucccggaaaugacaacagcacggcaacgcugugccuugggcaccaugcaguaccaaacggaacgauagugaaaacaaucacgaaugaccaaauugaaguuacuaaugcuacugagcugguucagaguuccucaacagguggaauaugcgacaguccucaucagauccuugauggagaaaacugcacacuaauagaugcucuauugggagacccucagugugauggcuuccaaaauaagaaaugggaccuuuuuguugaacgcagcaaagccuacagcaacuguuacccuuaugaugugccggauuaugccucccuuaggucacuaauugccucauccggcacacuggaguuuaacaaugaaagcuucaauuggacuggagucacucaaaauggaacaagcucugcuugcaaaaggagaucuaauagcaguuucuuuaguagauugaauugguugacccacuuaaaauucaaauacccagcauugaacgugacuaugccaaacaaugaagaauuugacaaauuguacauuugggggguucaccacccggguacagacaaugaccaaaucagccuauaugcucaagcaucaggaagaaucacagucucuaccaaaagaagccaacaaacuguaaucccgaauaucggaucuagacccaggguaagggauauccccagcagaauaagcaucuauuggacaauaguaaaaccgggagacauacuuuugauuaacagcacagggaaucuaauugcuccucgggguuacuucaaaauacgaagugggaaaagcucaauaaugagaucagaugcacccauuggcaaaugcaauucugaaugcaucacuccaaauggaagcauucccaaugacaaaccauuucaaaauguaaacaggaucacauauggggccugucccagauauguuaagcaaaacacucugaaauuggcaacagggaugcgaaauguaccagagaaacaaacuagaggcauauuuggcgcaaucgcggguuucauagaaaaugguugggagggaaugguggaugguugguacgguuucaggcaucaaaauucugagggaauaggacaagcagcagaucucaaaagcacucaagcagcaaucgaccaaaucaaugggaagcugaauagguugaucgggaaaaccaacgagaaauuccaucagauugaaaaagaauucucagaaguggaagggagaauucaggaccucgagaaauauguugaggacacuaaaauagaucucuggucauacaacgcggagcuucuuguugcccuggagaaccaacauacaauugaucuaacugacucagaaaugaacaaacuguuugaaagaacaaagaagcaacugagggaaaaugcugaggauaugggcaaugguuguuucaaaauauaccacaaaugugacaaugccugcauagggucaaucagaaauggaacuuaugaccaugauguauacagagaugaagcauuaaacaaccgguuccagaucaaagguguugagcugaagucaggauacaaagauuggauccuauggauuuccuuugccauaucauguuuuuugcuuuguguugcuuuguugggguucaucaugugggccugccaaaaaggcaacauuaggugcaacauuugcauuuga

SEQ ID NO: 33766 - RNA, 1701 nt, Artificial Sequence
  derived and/or modified CDS sequence (wt) from hemagglutinin__InfluenzaA__ABU92592
augaagacuaucauugcuuugagcuacauucuaugucugguuuucgcucaaaaacuucccggaaaugacaacagcacggcaacgcugugccuugggcaccaugcaguaccaaacggaacgauagugaaaacaaucacgaaugaccaaauugaaguuacuaaugcuacugagcugguucagaguuccucaacagguggaauaugcgacaguccucaucagauccuugauggagaaaacugcacacuaauagaugcucuauugggagacccucagugugauggcuuccaaaauaagaaaugggaccuuuuuguugaacgcagcaaagccuacagcaacuguuacccuuaugaugugccggauuaugccucccuuaggucacuaauugccucauccggcacacuggaguuuaacaaugaaagcuucaauuggacuggagucacucaaaauggaacaagcucugcuugcaaaaggagaucuaauagcaguuucuuuaguagauugaauugguugacccacuuaaaauucaaauacccagcauugaacgugacuaugccaaacaaugaagaauuugacaaauuguacauuugggggguucaccacccggguacagacaaugaccaaaucagccuauaugcucaagcaucaggaagaaucacagucucuaccaaaagaagccaacaaacuguaaucccgaauaucggaucuagacccaggguaagggauauccccagcagaauaagcaucuauuggacaauaguaaaaccgggagacauacuuuugauuaacagcacagggaaucuaauugcuccucgggguuacuucaaaauacgaagugggaaaagcucaauaaugagaucagaugcacccauuggcaaaugcaauucugaaugcaucacuccaaauggaagcauucccaaugacaaaccauuucaaaauguaaacaggaucacauauggggccugucccagauauguuaagcaaaacacucugaaauuggcaacagggaugcgaaauguaccagagaaacaaacuagaggcauauuuggcgcaaucgcggguuucauagaaaaugguugggagggaaugguggaugguugguacgguuucaggcaucaaaauucugagggaauaggacaagcagcagaucucaaaagcacucaagcagcaaucgaccaaaucaaugggaagcugaauagguugaucgggaaaaccaacgagaaauuccaucagauugaaaaagaauucucagaaguagaagggagaauucaggaccucgagaaauauguugaggacacuaaaauagaucucuggucauacaacgcggagcuucuuguugcccuggagaaccaacauacaauugaucuaacugacucagaaaugaacaaacuguuugaaagaacaaagaagcaacugagggaaaaugcugaggauaugggcaaugguuguuucaaaauauaccacaaaugugacaaugccugcauagggucaaucagaaauggaacuuaugaccaugauguauacagagaugaagcauuaaacaaccgguuccagaucaaagguguugagcugaagucaggauacaaagauuggauccuauggauuuccuuugccauaucauguuuuuugcuuuguguugcuuuguugggguucaucaugugggccugccaaaaaggcaacauuaggugcaacauuugcauuuga

SEQ ID NO: 33767 - RNA, 1701 nt, Artificial Sequence
  derived and/or modified CDS sequence (wt) from hemagglutinin__InfluenzaA__ABU92593
augaagacuaucauugcuuugagcuacauucuaugucugguuuucgcucaaaaacuucccggaaaugacaacagcacggcaacgcugugccuugggcaccaugcaguaccaaacggaacgauagugaaaacaaucacgaaugaccaaauugaaguuacuaaugcuacugagcugguucagaguuccucaacagguggaauaugcgacaguccucaucagauccuugauggagaaaacugcacacuaauagaugcucuauugggagacccucagugugauggcuuccaaaauaagaaaugggaccuuuuuguugaacgcagcaaagccuacagcaacuguuacccuuaugaugugccggauuaugccucccuuaggucacuaguugccucauccggcacacuggaguuuaacaaugaaagcuucaauuggacuggagucacucaaaauggaacaagcucugcuugcaaaaggagaucuaauaacaguuucuuuaguagauugaauugguugacccacuuaaaauucaaauacccagcauugaacgugacuaugccaaacaaugaaaaauuugacaaauuguacauuugggggguucaccacccggguacggacaaugaccaaaucuuccuguaugcucaagcaucaggaagaaucacagucucuaccaaaagaagccaacaaacuguaaucccgaauaucggaucuagacccagaguaaggaauauccccagcagaauaagcaucuauuggacaauaguaaaaccgggagacauacuuuugauuaacagcacagggaaucuaauugcuccuagggguuacuucaaaauacgaagugggaaaagcucaauaaugagaucagaugcacccauuggcaaaugcaauucugaaugcaucacuccaaauggaagcauucccaaugacaaaccauuucaaaauguaaacaggaucacauacggggccugucccagauauguuaagcaaaacacucugaaauuggcaacagggaugcgaaauguaccagagaaacaaacuagaggcauauuuggcgcaaucgcggguuucauagaaaaugguugggagggaaugguggaugguugguacgguuucaggcaucaaaauucugagggaauaggacaagcagcagaucucaaaagcacucaagcagcaaucgaucaaaucaaugggaagcugaauagguugaucgggaaaaccaacgagaaauuccaucagauugaaaaagaauucucagaaguagaagggagaauucaggaccucgagaaauauguugaggacacuaaaauagaucucuggucauacaacgcggagcuucuuguugcccuggagaaccaacauacaauugaucuaacugacucagaaaugaacaaacuguuugaaaaaacaaagaagcaacugagggaaaaugcugaggauaugggcaaugguuguuucaaaauauaccacaaaugugacaaugccugcauaggaucaaucagaaauggaacuuaugaccaugauguauacagagaugaagcauuaaacaaccgguuccagaucaagggcguugagcugaagucaggauacaaagauuggauccuauggauuuccuuugccauaucauguuuuuugcuuuguguugcuuuguugggguucaucaugugggccggccaaaaaggcaacaaaaggugcaacauuugcauuuga

SEQ ID NO: 33768 - RNA, 1701 nt, Artificial Sequence
  derived and/or modified CDS sequence (wt) from hemagglutinin__InfluenzaA__ABU92594
augaagacuaucauugcuuugagcuacauucuaugucugguuuucgcucaaaaacuucccggaaaugacaacagcacggcaacgcugugccuugggcaccaugcaguaccaaacggaacaauagugaaaacaaucacgaaugaccaaauugaaguuacuaaugcuacugagcugguucagaguuccucaacaggugaaauaugcaacaguccucaucagauccuugauggagaaagcugcacacuaauagaugcucuauugggagacccucagugugauggcuuccaaaauaagaaaugggaccuuuuuguugaacgcagcaaagccuacagcaacuguuacccuuaugaugugccggauuaugccucccuuaggucacuaguugccucauccggcacacuggaguuuaacaaugaaagcuucaauuggacuggagucacucaaaauggaacaagcucugcuugcaaaaggagaucuaauaacaguuucuuuaguagauugaauugguugacccacuuaaaauucaaauacccagcauugaacgugacuaugccaaacaaugaaaaauuugacaaauuguacauuugggggguucaccacccggguacggacaaugaccaaaucuuccuguaugcucaagcaucaggaagaaucacagucucuaccaaaagaagccaacaaacuguaaucccgaauaucggaucuagacccagaguaaggaauauccccagcagaauaagcaucuauuggacaauaguaaaaccgggagacauacuuuugauuaacagcacagggaaucuaauugcuccuagggguuacuucaaaauacgaagugggaaaagcucaauaaugagaucagaugcacccauuggcaaaugcaauucugaaugcaucacuccaaauggaagcauucccaaugacaaaccauuucaaaauguaaacaggaucacauauggggccugucccagauauguuaagcaaaacacucugaaauuggcaacagggaugcgaaauguaccagagaaacaaacuagaggcauauuuggcgcaaucgcggguuucauagaaaaugguugggagggaaugguggaugguugguacgguuucaggcaucaaaauucugagggaauaggacaagcagcagaucucaaaagcacucaagcagcaaucaaucaaaucaaugggaagcugaauagguugaucgggaaaaccaacgagaaauuccaucagauugaaaaagaauucucagaaguagaagggagaauucaggaccucgagaaauauguugaggacacuaaaauagaucucuggucauacaacgcagagcuucuuguugcccuggagaaccaacauacaauugaucuaacugacucagaaaugaacaaacuguuugaaagaacaaagaagcaacugagggaaaaugcugaggauaugggcaaugguuguuucaaaauauaccacaaaugugacaaugccuguauaggaucaaucagaaauggaacuuaugaucaugauguauacagagaugaagcauuaaacaaccgguuccagaucaaaggcguugagcugaagucaggauacaaagauuggauccuauggauuuccuuugccauaucauguuuuuugcuuuguguugcuuugucgggguucaucaugugggccugccaaaaaggcaacauuaggugcaacauuugcauuuga

SEQ ID NO: 33769 - RNA, 1701 nt, Artificial Sequence
  derived and/or modified CDS sequence (wt) from hemagglutinin__InfluenzaA__ABU92595
augaagacuaucauugcuuugagcuacauucuaugucugguuuucgcucaaaaacuucccgaaaaugacaacagcacggcaacgcugugccuugggcaccaugcaguaccaaacggaacgauagugaaaacaaucacgaaugaccaaauugaaguuacuaaugcuacugagcugguucagaguuccucaacagguggaauaugcgacaguccucaucagauccuugauggagaaaacugcacacuaauagaugcucuauugggagacccucagugugauggcuuccaaaauaagaaaugggaccuuuuuguugaacgcagcaaagccuacagcaacuguuacccuuaugaugugccggauuaugccucccuuaggucacuaguugccucauccggcacacuggaguuuaacaaugaaagcuucaauuggacuggagucacucaaaacggaacaagcucugcuugcaaaaggagaucuaauaacaguuucuuuaguagauugaauugguugacccacuuaaaauucaaauacccagcauugaacgugacuaugccaaacaaugaaaaauuugacaaauuguacauuugggggguucaccacccggguacggacaaugaccaaaucuuccuguaugcucaagcaucaggaagaaucacagucucuaccaaaagaagccaacaaacuguaaucccgaauaucggaucuagacccagaguaaggaauauccccagcagaauaagcaucuauuggacaauaguaaaaccgggagacauacuuuugauuaacagcacagggaaucuaauugcuccuagggguuacuucaaaauacgaagugggaaaagcucaauaaugagaucagaugcacccauuggcaaaugcaauucugaaugcaucacuccaaauggaagcauucccaaugacaaaccauuucaaaauguaaacaggaucacauauggggccugucccagauauguuaagcaaaacacucugaaauuggcaacagggaugcgaaauguaccagagaaacaaacuagaggcauauuuggcgcaaucgcggguuucauagaaaaugguugggagggaaugguggaugguugguacgguuucaggcaucaaaauucugagggaauaggacaagcagcagaucucaaaagcacucaagcagcaaucgaucaaaucaaugggaagcugaauagguugaucgggaaaaccaacgagaaauuccaucagauugaaaaagaauucucagaaguagaagggagaauucaggaccucgagaaauauguugaggacacuaaaauagaucucuggucauacaacgcggagcuucuuguugcccuggagaaccaacauacaauugaucuaacugacucagaaaugaacaaacuguuugaaaaaacaaagaagcaacugagggaaaaugcugaggauaugggcaaugguuguuucaaaauauaccacaaaugugacaaugccugcauaggaucaaucagaaauggaacuuaugaccaugauguauacagagaugaagcauuaaacaaccgguuccagaucaagggcguugagcugaagucaggauacaaagauuggauccuauggauuuccuuugccauaucauguuuuuugcuuuguguugcuuuguugggguucaucaugugggccugccaaaaaggcaacauuaggugcaacauuugcauuuga

SEQ ID NO: 33770 - RNA, 1701 nt, Artificial Sequence
  derived and/or modified CDS sequence (wt) from hemagglutinin__InfluenzaA__ABU92596
augaagacuaucauugcuuugagcuacauucuaugucugguuuuugcucaaaaacuucccggaaaugacaacagcacggcaacgcugugccuugggcaccaugcaguaccaaacggaacgauggugaaaacaaucacgaaugaccaaauugaaguuacuaaugcuacugagcugguucagaguuccucaacaggugaaauaugcgacaguccucaucagauccuugauggagaaaacugcacacuaauagaugcucuauugggagacccucagugugauggcuuccaaaauaagaaaugggaccuuuuuguugaacgaagcaaagcccacagcaacuguuacccuuaugaugugccggauuaugccucccuuaggucacuaauugccucauccggcacccuggaguuuaacaaugaaagcuucaauuggacuggagucacucaaaaugggacaagcucugcuugcaaaaggagaucugauaacaguuucuuuaguagauugaauugguugacccacuuaaaauucaaauacccagcauugaacgugacuaugccaaacaaugaagaauuugacaaauuguacauuugggggguucaccacccggguacggacaaugaccaaaucagccuauaugcucaagcaucaggaagaaucacagucucuaccaaaagaagccaacaaacuguaaucccgaauaucggaucuagacccaggguaagggauauccccagcagaauaagcaucuauuggacaauaguaaaaccgggagacauacuuuugauuaacagcacagggaaucuaauugcuccucgggguuacuucaaaauacgaagugggaaaagcucaauaaugagaucagaugcacccauuggcaaauguaauucuggaugcaucacuccaaauggaagcauucccaaugacaaaccauuucaaaauguaaacaggaucacauauggggccugccccagauauguuaagcaaaacacucuaaaauuggcaacagggaugcgaaauguaccagagaaacaaacuagaggcauauuuggcgcaaucgcggguuucauagaaaaugguugggagggaaugguggaugguugguacgguuucaggcaucaaaauucugagggaauaggacaagcagcagaucucaaaagcacucaagcagcaaucgaccaaaucaaugggaagcugaauagguugaucgggaaaaccaacgagaaauuccaucagauugaaaaagaauucucagaaguagaagggagaauucaggaccucgagaaauauguugaggacacuaaaauagaucucuggucauacaacgcggagcuucuuguugcccuggagaaccaacauacaauugaucuaacugacucagaaaugaacaaacuguuugaaagaacaaagaagcaacugagggaaaaugcugaggauaugggcaaugguuguuucaaaauauaccacaaaugugacaaugccugcauagggucaaucagaaauggaacuuaugaccaugauguauacagagaugaagcauuaaacaaccgguuccagaucaaagguguugagcugaagucaggauacaaagauuggauccuauggauuuccuuugccauaucauguuuuuugcuuuguguugcuuuguugggguucaucaugugggccugccaaaaaggcaacauuaggugcaacauuugcauuuga

SEQ ID NO: 33771 - RNA, 1701 nt, Artificial Sequence
  derived and/or modified CDS sequence (wt) from hemagglutinin__InfluenzaA__ABU92597
augaagacuaucauugcuuugagcuacauucuaugucugguuuucgcucaaaaacuucccggaaaugacaacagcacggcaacgcugugccuugggcaccaugcaguaccaaacggaacgauagugaaaacaaucacgaaugaccaaauugaaguuacuaaugcuacugagcugguucagaguuccucaacagguggaauaugcgacaguccucaucagauccuugauggagaaaacugcacacuaauagaugcucuauugggagacccucagugugauggcuuccaaaauaagaaaugggaccuuuuuguugaacgcagcaaagccuacagcaacuguuacccuuaugaugugccggauuaugccucccuuaggucacuaguugccucauccggcacacuggaguuuaacaaugaaagcuucaauuggacuggagucacucaaaauggaacaagcucugcuugcaaaaggagaucuaauaacaguuucuuuaguagauugaauugguugacccacuuaaaauucaaauacccagcauugaacgugacuaugccaaacaaugaaaaauuugacaaauuguacauuugggggguucaccacccggguacggacaaugaccaaaucuuccuguaugcucaagcaucaggaagaaucacagucucuaccaaaagaagccaacaaacuguaaucccgaauaucggaucuagacccagaguaaggaauauccccagcagaauaagcaucuauuggacaauaguaaaaccgggagacauacuuuugauuaacagcacagggaaucuaauugcuccuagggguuacuucaaaauacgaagugggaaaagcucaauaaugagaucagaugcacccauuggcaaaugcaauucugaaugcaucacuccaaauggaagcauucccaaugacaaaccauuucaaaauguaaacaggaucacauauggggccugucccagauauguuaagcaaaacacucugaaauuggcaacagggaugcgaaauguaccagagaaacaaacuagaggcauauuuggcgcaaucgcggguuucauagaaaaugguugggagggaaugguggaugguugguacgguuucaggcaucaaaauucugagggaauaggacaagcagcagaucucaaaagcacucaagcagcaaucaaucaaaucaaugggaagcugaauagguugaucgggaaaaccaacgagaaauuccaucagauugaaaaagaauucucagaaguagaagggagaauucaggaccucgagaaauauguugaggacacuaaaauagaucucuggucauacaacgcggagcuucuuguugcccuggagaaccaacauacaauugaucuaacugacucagaaaugaacaaacuguuugaaagaacaaagaagcaacugagggaaaaugcugaggauaugggaaaugguuguuucaaaauauaccacaaaugugacaaugccugcauaggaucaaucagaaauggaacuuaugaccaugauguauacagagaugaagcauuaaacaaccgguuccagaucaaaggcguugagcugaagucaggauacaaagauuggaucuuauggauuuccuuugccauaucauguuuuuugcuuuguguugcuuuguugggguucaucaugugggccugccaaaaaggcaacauuaggugcaacauuugcauuuga

SEQ ID NO: 33772 - RNA, 1701 nt, Artificial Sequence
  derived and/or modified CDS sequence (wt) from hemagglutinin__InfluenzaA__ABU92601
augaagacuaucauugcuuugagcuacauucuaugucugguuuucgcucaaaaacuucccggaaaugacaacagcacggcaacgcugugccuugggcaccaugcaguaccaaacggaacgauagugaaaacaaucacgaaugaccaaauugaaguuacuaaugcuacugagcugguucagauuuccucaacagguggaauaugcgacaguccucaucagauccuugauggagaaaacugcacacuaauagaugcucuauugggagacccucagugugauggcuuccaaaauaagaaaugggaccuuuuuguugaacgcagcaaagccuacagcaacuguuacccuuaugaugugccggauuaugccucccuuaggucacuaguugccucauccggcacacuggaguuuaacaaugaaagcuucgauuggacuggagucacucagaauggaacaagcucugcuugcaaaaggagaucuaauaaaaguuucuuuaguagauugaauugguugacccacuuaaaauacaaauacccagcauugaacgugacuaugccaaacaaugaaaaauuugacaaauuguacaucugggggguucaccacccggguacggacagugaccaaaucagccuauaugcucaagcaucaggaagaaucacagucucuaccaaaagaagccaacaaacuguaaucccgaauaucggaucuagacccaggguaagggaugucuccagccgaauaagcaucuauuggacaauaguaaaaccgggagacauacuuuugauuaacagcacagggaaucuaauugcuccucggggcuacuucaaaauacgaagugggaaaagcucaauaaugagaucagaugcacccauuggcaaaugcaauucugaaugcaucacuccaaauggaagcauucccaaugacaaaccauuucaaaauguaaacaggaucacauauggggccugucccagauauguuaagcaaaacacucugaaauuggcaacagggaugcgaaauguaccagagaaacaaacuagaggcauauuuggcgcaaucgcggguuucauagaaaaugguugggagggaaugguggacgguugguacgguuucaggcaucaaaauucugagggcacaggacaagcagcagaucucaaaagcacucaagcagcaaucaaccaaaucaaugggaaacugaauagguuaaucgggaaaacaaacgagaaauuccaucagauugaaaaagaauucucggaaguagaaggaagaauucaggaccucgagaaauauguugaggacacuaaaauagaucucuggucauacaacgcggagcuucuuguugcccuggagaaccaacauacaauugaucuaacugacucagaaaugaacaaacuguuugaaagaacaaagaagcaacugagggaaaaugcugaggauaugggcaaugguuguuucaaaauauaccacaaaugugacaaugccugcauagggucaaucagaaauggaacuuaugaccaugauguguacagagaugaagcauuaaacaaccgguuccagaucaaagguguugagcugaagucaggauacaaagauuggauccuauggauuuccuuugccauaucauguuuuuugcuuuguguugcuuuguugggguucaucaugugggccugccagaaaggcaacauuaggugcaacauuugcauuuga

SEQ ID NO: 33773 - RNA, 1701 nt, Artificial Sequence
  derived and/or modified CDS sequence (wt) from hemagglutinin__InfluenzaA__ABU92602
augaagacuaucauugcuuugagcuacauucuaugucugguuuucgcucaaaaacuucccggaaaugacaacagcacggcaacgcugugccuugggcaccaugcaguaccaaacggaacgauagugaaaacaaucacgaaugaccaaauugaaguuacuaaugcuacugagcugguucagauuuccucaacagguggaauaugcgacaguccucaucagauccuugauggagaaaacugcacacuaauagaugcucuauugggagacccucagugugauggcuuccaaaauaagaaaugggaccuuuuuguugaacgcagcaaagccuacagcaacuguuacccuuaugaugugccggauuaugccucccuuaggucacuaguugccucauccggcacacuggaguuuaacaaugaaagcuucgauuggacuggagucacucagaauggaacaagcucugcuugcaaaaggagaucuaauaaaaguuucuuuaguagauugaauugguugacccacuuaaaauacaaauacccagcauugaacgugacuaugccaaacaaugaaaaauuugacaaauuguacauuugggggguucaccacccggguacggacagugaccaaaucagccuauaugcucaagcaucaggaagaaucacagucucuaccaaaagaagccaacaaacuguaaucccgaauaucggaucuagacccaggguaagggaugucuccagccgaauaagcaucuauuggacaauaguaaaaccgggagacauacuuuugauuaacagcacagggaaucuaauugcuccucggggcuacuucaaaauacgaagugggaaaagcucaauaaugagaucagaugcacccauuggcaaaugcaauucugaaugcaucacuccaaauggaagcauucccaaugacaaaccauuucaaaauguaaacaggaucacauauggggccugucccagauauguuaagcaaaacacucugaaauuggcaacagggaugcgaaauguaccagagaaacaaacuagaggcauauuuggcgcaaucgcggguuucauagaaaaugguugggagggaaugguggacgguugguacgguuucaggcaucaaaauucugagggcacaggacaagcagcagaucucaaaagcacucaagcagcaaucaaccaaaucaaugggaaacugaauagguuaaucgggaaaacaaacgagaaauuccaucagauugaaaaagaauucucggaaguagaaggaagaauucaggaccucgagaaauauguugaggacacuaaaauagaucucuggucauacaacgcggagcuucuuguugcccuggagaaccaacauacaauugaucuaacugacucagaaaugaacaaacuguuugaaagaacaaagaagcaacugagggaaaaugcugaggauaugggcaaugguuguuucaaaauauaccacaaaugugacaaugccugcauagggucaaucagaaauggaacuuaugaccaugauguguacagagaugaagcauuaaacaaccgguuccagaucaaagguguugagcugaagucaggauacaaagauuggauccuauggauuuccuuugccauaucauguuuuuugcuuuguguugcuuuguugggguucaucaugugggccugccagaaaggcaacauuaggugcaacauuugcauuuga

SEQ ID NO: 33774 - RNA, 1701 nt, Artificial Sequence
  derived and/or modified CDS sequence (wt) from hemagglutinin__InfluenzaA__ABU92603
augaagacuaucauugcuuugagcuacauucuaugucugguuuucgcucaaaaacuucccggaaaugacaacagcacggcaacgcugugccuugggcaccaugcaguaccaaacggaacgauagugaaaacaaucacgaaugaccaaauugaaguuacuaaugcuacugagcugguucagauuuccucaacaggugaaauaugcgacaguccccaucagauccuugauggagaaaacugcacacuaauagaugcucuauugggagacccucagugugauggcuuccaaaauaagaaaugggaccuuuuuguugaacgcagcaaagccuacagcaacuguuacccuuaugaugugccggauuaugccucccuuaggucacuaguugccucauccggcacacuggaguuuaacaaugaaagcuucgauuggacuggagucacucagaauggaacaagcucugcuugcaaaaggagaucugauaaaaguuucuuuaguagauugaauugguugacccacuuaaaauacaaauacccagcauugaacguaacuaugccaaacaaugaaaaauuugacaaauuguacauuugggggguucaccacccggguacggacagugaccaaaucagccuauaugcucaagcaucaggaagaaucacagucucuaccaaaagaagccaacaaacuguaaucccgaauaucggaucuagacccaggguaagggaugucuccagccgaauaagcaucuauuggacaauaguaaaaccgggagacauacuuuugauuaacagcacagggaaucuaauugcuccucgggguuacuucaaaauacgaagugggaaaagcucaauaaugagaucagaugcacccauuggcaaaugcaauucugaaugcaucacuccaaauggaagcauucccaaugacaaaccauuucaaaauguaaacaggaucacauauggggccugucccagauauguuaagcaaaacacucugaaauuggcaacagggaugcgaaauguaccagagaaacaaacuagaggcauauuuggcgcaaucgcggguuucauagaaaaugguugggagggaaugguggacgguugguacgguuucaggcaucaaaauucugagggcacaggacaagcagcagaucucaaaagcacucaagcagcaaucaaccaaaucaaugggaaacugaauagguuaaucgggaaaacaaacgagaaauuccaucagauugaaaaagaauucucggaaguagaaggaagaauucaggaccucgagaaauauguugaggacacuaaaauagaucucuggucauacaacgcggagcuucuuguugcccuggagaaccaacauacaauugaucuaacugacucagaaaugaacaaacuguuugaaagaacaaagaagcaacugagggaaaaugcugaggauaugggcaaugguuguuucaaaauauaccacaaaugugacaaugccugcauagggucaaucagaaauggaacuuaugaccaugauguguacagagaugaagcauuaaacaaccgguuccagaucaaagguguugagcugaagucaggauacaaagauuggauccuauggauuuccuuugccauaucauguuuuuugcuuuguguugcuuuguugggguucaucaugugggccugccaaaaaggcaacauuaggugcaacauuugcauuuga

SEQ ID NO: 33775 - RNA, 1701 nt, Artificial Sequence
  derived and/or modified CDS sequence (wt) from hemagglutinin__InfluenzaA__ABU92604
augaagacuaucauugcuuugagcuacauucuaugucugguuuucgcucagaaacuucccggaaaugacaacagcacggcaacgcugugccuugggcaccaugcaguaccaaacggaacgauagugaaaacaaucacgaaugaccaaauugaaguuacuaaugcuacugagcugguucagauuuccucaacagguggaauaugcgacaguccucaucagauccuugauggagaaaacugcacacuaauagaugcucuauugggagacccucagugugauggcuuccaaaauaagaaaugggaccuuuuuguugaacgcagcaaagccuacagcaacuguuacccuuaugaugugccggauuaugccucccuuaggucacuaguugccucauccggcacacuggaguuuaacaaugaaagcuucgauuggacuggagucacucagaauggaacaagcucugcuugcaaaaggagaucuaauaaaaguuucuuuaguagauugaauugguugacccacuuaaaauacaaauacccagcauugaacgugacuaugccaaacaaugaaaaauuugacaaauuguacauuugggggguucaccacccggguacggacagugaccagaucagccuauaugcucaagcaucaggaagaaucacagucucuaccaaaagaagccaacaaacuguaaucccgaauaucggaucuagacccaggguaagggaugucuccagccgaauaagcaucuauuggacaauaguaaaaccgggagacauacuuuugauuaacagcacagggaaucuaauugcuccucgggguuacuucaaaauacgaagugggaaaagcucaauaaugagaucagaugcacccauuggcaaaugcaauucugaaugcaucacuccaaauggaagcauucccaaugacaaaccauuucaaaauguaaacaggaucacauauggggccugucccagauauguuaagcaaaacacucugaaauuggcaacagggaugcgaaauguaccagagaaacaaacuagaggcauauuuggcgcaaucgcggguuucauagaaaaugguugggagggaaugguggacgguugguacgguuucaggcaucaaaauucugagggcacaggacaagcagcagaucucaaaagcacucaagcagcaaucaaccaaaucaaugggaaacugaauagguuaaucgggaaaacaaacgagaaauuccaucagauugaaaaagaauucucggaaguagaaggaagaauucaggaccucgagaaauauguugaggacacuaaaauagaucucuggucauacaacgcggagcuucuuguugcccuggagaaccaacauacaauugaucuaacugacucagaaaugaacaaacuguuugaaagaacaaagaagcaacugagggaaaaugcugaggauaugggcaaugguuguuucaaaauauaccacaaaugugacaaugccugcauagggucaaucagaaauggaacuuaugaccaugauguguacagagaugaagcauuaaacaaccgguuccagaucaaagguguugagcugaagucaggauacaaagauuggauccuauggauuuccuuugccauaucauguuuuuugcuuuguguugcuuuguugggguucaucaugugggccugccaaaaaggcaacauuaggugcaacauuugcauuuga

SEQ ID NO: 33776 - RNA, 1701 nt, Artificial Sequence; identical to SEQ ID NO: 33774
  derived and/or modified CDS sequence (wt) from hemagglutinin__InfluenzaA__ABU92605

SEQ ID NO: 33777 - RNA, 1701 nt, Artificial Sequence
  derived and/or modified CDS sequence (wt) from hemagglutinin__InfluenzaA__ABU92606
augaagacuaucauugcuuugagcuacauucuaugucugguuuucgcucaaaaacuucccggaaaugacaacagcacggcaacgcugugccuugggcaccaugcaguaccaaacggaacgauagugaaaacaaucacaaaugaccaaauugaaguuacuaaugcuacugagcugguucagauuuccucaacaggugaaauaugcgacaguccccaucagauccuugauggagaaaacugcacacuaauagaugcucuauugggagacccucagugugauggcuuccaaaauaagaaaugggaccuuuuuguugaacgcagcaaagccuacagcaacuguuacccuuaugaugugccggauuaugccucccuuaggucacuaguugccucauccggcacacuggaguuuaacaaugaaagcuucgauuggacuggagucacucagaauggaacaagcucugcuugcaaaaggagaucugauaaaaguuucuuuaguagauugaauugguugacccacuuaaaauacaaauacccagcauugaacguaacuaugccaaacaaugaaaaauuugacaaauuguacauuugggggguucaccacccggguacggacagugaccaaaucagccuauaugcucaagcaucaggaagaaucacagucucuaccaaaagaagccaacaaacuguaaucccgaauaucggaucuagacccaggguaagggaugucuccagccgaauaagcaucuauuggacaauaguaaaaccgggagacauacuuuugauuaacagcacagggaaucuaauugcuccucgggguuacuucaaaauacgaagugggaaaagcucaauaaugagaucagaugcacccauuggcaaaugcaauucugaaugcaucacuccaaauggaagcauucccaaugacaaaccauuucaaaauguaaacaggaucacauauggggccugucccagauauguuaagcaaaacacucugaaauuggcaacagggaugcgaaauguaccagagaaacaaacuagaggcauauuuggcgcaaucgcggguuucauagaaaaugguugggagggaaugguggacgguugguacgguuucaggcaucaaaauucugagggcacaggacaagcagcagaucucaaaagcacucaagcagcaaucaaccaaaucaaugggaaacugaauagguuaauugggaaaacaaacgagaaauuccaucagauugaaaaagaauucucggaaguagaaggaagaauucaggaccucgagaaauauguugaggacacuaaaauagaucucuggucauacaacgcggagcuucuuguugcccuggagaaccaacauacaauugaucuaacugacucagaaaugaacaaacuguuugaaagaacaaagaagcaacugagggaaaaugcugaggauaugggcaaugguuguuucaaaauauaccacaaaugugacaaugccugcauagggucaaucagaaauggaacuuaugaccaugauguguacagagaugaagcauuaaacaaccgguuccagaucaaagguguugaguugaagucaggauacaaagauuggauccuauggauuuccuuugccauaucauguuuuuugcuuuguguugcuuuguugggguucaucaugugggccugccaaaaaggcaacauuaggugcaacauuugcauuuga

SEQ ID NO: 33778 - RNA, 1701 nt, Artificial Sequence
  derived and/or modified CDS sequence (wt) from hemagglutinin__InfluenzaA__ABU92608
augaagacuaucauugcuuugagcuacauucuaugucugguuuucgcucaaaaacuucccggaaaugacaacagcacggcaacgcugugccuugggcaccaugcaguaccaaacggaacgauagugaaaacaaucacgaaugaccaaauugaaguuacuaaugcuacugagcugguucagaguuccucaacagguggaauaugcgacaguccucaucagauccuugauggagaaaacugcacacuaauagaugcucuauugggagacccucagugugauggcuuccaaaauaagaaaugggaccuuuuuguugaacgcagcaaagccuacagcaacuguuacccuuaugaugugccggauuaugucucccuuaggucacuaguugccucauccggcacacuggaguuuaacaaugaaagcuucaauuggacuggagucacucaaaauggaacaagcucugcuugcaaaaggagaucuaauaacaguuucuuuaguagguugaauugguugacccauuuaaaauucaaauacccagcauugaacgugacuaugccaaacaaugaaaaauuugacaaauuguacauuugggggguucaccacccggguacggacaaugaccaaaucagccuauaugcucaagcaucaggaagaaucacagucucuaccaaaagaagccaacaaacuguaaucccgaauaucggaucuagacccaggguaagggauauccccagcagaauaagcaucuauuggacaauaguaaaaccgggagacauacuuuugauuaacagcacagggaaucuaauugcuccucgggguuacuucaaaauacgaagugggaaaagcucaauaaugagaucagaugcacccauuggcaaaugcaauucugaaugcaucacuccaaauggaagcauucccaaugacaaaccauuucaaaauguaaacaggaucacauauggggccugucccagauauguuaagcaaaacacucugaaauuggcaacagggaugcgaaauguaccagagaaacaaacuagaggcauauuuggcgcaaucgcggguuucauagaaaaugguugggagggaaugguggaugguugguacgguuucaggcaucaaaauucugagggaauaggacaagcagcagaucucaaaagcacucaagcagcaaucaaccaaaucaaugggaagcugaauagguugaucgggaaaaccaacgagaaauuccaucagauugaaaaagaauucucagaaguagaagggagaauucaggaccucgagaaauauguugaggacacuaaaauagaucucuggucauacaacgcggagcuucuuguugcccuggagaaccaacauacaauugaucuaacugacucagaaaugaacaaacuguuugaaagaacaaagaagcaacugagggaaaaugcugaggauaugggcaaugguuguuucaaaauauaccacaaaugugacaaugccugcauagggucaaucagaaauggaacuuaugaucaugauguauacagagaugaagcauuaaacaaccgguuccagaucaaagguguugagcugaagucaggauacaaagauuggauccuauggauuuccuuugccauaucauguuuuuugcuuuguguugcuuuguugggguucaucaugugggccugccaaaaaggcaacauuaggugcaacauuugcauuuga

SEQ ID NO: 33779 - RNA, 1701 nt, Artificial Sequence; identical to SEQ ID NO: 33778
  derived and/or modified CDS sequence (wt) from hemagglutinin__InfluenzaA__ABU92609

SEQ ID NO: 33780 - RNA, 1701 nt, Artificial Sequence
  derived and/or modified CDS sequence (wt) from hemagglutinin__InfluenzaA__ABU92610
augaagacuaucauugcuuugagcuacauucuaugucugguuuucgcucaaaaacuucccggaaaugacaacagcacggcaacgcugugccuugggcaccaugcaguaccaaacggaacgauagugaaaacaaucacgaaugaccaaauugagguuacuaaugcuacugagcugguucagaguuccucaacaggugaaauaugcgacaguccucaucagauccuugauggagaaaacugcacacuaauagaugcucuauugggagacccucagugugauggcuuccaaaauaagaaaugggaccuuuuuguugaacgcagcaaagccuacagcaacuguuacccuuaugaugugccggauuaugccucccuuaggucacuaguugccucauccggcacacuggaguuuaacaaugaaagcuucaauuggacuggagucacucaaaauggaacaagcucugcuugcaaaaggagaucuaauaacaguuucuuuaguagacugaauugguugacccacucaaaauucaaauacccagcauugaacgugacuaugccaaacaaugaaaaauuugacaaauuguacauuugggggguucaccacccggguacggacaaugaccaaaucuuccuguaugcucaagcaucaggaagaaucacagucucuaccaaaagaagccaacaaacuguaaucccgaauaucggaucuagaccuagaguaaggaauauccccagcagaauaagcaucuauuggacaauaguaaaaccgggagacauacuuuugauuaacagcacagggaaucuaauugcuccuagggguuacuucaaaauacgaagugggaaaagcucaauaaugagaucagaugcacccauuggcaaaugcaauucugaaugcaucacuccaaauggaagcauucccaaugacaaaccauuucaaaauguaaacagaaucgcauauggggccugucccagauauguuaagcaaaacacucugaaauuggcaacagggaugagaaauguaccagagaaacaaacuagaggcauauuuggcgcaaucgcagguuucauagaaaaugguugggagggaaugguggaugguugguacgguuucaggcaucaaaauucugagggaauaggacaagcagcagaucucaaaagcacucaagcagcaaucaaucaaaucaaugggaagcugaauagguugaucgggaaaaccaacgagaaauuccaucagauugaaaaagaauucucagaaguagaagggagaauucaggaccucgagaaauauguugaggacacuaaaauagaucucuggucauacaacgcggagcuucuuguugcccuggagaaccaacauacaauugaucuaacugacucagaaaugaacaaacuguuugaaagaacaaagaagcaacugagggaaaaugcugaggauaugagcaaugguuguuucaaaauauaccacaaaugugacaaugccugcauaggaucaaucagaaauggaacuuaugaccaugauguauacagagaugaagcauuaaacaaccgguuccagaucaaaggcguugagcugaagucaggauacaaagauuggauccuauggauuuccuuugccauaucauguuuuuugcuuuguguuguuuuguugggguucaucaugugggccugccaaaaaggcaacauuaggugcaacauuugcauauga

SEQ ID NO: 33781 - RNA, 1701 nt, Artificial Sequence
  derived and/or modified CDS sequence (wt) from hemagglutinin__InfluenzaA__ABU92611
augaagacuaucauugcuuugagcuacauucuaugucugguuuucgcucaaaaacuucccggaaaugacaacagcacggcaacgcugugccuugggcaccaugcaguaccaaacggaacgauagugaaaacaaucacgaaugaccaaauugaaguuacuaaugcuacugagcugguucagaguuccucaacagguggaauaugcgacaguccucaucagauccuugauggagaaaacugcacacuaauagaugcucuauugggagacccucagugugauggcuuccaaaauaagaaaugggaccuuuuuguugaacgcagcaaagccuacagcaacuguuacccuuaugaugugccggauuaugccucccuuaggucacuaauugccucauccggcacacuggaguuuaacaaugaaagcuucaauuggacuggagucacucaaaauggaacaagcucugcuugcaaaaggagaucuaauaacaguuucuuuaguagauugaauugguugacccacuuaaaauucaaauacccagcauugaacgugacuaugccaaacaaugaagaauuugacaaauuguacauuugggggguucaccacccggguacggacaaugaccaaaucagccuauaugcucaagcaucaggaaaaaucacagucucuaccaaaagaagccaacaaacuguaaucccgaauaucggaucuagacccaggguaagggauauccccagcagaauaagcaucuauuggacaauaguaaaaccgggagacauacuuuugauuaacagcacagggaaucuaauugcuccucgggguuacuucaaaauacgaagugggaaaagcucaauaaugagaucagaugcacccauuggcaaaugcaauucugaaugcaucacuccaaauggaagcauucccaaugacaaaccauuucaaaauguaaacaggaucacauauggggccugucccagauauguuaagcaaaacacucugaaauuggcaacagggaugcgaaauguaccagagaaacaaacuagaggcauauuuggcgcaaucgcggguuucauagaaaaugguugggagggaaugguggaugguugguacgguuucaggcaucaaaauucugagggaauaggacaagcagcagaucucaaaagcacucaagcagcaaucgaccaaaucaaugggaagcugaauagguugaucgggaaaaccaacgagaaauuccaucagauugaaaaagaauucucagaaguagaagggagaauccaggaccucgagaaauauguugaggacacuaaaauagaucucuggucauacaacgcggagcuucuuguugcccuggagaaccaacauacaauugaucuaacugacucagaaaugaacaaacuguuugaaagaacaaagaagcaacugagggaaaaugcugaggauaugggcaaugguuguuucaaaauauaccacaaaugugacaaugccugcauagggucaaucagaaauggaacuuaugaccaugauguauacagagaugaagcauuaaacaaccgguuccagaucaaagguguugagcugaagucaggauacaaagauuggauccuauggauuuccuuugccauaucauguuuuuugcuuuguguugcuuuguugggguucaucauaugggccugccuaaaaggcaacauuaggugcaacauuugcauuuga

SEQ ID NO: 33782 - RNA, 1701 nt, Artificial Sequence
  derived and/or modified CDS sequence (wt) from hemagglutinin__InfluenzaA__ABU92612
augaagacuaucauugcuuugagcuacauucuaugucugguuuucgcucaaaaacuucccggaaaugacaacagcacggcaacgcugugccuugggcaccaugcaguaccaaacggaacgauggugaaaacaaucacgaaugaccaaauugaaguuacuaaugcuacugagcugguucagaguuccucaacagguggaauaugcgacaguccucaucagauccuugauggagaaaacugcacacuaauagaugcucuauugggagacccucagugugauggcuuccaaaauaagaaaugggaccuuuuuguugaacgcagcaaagcccacagcaacuguuacccuuaugaugugccggauuaugccucccuuaggucacuaguugccucauccggcacacuggaguuuaacaaugaaagcuucaauuggacuggagucacucaaaauggaacaagcucugcuugcaaaaggagaucuaauaacaguuucuuuaguagauugaauugguugacccacuuaaaauucaaauacccagcauugaacgugacuaugccaaacaaugaaaaauuugacaaauuguacauuugggggguucaccacccggguacggacaaugaccaaaucagccuauaugcucaagcuucaggaagaaucacagucucuaccaaaagaagccaacaaacuguaaucccgaauaucggaucuagacccaggguaagggauauccccagcagaauaagcaucuauuggacaauaguaaaaccgggagacauacuuuugauuaacagcacagggaaucuaauugcuccucgggguuacuucaaaauacgaagugggaaaagcucaauaaugagaucagaugcacccauuggcaaaugcaauucugaaugcaucacuccaaauggaagcauucccaauaacaaaccauuucaaaauguaaacaggaucacauauggggccugucccagauauguuaagcaaaacacucugaaauuggcaacagggaugcgaaauguaccagagaaacaaacuagaggcauauuuggcgcaaucgcggguuucauagaaaaugguugggagggaaugguggaugguugguacgguuucaggcaucaaaauucugagggaauaggacaagcagcagaucucaaaagcacucaagcagcaaucaaccaaaucaaugggaagcugaauagguugaucgggaaaaccaacgagaaauuccaucagauugaaaaagaauucucagaaguagaagggagaauucaggaccucgagaaauauguugaggacacuaaaauagaucucuggucauacaacgcggagcuucuuguugcccuggagaaccaacauacaauugaucuaacugacucagaaaugaacaaacuguuugaaagaacaaagaagcagcugagggaaaaugcugaggauaugggcaaugguuguuucaaaauauaccacaaaugugacaaugccugcauagggucaaucagaaauggaacuuaugaccaugauguauacagagaugaagcauuaaacaaccgguuccagaucaaagguguugagcugaagucaggauacaaagauuggauccuauggauuuccuuugccauaucauguuuuuugcuuuguguugcuuuguugggguucaucaugugggccugccaaaaaggcaacauuaggugcaacauuugcauuuga

SEQ ID NO: 33783 - RNA, 1701 nt, Artificial Sequence
  derived and/or modified CDS sequence (wt) from hemagglutinin__InfluenzaA__ABU92613
augaagacuaucauugcuuugagcuacauucuaugucugguuuucgcucaaaaacuucccggaaaugacaacagcacggcaacgcugugccuugggcaccaugcaguaccaaacggaacgauagugaaaacaaucacgaaugaccaaauugaaguuacuaaugcuacugagcugguucagaguuccucaacagguggaauaugcgacaguccucaucagauccuugauggagaaaacugcacacuaauagaugcucuauugggagacccucagugugauggcuuccaaaauaagaaaugggaccuuuuuauugaacgcagcaaagccuacagcaacuguuacccuuaugaugugccggauuaugccucccuuaggucacuaguugccucauccggcacacuggaauuuaacaaugaaagcuucaauuggacuggagucacucaaaauggaacaagcucugcuugcaaaaggagaucuaauaacaguuucuuuaguagauugaauugguugacccacuuaaaauucaaauacccagcauugaacgugacuaugccaaacaaugaaaaauuugacaaauuguacauuugggggguucaccacccggguacggacaaugaccaaaucagccuauaugcucaagcuucaggaagaaucacagucucuaccaaaagaagccaacaaacuguaaucccgaauaucggaucuagacccaggguaagggauauccccagcagaauaagcaucuauuggacaauaguaaaaccgggagacauacuuuugauuaacagcacagggaaucuaauugcuccucgggguuacuucaaaauacgaagugggaaaagcucaauaaugagaucagaugcacccauuggcaaaugcaauucugaaugcaucacuccaaauggaagcauucccaaugacaaaccauuucaaaauguaaacaggaucacauauggggccugucccagauauguuaagcaaaacacucugaaauuggcaacagggaugcgaaauguaccagagaaacaaacuagaggcauauuuggcgcaaucgcggguuucauagaaaaugguugggagggaaugguggaugguugguacgguuucaggcaucaaaauucugagggaauaggacaagcagcagaucucaaaagcacucaagcagcaaucaaccaaaucaaugggaagcugaauagguugaucgggaaaaccaacgagaaauuccaucagauugaaaaagaauucucagaaguagaagggagaauucaggaccucgagaaauauguugaggacacuaaaguagaucucuggucauacaacgcggagcuucuuguugcccuggagaaccaacauacaauugaucuaacugacucagaaaugaacaaacuguuugaaagaacaaagaagcaacugagggaaaaugcugaggauaugggcaaugguuguuucaaaauauaccacaaaugugacaaugccugcauagggucaaucagaaauggaacuuaugaccaugauguauacagagaugaagcauugaacaaccgguuccagaucaaagguguugagcugaagucaggauacaaagauuggauccuauggauuuccuuugccauaucauguuuuuugcuuuguguugcuuuguugggguucaucaugugggccugccaaaaaggcaacauuaggugcaacauuugcauuuga

SEQ ID NO: 33784 - RNA, 1701 nt, Artificial Sequence; identical to SEQ ID NO: 33769
  derived and/or modified CDS sequence (wt) from hemagglutinin__InfluenzaA__ABU92614

SEQ ID NO: 33785 - RNA, 1701 nt, Artificial Sequence
  derived and/or modified CDS sequence (wt) from hemagglutinin__InfluenzaA__ABU92615
augaagacuaucauugcuuugagcuacauucuaugucugguuuucgcccaaaaacuucccggaaaugacaacagcacggcaacgcugugccuugggcaccaugcaguaccaaacggaacgauagugagaacaaucacgaaugaccaaauugaaguuacuaaugcuacugagcugguucagaguuccucaacagguggcauaugcgacaguccucaucagauccuugauggagaaaacugcacacuaauagaugcucuauugggagacccucagugugauggcuuccaaaauaagaaaugggaccuuuuuguugaacgcagcaaagccuacagcaacuguuacccuuaugaugugccggauuaugccucccuuaggucacugguugccucauccggcacacuggaguuuaacaaugaaagcuucaauuggacuggagucacucaaaauggaacaagcucugcuugcaaaaggagaucuaauaacaguuucuuuaguagauugaauugguugacccacuuaaaauucaaauacccagcauugaacgugacuaugccaaacaaugaaaaauuugacaaauuguacauuugggggguucaccacccggguacggacaaugaccaaaucagccuauaugcucaagcuucaggaagaaucacagucucuaccaaaagaagccaacaaacuguaaucccgaaugucggaucuagacccaggguaagggauauccccagcagaauaagcaucuauuggacaauaguaaaaccgggagacauacuuuugauuaacagcacagggaaucuaauugcuccucgggguuacuucaaaauacgaagugggaaaagcucaauaaugagaucagaugcacccauuggcaaaugcaauucugaauguaucacuccaaauggaagcauucccaaugacaaaccauuucaaaauguaaacaggaucacauauggggccugucccagauauguuaagcaaaacacucugaaauuggcaacagggaugcgaaauguaccagagaaacaaacuagaggcauauuuggcgcaaucgcggguuucauagaaaaugguugggagggaaugguggaugguugguacgguuucaggcaucaaaauucugagggaauaggacaagcagcagaucucaaaagcacucaagcagcaaucaaccaaaucaaugggaagcugaauagauugaucgggaaaaccaacgagaaauuccaucagauugaaaaagaauucucagaaguagaagggagaauucaggaccucgagaaauauguugaggacacuaaaauagaucucuggucauacaacgcggagcuucuuguugcccuggagaaccaacauacaauugaucuaacugacucagaaaugaacaaacuguuugaaagaacaaagaagcaacugagggaaaaugcugaggauaugggcaaugguuguuucaaaauauaccauaaaugugacaaugccugcauagggucaaucagaaauggaacuuaugaccaugauguauacagagaugaagcauuaaacaaccgguuccagaucaaagguguugagcugaagucaggauacaaagauuggauccuauggauuuccuuugccauaucauguuuuuugcuuuguguugcuuuguugggguucaucaugugggccugccaaaaaggcaacauuaggugcaacauuugcauuuga

SEQ ID NO: 33786 - RNA, 1701 nt, Artificial Sequence
  derived and/or modified CDS sequence (wt) from hemagglutinin__InfluenzaA__ABU92617
augaagacuaucauugcuuugagcuacauucuaugucugguuuucgcucaaaaacuucccggaaaugacaacagcacggcaacgcugugccuugggcaccauucaguaccaaacggaacgauagugaaaacaaucacgaaugaucaaauugaaguuacuaaugcuacugagcugguucagaguuccucaacagguggaauaugcgacaguccucaucagauccuugauggagaaaacugcacacuaauagaugcucuauugggagacccucagugugauggcuuccaaaauaagaaaugggaccuuuuuguugaacgcagcaaagccuacagcaacuguuacccuuaugaugugccggauuaugccucccuuaggucacuaauugccucauccggcacacuggaguuuaacaaugaaagcuucaauuggacuggagucacucaaaauggaacaagcucugcuugcaaaaggagaucuaauagcaguuucuuuaguagauugaauugguugacccacuuaaaauucaaauacccagcauugaacgugacuaugccaaacaaugaagaauuugacaaauuguacauuugggggguucaccacccggguacagacaaugaccaaaucagccuauaugcucaagcaucaggaagaaucacagucucuaccaaaagaagccaacaaacuguaaucccgaauaucgggucuagacccaggguaagggauauccccagcagaauaagcaucuauuggacaauaguaaaaccgggagacauacuuuugauuaacagcacagggaaucuaauugcuccucgggguuacuucaaaauacgaagugggaaaagcucaauaaugagaucagaugcacccauuggcaaaugcaauucugaaugcaucacuccaaauggaagcauucccaaugacaaaccauuucaaaauguaaacaggaucacauauggggccugucccagauauguuaagcaaaacacucugaaauuggcaacagggaugcgaaauguaccagagaaacaaacuagaggcauauuuggcgcaaucgcggguuucauagaaaaugguugggagggaaugguggaugguugguacgguuucaggcaucaaaauucugagggaauaggacaagcagcagaucucaaaagcacucaagcagcaaucgaccaaaucaaugggaagcugaauagguugaucgggaaaaccaacgagaaauuccaucagauugaaaaagaauucucagaaguagaagggagaauucaggaccucgagaaauauguugaggacacuaaaauagaucucuggucauacaacgcggagcuucuuguugcccuggagaaccaacauacaauugaucuaacugacucagaaaugaacaaacuguuugaaagaacaaagaagcaacugagggaaaaugcugaggauaugggcaaugguugcuucaaaauauaccacaaaugugacaaugccugcauagggucaaucagaaauggaacuuaugaccaugauguauacagagaugaagcauuaaacaaccgguuccagaucaaagguguugagcugaagucaggauacaaagauuggauccuauggauuuccuuugccauaucauguuuuuugcuuuguguugcuuuguugggguucaucaugugggccugccaaaaaggcaacauuaggugcaacauuugcauuuga

SEQ ID NO: 33787 - RNA, 1701 nt, Artificial Sequence; identical to SEQ ID NO: 33783
  derived and/or modified CDS sequence (wt) from hemagglutinin__InfluenzaA__ABU92619

SEQ ID NO: 33788 - RNA, 1701 nt, Artificial Sequence; identical to SEQ ID NO: 33769
  derived and/or modified CDS sequence (wt) from hemagglutinin__InfluenzaA__ABU92620

SEQ ID NO: 33789 - RNA, 1701 nt, Artificial Sequence
  derived and/or modified CDS sequence (wt) from hemagglutinin__InfluenzaA__ABU92622
augaagacuaucauugcuuugagcuacauucuaugucugguuuucgcucaaaaacuucccggaaaugacaacagcacggcaacgcugugccuugggcaccaugcaguaccaaacggaacgauagugaaaacaaucacaaaugaccaaauugaaguuacuaaugcuacugagcugguucagaguuccucaacagguggaauaugcgacaguccucaucaaauccuugauggagaaaacugcacacuaauagaugcucuauugggagacccucagugugauggcuuccaaaauaagaaaugggaccuuuuuguugaacgcagcaaagccuacagcaacuguuacccuuaugaugugccggauuaugccucccuuaggucacuaauugccucauccggcacacuggaguuuaacaaugaaagcuucaauuggacuggagucacucaaaauggaacaagcucugcuugcaaaaggagaucuaauagcaguuucuuuaguagauugaauugguugacccacuuaaaauucaaauacccagcauugaacgugacuaugccaaacaaugaagaauuugacaaauuguacauuugggggguucaccacccggguacagacaaugaccaaaucagccuauaugcucaagcaucaggaagaaucacagucucuaccaaaagaagccaacaaacuguaaucccgaauaucggaucuagacccaggguaagggauauccccagcagaauaagcaucuauuggacaauaguaaaaccgggagacauacuuuugauuaacagcacagggaaucuaauugcuccucgggguuacuucaaaauacgaagugggaaaagcucaauaaugagaucagaugcacccauuggcaaaugcaauucugaaugcaucacuccaaauggaagcauucccaaugacaaaccauuucaaaauguaaacaggaucacauauggggccugucccagaucuguuaagcaaaacacucugaaauuggcaacagggaugcgaaauguaccagagaaacaaacuagaggcauauuuggcgcaaucgcggguuucauagaaaaugguugggagggaaugguggaugguugguacgguuucaggcaucaaaauucugagggaauaggacaagcagcagaucucaaaagcacucaagcagcaaucgaccaaaucaaugggaagcugaauagguugaucgggaaaaccaacgagaaauuccaucagauugaaaaagaauucucagaaguagaagggagaauucaggaccucgagaaauauguugaggacacuaaaauagaucucuggucauacaacgcggagcuucuuguugcccuggagaaccaacauacaauugaucuaacugacucagaaaugaacaaacuguuugaaagaacaaagaagcaacugagggaaaaugcugaggauaugggcaaugguuguuucaaaauauaccacaaaugugacaaugccugcauagggucaaucagaaauggaacuuaugaccaugauguauacagagaugaagcauuaaacaaccgguuccagaucaaagguguugagcugaagucaggauacaaggauuggauccuauggauuuccuuugccauaucauguuuuuugcuuuguguugcuuuguugggguucaucaugugggccugccaaaaaggcaacauuaggugcaacauuugcauuuga

SEQ ID NO: 33790 - RNA, 1701 nt, Artificial Sequence
  derived and/or modified CDS sequence (wt) from hemagglutinin__InfluenzaA__ABU92623
augaagacuaucauugcuuugagcuacauucuaugucugguuuucgcucaaaaacuucccggaaaugacaacagcacggcaacgcugugccuugggcaccaugcaguaccaaacggaacgauagugaaaacaaucacgaaugaccaaauugaaguuacuaaugcuacugagcugguucagauuuccucaacagguggaauaugcgacaguccucaucagauccuugauggagaaaacugcacacuaauagaugcucuauugggagacccucagugugauggcuuccaaaauaagaaaugggaccuuuuuguugaacgcagcaaagccuacagcaacuguuacccuuaugaugugccggauuaugccucccuuaggucacuaguugccucauccggcacacuggaguuuaacaaugaaagcuucgauuggacuggagucacucagaauggaacaagcucugcuugcaaaaggagaucuaauaaaaguuucuuuaguagauugaauugguugacccacuuaaaauacaaauacccagcauugaacgugacuaugccaaacaaugaaaaauuugacaaauuguacauuugggggguucaccacccggguacggacagugaccaaaucagccuauaugcucaagcaucaggaagaaucacagucucuaccaaaagaagccaacaaacuguaaucccgaauaucggaucuagacccaggguaagggaugucuccagccgaauaagcaucuauuggacaauaguaaaaccgggagacauacuuuugauuaacagcacagggaaucuaauugcuccucggggcuacuucaaaauacgaagugggaaaagcucaauaaugagaucagaugcacccauuggcaaaugcaauucugaaugcaucacuccaaauggaagcauucccaaugacaaaccauuucaaaauguaaacaggaucacauauggggccugucccagauauguuaagcaaaacacucugaaauuggcaacagggaugcgaaauguaccagagaaacaaacuagaggcauauuuggcgcaaucgcggguuucauagaaaaugguugggagggaaugguggacgguugguacgguuucaggcaucaaaauucugagggcacaggacaagcagcagaucucaaaagcacucaagcagcaaucaaccaaaucaaugggaaacugaauagguuaaucgggaaaacaaacgagaaauuccaucagauugaaaaagaauucucggaaguagaaggaagaauucaggaccucgagaaauauguugaggacacuaaaauagaucucuggucauacaacgcggagcuucuuguugcccuggagaaccaacauacaauugaucuaacugacucagaaaugaacaaacuguuugaaagaacaaagaagcaacugagggaaaaugcugaggauaugggcaaugguuguuucaaaauauaccacaaaugugacaaugccugcauagggucaaucagaaauggaacuuaugaccaugauguguacagagaugaagcauuaaacaaccgguuccagaucaaagguguugagcugaagucaggauacaaagauuggauccuauggauuuccuuugccauaucauguuuuuuacuuuguguugcuuuguugggguucaucaugugggccugccagaaaggcaacauuaggugcaacauuugcauuuga

SEQ ID NO: 33791 - RNA, 1701 nt, Artificial Sequence
  derived and/or modified CDS sequence (wt) from hemagglutinin__InfluenzaA__ABU92624
augaagacuaucauugcuuugagcuacauucuaugucugguuuucgcucaaaaacuucccggaaaugacaacagcacggcaacgcugugccuugggcaccaugcaguaccaaacggaacgauagugaaaacaaucacgaaugaccaaauugaaguuacuaaugcuacugagcugguucagauuuccucaacaggugaaauaugcgacaguccccaucagauccuugauggagaaaacugcacacuaauagaugcucuauugggagacccucagugugauggcuuccaaaauaagaaaugggaccuuuuuguugaacgcagcaaagccuacagcaacuguuacccuuaugaugugccggauuaugccucccuuaggucacuaguugccucauccggcacacuggaguuuaacaaugaaagcuucgauuggacuggagucacucagaauggaacaagcucugcuugcaaaaggagaucugauaaaaguuucuuuaguagauugaauugguugacccacuuaaaauacaaauacccagcauugaacguaacuaugccaaacaaugaaaaauuugacaaauuguacauuugggggguucaccacccggguacggacagugaccaaaucagccuauaugcucaagcauuaggaagaaucacagucucuaccaaaagaagccaacaaacuguaaucccgaauaucggaucuagacccaggguaagggaugucuccagccgaauaagcaucuauuggacaauaguaaaaccgggagacauacuuuugauuaacagcacagggaaucuaauugcuccucgggguuacuucaaaauacgaagugggaaaagcucaauaaugagaucagaugcacccauuggcaaaugcaauucugaaugcaucacuccaaauggaagcauucccaaugacaaaccauuucaaaauguaaacaggaucacauauggggccugucccagauauguuaagcaaaacacucugaaauuggcaacagggaugcgaaauguaccagagaaacaaacuagaggcauauuuggcgcaaucgcggguuucauagaaaaugguugggagggaaugguggacgguugguacgguuucaggcaucaaaauucugagggcacaggacaagcagcagaucucaaaagcacucaagcagcaaucaaccaaaucaaugggaaacugaauagguuaaucgggaaaacaaacgagaaauuccaucagauugaaaaagaauucucggaaguagaaggaagaauucaggaccucgagaaauauguugaggacacuaaaauagaucucuggucauacaacgcggagcuucuuguugcccuggagaaccaacauacaauugaucuaacugacucagaaaugaacaaacuguuugaaagaacaaagaagcaacugagggaaaaugcugaggauaugggcaaugguuguuucaaaauauaccacaaaugugacaaugccugcauagggucaaucagaaauggaacuuaugaccaugauguguacagagaugaagcauuaaacaaccgguuccagaucaaagguguugagcugaagucaggauacaaagauuggauccuauggauuuccuuugccauaucauguuuuuugcuuuguguugcuuuguugggguucaucaugugggccugccaaaaaggcaacauuaggugcaacauuugcauuuga

SEQ ID NO: 33792 - RNA, 1701 nt, Artificial Sequence
  derived and/or modified CDS sequence (wt) from hemagglutinin__InfluenzaA__ABU92625
augaagacuaucauugcuuugagcuacauucuaugucugguuuucgcucaaaaacuucccggaaaugacaacagcacggcaacgcugugccuugggcaccaugcaguaccaaacggaacgauagugaaaacaaucacgaaugaccaaauugaaguuacuaaugcuacugagcugguucagauuuccucaacaggugaaauaugcgacaguccccaucagauccuugauggagaaaacugcacacuaauagaugcucuauugggagacccucagugugauggcuuccaaaauaagaaaugggaccuuuuuguugaacgcagcaaagccuacagcaacuguuacccuuaugaugugccggauuaugccucccuuaggucacuaguugccucauccggcacacuggaguuuaacaaugaaagcuucgauuggacuggagucacucagaauggaacaagcucugcuugcaaaaggagaucugauaaaaguuucuuuaguagauugaauugguugacccacuuaaaauacaaauacccagcauugaacguaacuaugccaaacaaugaaaaauuugacaaauuguacauuugggggguucaccacccggguacggacagugaccaaaucagccuauaugcucaagcaucaggaagaaucacagucucuaccaaaagaagccaacaaacuguaaucccgaauaucggaucuagacccaggguaagggaugucuccagccgaauaagcaucuauuggacaauaguaaaaccgggagacauacuuuugauuaacagcacagggaaucuaauugcuccucgggguuacuucaaaauacgaagugggaaaagcucaauaaugagaucagaugcacccauuggcaaaugcaauucugaaugcaucacuccaaauggaagcauucccaaugacaaaccauuucaaaauguaaacaggaucacauauggggccugucccagauauguuaagcaaaacacucugaaauuggcaacagggaugcgaaauguaccagagaaacaaacuagaggcauauuuggcgcaaucgcggguuucauagaaaaugguugggagggaaugguggacgguugguacgguuucaggcaucaaaauucugagggcacaggacaagcagcagaucucaaaagcacucaagcagcaaucaaccaaaucaaugggaaacugaauagguuaaucgggaaaacaaacgagaaauuccaucagauugaaaaagaauucucggaaguagaaggaagaauucaggaccucgagaaauauguugaggacacuaaaauagaucucuggucauacaacgcggagcuucuuguugcccuggagaaccaacauacaauugaucuaacugacucagaaaugaacaaacuguuugaaagaacaaagaagcaacugagggaaaaugcugaggauaugggcaaugguuguuucaaaauauaccacaaaugugacaaugccugcauagggucaaucagaaauggaacuuaugaccaugauguguacagagaugaagcauuaaacaaccgguuccagaucaaagguguugaguugaagucaggauacaaagauuggauccuauggauuuccuuugccauaucauguuuuuugcuuuguguugcuuuguugggguucaucaugugggccugccaaaaaggcaacauuaggugcaacauuugcauuuga

SEQ ID NO: 33793 - RNA, 1701 nt, Artificial Sequence
  derived and/or modified CDS sequence (wt) from hemagglutinin__InfluenzaA__ABU92626
augaagacuaucauugcuuugagcuacauucuaugucugguuuucgcucaaaaacuucccggaaaugacaacagcacggcaacgcugugccuugggcaccaugcaguaccaaacggaacgauagugaaaacaaucacgaaugaccaaauugaaguuacuaaugcuacugagcugguucagauuuccucaacagguggaauaugcgacaguccucaucagauccuugauggagaaaacugcacacuaauagaugcucuauugggagacccucagugugauggcuuccaaaauaagaaaugggaccuuuuuguugaacgcagcaaagccuacagcaacuguuacccuuaugaugugccggauuaugccucccuuaggucacuaguugccucauccggcacacuggaguuuaacaaugaaagcuucgauuggacuggagucacucagaauggaacaagcucugcuugcaaaaggagaucuaauaaaaguuucuuuaguagauugaauugguugacccacuuaaaauacaaauacccagcauugaacgugacuaugccaaacaaugaaaaauuugacaaauuguacauuugggggguucaccacccggguacggacagugaccaaaucagccuauaugcucaagcaucaggaagaaucacagucucuaccaaaagaagccaacaaacuguaaucccgaauaucggaucuagacccaggguaagggaugucuccagccgaauaagcaucuauuggacaauaguaaaaccgggagacauacuuuugauuaacagcacagggaaucuaauugcuccucggggcuacuucaaaauacgaagugggaaaagcucaauaaugagaucagaugcacccauuggcaaaugcaauucugaaugcaucacuccaaauggaagcauucccaaugacaaaccauuucaaaauguaaacaggaucacauauggggccugucccagauauguuaagcaaaacacucugaaauuggcaacagggaugcgaaauguaccagagaaacaaacuagaggcauauuuggcgcaaucgcggguuucauagaaaaugguugggagggaaugguggaugguugguacgguuucaggcaucaaaauucugagggcacaggacaagcagcagaucucaaaagcacucaagcagcaaucaaccaaaucaaugggaaacugaauagguuaaucgggaaaacaaacgagaaauuccaucagauugaaaaagaauucucggaaguagaaggaagaauucaggaccucgagaaauauguugaggacacuaaaauagaucucuggucauacaacgcggagcuucuuguugcccuggagaaccaacauacaauugaucuaacugacucagaaaugaacaaacuguuugaaagaacaaagaagcaacugagggaaaaugcugaggauaugggcaaugguuguuucaaaauauaccacaaaugugacaaugccugcauagggucaaucagaaauggaacuuaugaccaugauguguacagagaugaagcauuaaacaaccgguuccagaucaaagguguugagcugaagucaggauacaaagauuggauccuauggauuuccuuugccauaucauguuuuuugcuuuguguugcuuuguugggguucaucaugugggccugccagaaaggcaacauuaggugcaacauuugcauuuga

SEQ ID NO: 33794 - RNA, 1701 nt, Artificial Sequence
  derived and/or modified CDS sequence (wt) from hemagglutinin__InfluenzaA__ABU92627
augaagacuaucauugcuuugagcuacauucuauguaugguuuucgcucaaaaacuucccggaaaugacaacagcacggcaacgcugugccuugggcaccaugcaguaccaaacggaacgauagugaaaacaaucacgaaugaccaaauugaaguuacuaaugcuacugagcugguucagauuuccucaacaggugaaauaugcgacaguccccaucagauccuugauggagaaaacugcacacuaauagaugcucuauugggagacccucagugugauggcuuccaaaauaagaaaugggaccuuuuuguugaacgcagcaaagccuacagcaacuguuacccuuaugaugugccggauuaugccucccuuaggucacuaguugccucauccggcacacuggaguuuaacaaugaaagcuucgauuggacuggagucacucagaauggaacaagcucugcuugcaaaaggagaucugauaaaaguuucuuuaguagauugaauugguugacccacuuaaaauacaaauacccagcauugaacguaacuaugccaaacaaugaaaaauuugacaaauuguacauuugggggguucaccacccggguacggacagugaccaaaucagccuauaugcucaagcaucaggaagaaucacagucucuaccaaaagaagccaacaaacuguaaucccgaauaucggaucuagacccaggguaagggaugucuccagccgaauaagcaucuauuggacaauaguaaaaccgggagacauacuuuugauuaaccgcccagggaaucuaauugcuccucgggguuacuucaaaauacgaagugggaaaagcucaauaaugagaucagaugcacccauuggcaaaugcaauucugaaugcaucacuccaaauggaagcauucccaaugacaaaccauuucaaaauguaaacaggaucacauauggggccugucccagauauguuaagcaaaacacucugaaauuggcaacagggaugcgaaauguaccagagaaacaaacuagaggcauauuuggcgcaaucgcggguuucauagaaaaugguugggagggaaugguggacgguugguacgguuucaggcaucaaaauucugagggcacaggacaagcagcagaucucaaaagcacucaagcagcaaucaaccaaaucaaugggaaacugaauagguuaaucgggaaaacaaacgagaaauuccaucagauugaaaaagaauucucggaaguagaaggaagaauucaggaccucgagaaauauguugaggacacuaaaauagaucucuggucauacaacgcggagcuucuuguugcccuggagaaccaacauacaauugaucuaacugacucagaaaugaacaaacuguuugaaagaacaaagaagcaacugagggaaaaugcugaggauaugggcaaugguuguuucaaaauauaccacaaaugugacaaugccugcauagggucaaucagaaauggaacuuaugaccaugauguguacagagaugaagcauuaaacaaccgguuccagaucaaagguguugagcugaagucaggauacaaagauuggauccuauggauuuccuuugccauaucauguuuuuugcuuuguguugcuuuguugggguucaucaugugggccugccaaaaaggcaacauuaggugcaacauuugcauuuga

SEQ ID NO: 33795 - RNA, 1701 nt, Artificial Sequence; identical to SEQ ID NO: 33774
  derived and/or modified CDS sequence (wt) from hemagglutinin__InfluenzaA__ABU92628

SEQ ID NO: 33796 - RNA, 1701 nt, Artificial Sequence; identical to SEQ ID NO: 33792
  derived and/or modified CDS sequence (wt) from hemagglutinin__InfluenzaA__ABU92631

SEQ ID NO: 33797 - RNA, 1701 nt, Artificial Sequence
  derived and/or modified CDS sequence (wt) from hemagglutinin__InfluenzaA__ABU92632
augaagacuaucaucgcuuugagcuacauucuaugucugguuuucgcucaaaaacuucccggaaaugacaacagcacggcaacgcugugccuugggcaccaugcaguaccaaacggaacgauagugaaaacaaucacgaaugaccaaauugaaguuacuaaugcuacugagcugguucagaguuccucaacagguggaauaugcgacaguccucaucagauccuugauggagaaaacugcacacuaauagaugcucuauugggagacccucagugugauggcuuccaaaauaagaaaugggaccuuuuuguugaacgcagcaaagccuacagcaacuguuacccuuaugaugugccggauuaugccucccuuaggucacuaauugccucaucuggcacacuggaguuuaacaaugaaagcuucaauuggacuggaguaacucagaauggaacaagcucugcuugcaaaaggagaucuaauaaaaguuucuuuaguagauugaauugguugacccacuuaaaauacaaauacccagcauugaacgugacuaugccaaacaaugaaaaauuugacaaauuguacauuugggggguucaccacccggguacggacagugaccaaaucagccuauaugcucaagcaucaggaagaaucacagucucuaccaaaagaagccaacaaacuguaaucccgaauaucggauccagacccaggguaagggaugucuccagcagaauaagcaucuauuggacaauaguaaaaccgggagacauacuuuugauuaacagcacagggaaucuaauugcuccucgggguuacuucaaaauacgaagugggaaaagcucaauaaugagaucagaugcacccauuggcaaaugcaauucugaaugcaucacuccaaauggaagcauucccaaugacaaaccauuucaaaauguaaacaggaucacauauggggccugucccagauauguuaagcaaaacacucugaaauuggcaacagggaugcgaaauguaccagagaaacaaacuagaggcauauuuggcgcaaucgcggguuucauagaaaaugguugggagggaaugguggacgguugguacgguuucaggcaucuaaauucugagggcacaggacaagcagcagaucucaaaagcacucaagcagcaaucaaccaaaucaaugggaaacugaauagguuaaucgggaaaacaaacgagaaauuccaucagauugaaaaagaauucucagaaguagaagggagaauucaggaccuagagaaauauguugaggacacuaaaauagaucucuggucauacaacgcggagcuucuuguugcccuggagaaccaacauacaauugaucuaacugacucagaaaugaacaaacuguuugaaagaacaaagaagcaacugagagaaaaugcugaggauaugggcaaugguuguuucaaaauauaccacaaaugugacaaugccugcauagggucaaucagaaauggaacuuaugaccaugauguauacagagaugaagcauuaaauaaccgguuccagaucaaagguguugagcugaagucaggauacaaagauuggauccuauggauuuccuuugccauaucauguuuuuugcuuuguguugcuuuguugggguucaucaugugggccugccaaaaaggcaacauuaggugcaacauuugcauuuga

SEQ ID NO: 33798 - RNA, 1701 nt, Artificial Sequence
  derived and/or modified CDS sequence (wt) from hemagglutinin__InfluenzaA__ABU92635
augaagacuaucauugcuuugagcuacauucuaugucugguuuucgcucaaaaacuucccggaaaugacaacagcacggcaacgcugugccuugggcaccaugcaguaccaaacggaacgauagugaaaacaaucacgaaugaccaaauugaaguuacuaaugcuacugagcugguucagaguuccucaacagguggaauaugcgacaguccucaucagauccuugauggagaaaacugcacacuaauagaugcucuauugggagacccucagugugauggcuuccaaaauaagaaaugggaccuuuuuguugaacgcagcaaagccuacagcaacuguuacccuuaugaugugccggauuaugccucccuuaggucaauaguugccucauccggcacacuggaguuuaacaaugaaagcuucaacuggacuggagucacucagaauggaacaagcucugcuugcaaaaggaaaucuaauaaaaguuucuuuaguagauugaauugguugacccacuuaaaauacaaauacccagcauugaacgugacuaugccaaacaaugaaaaauuugacaaauuguacauuugggggguucaccacccggguacggacaaugaccaaaucagccuguaugcucaagcaucaggaagaaucacagucucuaccaaaagaagccaacaaacuguaaucccgaauaucggaucuagacccaggguaagggacgucuccagcagaauaagcaucuauuggacaauaguaaaaccgggagacauacuuuugauuaacagcacagguaaucuaauugcuccucgggguuacuucaaaauacgaagugggaaaagcucaauaaugagaucagaugcacccauuggcaaaugcaauucugaaugcaucacuccaaauggaagcauucccaaugacaaaccauuucaaaauguaaacaggaucacauauggggccugucccagauauguuaagcaaaacacucugaaauuggcaacagggaugcgaaauguaccagagaaacaaacuagaggcauauuuggcgcaaucgcggguuucauagaaaaugguugggagggaaugguggacgguugguacgguuucagacaucaaaauucugagggcacaggacaagcagcagaucucaaaagcacucaagcagcaaucaaccaaaucaaugggaaacugaauagguuaaucgggaaaacaaacgagaaauuccaucagauugaaaaagaauucucagaaguagaggggagaauucaggaccucgagaaauauguugaggacacuaaaauagaucucuggucauacaacgcggagcuucuuguugcccuggagaaccaacauacaauugaucuaacugacucagaaaugaacaaacuguuugaaagaacaaagaagcaacugagggaaaaugcugaggauaugggcaaugguuguuucaaaauauaccacaaaugugacaaugccugcauagggucaaucagaaauggaacuuaugaccaugauguauacagagaugaagcauuaaacaaccgguuccagaucaaagguguugagcugaagucaggauacaaagauuggauccuauggauuuccuuugccauaucauguuuuuugcuuuguguugcuuuguugggguucaucaugugggccugccaaaaaggcaacauuaggugcaacauuugcauuuga

SEQ ID NO: 33799 - RNA, 1701 nt, Artificial Sequence
  derived and/or modified CDS sequence (wt) from hemagglutinin__InfluenzaA__ABU92636
augaagacuaucauugcuuugagcuacauucuaugucugguuuucgcucaaaaacuucccggaaaugacaacagcacggcaacgcugugccuugggcaucaugcaguaccaaacggaacgauagugaaaacaaucacgaaugaccaaauugaaguuacuaaugcuacugagcugguucagaguuccucaacagguggaauaugcgacaguccucaucagauccuugauggagaaaacugcacacuaauagaugcucuauugggagacccucagugugauggcuuccaaaauaagaaaugggaccuuuuuguugaacgcagcaaagccuacagcaacuguuacccuuaugaugugccggauuaugccucccuuaggucacuaguugccucauccggcacacuggaguuuaacaaugaaagcuucaauuggacuggagucacucaaaauggaacaagcucugcuugcaaaaggagaucuaauaacaguuucuuuaguagacugaauugguugacccacuuaaaauucaaauacccagcauugaacgugacuaugccaaacaaugaaaaauuugacaaauuguacauuugggggguucaccacccggguacggacaaugaccaaaucuuccuguaugcucaagcaucaggaagaaucacagucucuaccaaaagaagccaacaaacuguaaucccgaauaucggaucuagacccagaguaaggaauauccccagcagaauaagcaucuauuggacaauaguaaaaccgggagacauacuuuugauuaacagcacagggaaucuaauugcuccuagggguuacuucaaaauacgaagugggaaaagcucaauaaugagaucagaugcacccauuggcaaaugcaauucugaaugcaucacuccaaauggaagcauucccaaugacaaaccauuucaaaauguaaacaggaucacauauggggccugucccagauauguuaagcaaaacacucugaaauuggcaacagggaugcgaaauguaccagagaaacaaacuagaggcauauuuggcgcaaucgcggguuucauagaaaaugguugggagggaaugguggaugguugguacgguuucaggcaucaaaauucugagggaauaggacaagcagcagaucucaaaagcacucaagcagcaaucaaucaaaucaaugggaagcugaauagguugaucgggaaaaccaacgagaaauuccaucagauugaaaaagaauucucagaaguagaagggagaauucaggaccucgagaaauauguugaggacacuaaaauagaucucuggucauacaacgcggagcuucuuguugcccuggagaaccaacauacaauugaucuaacugacucagaaaugaacaaacuguuugaaagaacaaagaagcaacugagggaaaaugcugaggauaugggcaaugguuguuucaaaauauaccacaaaugugacaaugccugcauaggaucaaucagaaauggaacuuaugaccaugauguauacagagaugaagcauuaaacaaccgguuccagaucaaaggcguugagcugaagucaggauacaaagauuggauccuauggauuuccuuugccauaucauguuuuuugcuuuguguugcuuuguugggguucaucaugugggccugccaaaaaggcaacauuaggugcaacauuugcauuuga

SEQ ID NO: 33800 - RNA, 1701 nt, Artificial Sequence
  derived and/or modified CDS sequence (wt) from hemagglutinin__InfluenzaA__ABU92637
augaagacuaucauugcuuugagcuacauucuaugucugguuuucgcucaaaaacuucccggaaaugacaacagcacggcaacgcugugccuugggcaccaugcaguaccaaacggaacgacagugaaaacaaucacgaaugaccaaauugaaguuacuaaugcuacugagcugguucagaguuccucaacagguggaauaugcgacaguccucaucagauccuugauggagaaaacugcacacuaauagaugcucuauugggagacccucagugugauggcuuccaaaauaagaaaugggaccuuuuuguugaacgcagcaaagccuacagcaacuguuacccuuaugaugugccggauuaugucucccuuaggucacuaguugccucauccggcacacuggaguuuaacaaugaaagcuucaauuggacuggagucacucaaaauggaacaagcucugcuugcaaaaggagaucuaauaacaguuucuuuaguagauugaauugguugacccauuuaaaauucaaauacccagcauugaacgugacuaugccaaacaaugaaaaauuugacaaauuguacauuugggggguucaccacccggguacggacaaugaccaaaucagccuauaugcucaagcaucaggaagaaucacagucucuaccaaaagaagccaacaaacuguaaucccgaauaucggaucuagacccaggguaagggauauccccagcagaauaagcaucuauuggacaauaguaaaaccgggagacauacuuuugauuaacagcacagggaaucuaauugcuccucgggguuacuucaaaauacgaagugggaaaagcucaauaaugagaucagaugcacccauuggcaaaugcaauucugaaugcaucacuccaaauggaagcauucccaaugacaaaccauuucaaaauguaaacaggaucacauauggggccugucccagauauguuaagcaaaacacucugaaauuggcaacagggaugcgaaauguaccagagaaacaaacuagaggcauauuuggcgcaaucgcggguuucauagaaaaugguugggagggaaugguggaugguugguacgguuucaggcaucaaaauucugagggaauaggacaagcagcagaucucaaaagcacucaagcagcaaucaaccaaaucaaugggaagcugaauagguugaucgggaaaaccaacgagaaauuccaucagauugaaaaagaauucucagaaguagaagggagaauucaggaccucgagaaauauguugaggacacuaaaauagaucucuggucauacaacgcggagcuucuuguugcccuggagaaccaacauacaauugaucuaacugacucagaaaugaacaaacuguuugaaagaacaaagaagcaacugagggaaaaugcugaggauaugggcaaugguuguuucaaaauauaccacaaaugugacaaugccugcauagggucaaucagaaauggaacuuaugaucaugauguauacagagaugaagcauuaaacaaccgguuccagaucaaagguguugagcugaagucaggauacaaagauuggauccuauggauuuccuuugccauaucauguuuuuugcuuuguguugcuuuguugggguucaucaugugggccugccaaaaaggcaacauuaggugcaacauuugcauuuga

SEQ ID NO: 33801 - RNA, 1701 nt, Artificial Sequence
  derived and/or modified CDS sequence (wt) from hemagglutinin__InfluenzaA__ABU92639
augaagacuaucauugcuuugagcuacauucuaugucugguuuucgcucaaaaacuucccggaaaugacaacagcacggcaacgcugugccuugggcaccaugcaguaccaaacggaacgauagugaaaacaaucacgaaugaccaaauugaaguuacuaaugcuacugagcugguucagauuuccucaacaggugaaauaugcgacaguccccaucagauccuugauggagaaaacugcacacuaauagaugcucuauugggagacccucagugugauggcuuccaaaauacgaaaugggaccuuuuuguugaacgcagcaaagccuacagcaacuguuacccuuaugaugugccggauuaugccucccuuaggucacuaguugccucauccggcacacuggaguuuaacaaugaaagcuucgauuggacuggagucacucagaauggaacaagcucugcuugcaaaaggagaucugauaaaaguuucuuuaguagauugaauugguugacccacuuaaaauacaaauacccagcauugaacguaacuaugccaaacaaugaaaaauuugacaaauuguacauuugggggguucaccacccggggacggacagugaccaaaucagccuauaugcucaagcaucaggaagaaucacagucucuaccaaaagaagccaacaaacuguaaucccgaauaucggaucuagacccaggguaagggaugucuccagccgaauaagcaucuauuggacaauaguaaaaccgggagacauacuuuugauuaacagcacagggaaucuaauugcuccucgggguuacuucaaaauacgaagugggaaaagcucaauaaugagaucagaugcacccauuggcaaaugcaauucugaaugcaucacuccaaauggaagcauucccaaugacaaaccauuucaaaauguaaacaggaucacauauggggccugucccagauauguuaagcaaaacacucugaaauuggcaacagggaugcgaaauguaccagagaaacaaacuagaggcauauuuggcgcaaucgcggguuucauagaaaaugguugggagggaaugguggacgguugguacgguuucagacaucaaaauucugagggcacaggacaagcagcagaucucaaaagcacucaagcagcaaucaaccaaaucaaugggaaacugaauagguuaaucgggaaaacaaacgagaaauuccaucagauugaaaaagaauucucggaaguagaaggaagaauucaggaccucgagaaauauauugaggacacuaaaauagaucucuggucauacaacgcggagcuucuuguugcccuggagaaccaacauacaauugaucuaacugacucagaaaugaacaaacuguuugaaagaacaaagaagcaacugagggaaaaugcugaggauaugggcaaugguuguuucaaaauauaccacaaaugugacaaugccugcauagggucaaucagaaauggaacuuaugaccaugauguguacagagaugaagcauuaaacaaccgguuccagaucaaagguguugagcugaagucaggauacaaagauuggauccuauggauuuccuuugccauaucauguuuuuugcuuuguguugcuuuguugggguucaucaugugggccugccaaaaaggcaacauuaggugcaacauuugcauuuga

SEQ ID NO: 33802 - RNA, 1701 nt, Artificial Sequence
  derived and/or modified CDS sequence (wt) from hemagglutinin__InfluenzaA__ABU92640
augaagacuaucauugcuuugagcuacauucuaugucugguuuucgcucaaaaacuucccggaaaugacaacagcacggcaacgcugugccuugggcaccaugcaguaccaaacggaacgauagugaaaacaaucacgaaugaccaaauugaaguuacuaaugcuacugagcugguucagaguuccucaacaggugaaauaugcgacaguccucaucagauccuugauggagaaaacugcacacuaauagaugcucuauugggagacccucagugugauggcuuccaaaauaagaaaugggaccuuuuuguugaacgcagcaaagccuacagcaacuguuacccuuaugaugugccggauuaugccucccuuaggucacuaguugccucauccggcacacuggaguuuaacaaugaaagcuucaauuggacuggagucacucaaaauggaacaagcucugcuugcaaaaggagaucuaauaacaguuucuuuaguagauugaauugguugacccacuuaaaauucaaauacccagcauugaacgugacuaugccaaacaaugaaaaauuugacaaauuguacauuugggggguucaccacccggguacggacaaugaccaaaucuuccuguaugcucaagcaucaggaagaaucacagucucuaccaaaagaagccaacaaacuguaaucccgaauaucggaucuagacccagaguaaggaauauccccagcagaauaagcaucuauuggacaauaguaaaaccgggagacauacuuuugauuaacagcacagggaaucuaauugcuccuagggguuacuucaaaauacgaagugggaaaagcucaauaaugagaucagaugcacccauuggcaaaugcaauucugaaugcaucacuccaaauggaagcauucccaaugacaaaccauuucaaaauguaaacaggaucacauauggggccugucccagauaugucaagcaaaacacucugaaauuggcaacagggaugcgaaauguaccagagaaacaaacuagaggcauauuuggcgcaaucgcggguuucauagaaaaugguugggagggaaugguggaugguugguacgguuucaggcaucaaaauucugagggaauaggacaagcagcagaucucaaaagcacucaagcagcaaucaaucaaaucaaugggaagcugaauagguugaucgggaaaaccaacgagaaauuccaucagauugaaaaagaauucucagaaguagaagggagaauucaggaccucgagaaauauguugaggacacuaaaauagaucucuggucauacaacgcggagcuucuuguugcccuggagaaccaacauacaauugaucuaacugauucagaaaugaacaaacuguuugaaagaacaaagaagcaacugagggaaaaugcugaggauaugggcaaugguuguuucaaaauauaccacaaaugugacaaugccugcauaggaucaaucagaaauggaacuuaugaccaugauguauacagagaugaagcauuaaacaaccgguuccagaucaaaggcguugagcugaagucaggauacaaagauuggauccuauggauuuccuuugccauaucauguuuuuugcuuugugcugcuuuguugggguucaucaugugggccugccaaaaaggcaacauuaggugcaacauuugcauuuga

SEQ ID NO: 33803 - RNA, 1701 nt, Artificial Sequence
  derived and/or modified CDS sequence (wt) from hemagglutinin__InfluenzaA__ABU92641
augaagacuaucauugcuuugagcuacauucuaugucugguuuucgcucaaaaacuucccggaaaugacaacagcacggcaacgcugugccuugggcaccaugcaguaccaaacggaacgauagugaaaacaaucacgaaugaccaaauugaaguuacuaaugcuacugagcugguucagaguuccucaacagguggaauaugcgacaguccucaucagauccuugauggagaaaacugcacacuaauagaugcucuauugggagacccucagugugauggcuuccaaaauaagaaaugggaccuuuuuguugaacgcagcaaagccuacagcaacuguuacccuuaugaugugccggauuaugccucccuuaggucacuaguugccucauccggcacacuggaguuuaacaaugaaagcuucaauuggacuggagucacucaaaauggaacaagcucugcuugcaaaaggaaaucuaauaacaguuucuuuaguagauugaauugguugacccacuuaaaauucaaauacccagcauugaacgugaccaugccaaacaaugaaaaauuugacaaauuguacauuugggggguucaccacccggguacggacaaugaccaaaucagccuauaugcucaagcuucaggaagaaucacagucucuaccaaaagaagccaacaaacuguaauuccgaauaucggaucuagacccaggguaagggauauccccagcagaauaagcaucuauuggacaauaguaaaaccgggagacauacuuuugauuaacagcacagggaaucuaauugcuccucgggguuacuucaaaauacgaagugggaaaagcucaauaaugagaucagaugcacccauuggcaaaugcaauucugaaugcaucacuccaaauggaagcauucccaaugacaaaccauuucaaaauguaaacaggaucacauauggggccugucccagauauguuaagcaaaacacucugaaauuggcaacagggaugcgaaauguaccagagaaacaaacuagaggcauauuuggcgcaaucgcggguuucauagaaaaugguugggagggaaugguggaugguugguacgguuucaggcaucaaaauucugagggaauaggacaagcagcagaucucaaaagcacucaagcagcaaucaaccaaaucaaugggaagcugaauagguugaucgggaaaaccaacgagaaauuccaucagauugaaaaagaauucucagaaguagaagggagaauucaggaccucgagaaauauguugaggacacuaaaauagaucucuggucauacaacgcagagcuucuuguugcccuggagaaccaacauacaauugaucuaaccgacucagaaaugaacaaacuguuugaaagaacaaagaagcaacugagggaaaaugcugaggauaugggcaaugguuguuucaaaauauaccacaaaugugacaaugccugcauagggucaaucagaaauggaacuuaugaccaugauguauacagagaugaagcauuaaacaaccgguuccagaucaaagguguugagcugaagucaggauacaaagauuggauccuauggauuuccuuugccauaucauguuuuuugcuuuguguugcuuuguugggguucaucaugugggccugccaaaaaggcaacauuaggugcaacauuugcauuuga

SEQ ID NO: 33804 - RNA, 1701 nt, Artificial Sequence
  derived and/or modified CDS sequence (wt) from hemagglutinin__InfluenzaA__ABU92642
augaagacuaucauugcuuugagcuacauucuaugucugguuuucgcucaaaaacuucccggaaaugacaacagcacggcaacgcugugccuugggcaccaugcaguaccaaacggaacgauagugaaaacaaucacgaaugaccaaauugaaguuacuaaugcuacugagcugguucagaguuccucaacagguggaauaugcgacaguccucaucagauccuugauggagaaaacugcacacuaauagaugcucuauugggagacccucagugugauggcuuccaaaauaagaaaugggaccuuuuuguugaacgcagcaaagccuacagcaacuguuacccuuaugaugugccggauuaugccucccuuaggucacuaguugccucauccggcacacuggaguuuaacaaugaaagcuucaauuggacuggagucacucaaaacggaacaagcucugcuugcaaaaggagaucuaauaacaguuucuuuaguagauugaauugguugacccacuuaaaauucaaauacccagcauugaacgugacuaugccaaacaaugaaaaauuugacaaauuguacauuugggggguucaccacccggguacggacaaugaccaaaucuuccuguaugcucaagcaucaggaagaaucauagucucuaccaaaagaagccaacaaacuguaaucccgaauaucggaucuagacccagaguaaggaauauccccagcagaauaagcaucuauuggacaauaguaaaaccgggagacauacuuuugauuaacagcacagggaaucuaauugcuccuagggguuacuucaaaauacgaagugggaaaagcucaauaaugagaucagaugcacccauuggcaaaugcaauucugaaugcaucacuccaaauggaagcauucccaaugacaaaccauuucaaaauguaaacaggaucacauacggggccugucccagauauguuaagcaaaacacucugaaauuggcaacagggaugcgaaauguaccagagaagcaaacuagaggcauauuuggcgcaaucgcggguuucauagaaaaugguugggagggaaugguggaugguugguacgguuucaggcaucaaaauucugagggaauaggacaagcagcagaucucaaaagcacucaagcagcaaucgaucaaaucaaugggaagcugaauagguugaucgggaaaaccaacgagaaauuccaucagauugaaaaagaauucucagaaguagaagggagaauucaggaccucgagaaauauguugaggacacuaaaauagaucucuggucauacaacgcggagcuucuuguugcccuggagaaccaacauacaauugaucuaacugacucagaaaugaacaaacuguuugaaaaaacaaagaagcaacugagggaaaaugcugaggauaugggcaaugguuguuucaaaauauaccacaaaugugacaaugccugcauaggaucaaucagaaauggaacuuaugaccaugauguauacagagaugaagcauuaaacaaccgguuccagaucaagggcguugagcugaagucaggauacaaagauuggauccuauggauuuccuuugccauaucauguuuuuugcuuuguguugcuuuguugggguucaucaugugggccugccaaaaaggcaacauuaggugcaacauuugcauuuga

SEQ ID NO: 33805 - RNA, 1701 nt, Artificial Sequence
  derived and/or modified CDS sequence (wt) from hemagglutinin__InfluenzaA__ABU92643
augaagacuaucauugcuuugagcuacauucuaugucugguuuucgcucaaaaacuucccggaaaugacaacagcacggcaacgcugugccuugggcaccaugcaguaccaaacggaacgauagugaaaacaaucacgaaugaccaaauugaaguuacuaaugcuacugagcugguucagauuuccucaacaggugaaauaugcgacaguccccaucagauccuugauggagaaaacugcacacuaauagaugcucuauugggagacccucagugugauggcuuccaaaauaagaaaugggaccuuuuuguugaacgcagcaaagccuacagcaacuguuacccuuaugaugugccggauuaugccucccuuaggucacuaguugccucauccggcacacuggaguuuaacaaugaaagcuucgauuggacuggagucacucagaauggaacaagcucugcuugcaaaagaagaucugauaaaaguuucuuuaguagauugaauugguugacccacuuaaaauacaaauacccagcauugaacguaacuaugccaaacaaugaaaaauuugacaaauuguacauuugggggguucaccacccggguacggacagugaccaaaucagccuauaugcucaagcaucaggaagaaucacagucucuaccaaaagaagccaacaaacuguaaucccgaauaucggaucuagacccaggguaagggaugucuccagccgaauaagcaucuauuggacaauaguaaaaccgggagacauacuuuugauuaacagcacagggaaucuaauugcuccucgggguuacuucaaaauacgaagugggaaaagcucaauaaugagaucagaugcacccauuggcaaaugcaauucugaaugcaucacuccaaauggaagcauucccaaugacaaaccauuucaaaauguaaacaggaucacauauggggccugucccagauauguuaagcaaaacacucugaaauuggcaacagggaugcgaaauguaccagagaaacaaacuagaggcauauuuggcgcaaucgcggguuucauagaaaaugguugggagggaaugguggacgguugguacgguuucaggcaucaaaauucugagggcacaggacaagcagcagaucucaaaagcacucaagcagcaaucaaccaaaucaaugggaaacugaauagguuaaucgggaaaacaaacgagaaauuccaucagauugaaaaagaauucucggaaguagaaggaagaauucaggaccucgagaaauauguugaggacacuaaaauagaucucuggucauacaacgcggagcuucuuguugcccuggagaaccaacauacaauugaucuaacugacucagaaaugaacaaacuguuugaaagaacaaagaagcaacugagggaaaaugcugaggauaugggcaaugguuguuucaaaauauaccacaaaugugacaaugccugcauagggucaaucagaaauggaacuuaugaccauaauguguacagagaugaagcauuaaacaaccgguuccagaucaaagguguugaguugaagucaggauacaaagauuggauccuauggauuuccuuugccauaucauguuuuuugcuuuguguugcuuuguugggguucaucaugugggccugccaaaaaggcaacauuaggugcaacauuugcauuuga

SEQ ID NO: 33806 - RNA, 1701 nt, Artificial Sequence
  derived and/or modified CDS sequence (wt) from hemagglutinin__InfluenzaA__ABU92645
augaagacuaucauugcuuugagcuacauucuaugucugguuuucgcucaaaaacuucccggaaaugacaacagcacggcaacgcugugccuugggcaccaugcaguaccaaacggaacgauagugaaaacaaucacgaaugaccaaauugagguuacuaaugcuacugagcugguucagaguuccucaacaggugaaauaugcgacaguccucaucagauccuugauggagaaaacugcacacuaauagaugcucuauugggagacccucagugugauggcuuccaaaauaagaaaugggaccuuuuuguugaacgcagcaaagccuacagcaacuguuacccuuaugaugugccggauuaugccucccuuaggucacuaguugccucauccggcacacuggaguuuaacaaugaaagcuucaauuggacuggagucacucaaaauggaacaagcucugcuugcaaaaggagaucuaauaacaguuucuuuaguagacugaauugguugacccacuuaaaauucaaauacccagcauugaacgugacuaugccaaacaaugaaaaauuugacaaauuguacauuugggggguucaccacccggguacggacaaugaccaaaucuuccuguaugcucaagcaucaggaagaaucacagucucuaccaaaagaagccaacaaacuguaaucccgaauaucggaucuagaccuagaguaaggaauauccccagcagaauaagcaucuauuggacaauaguaaaaccgggagacauacuuuugauuaacagcacagggaaucuaauugcuccuagggguuacuucaaaauacgaagugggaaaagcucaauaaugagaucagaugcacccauuggcaaaugcaauucugaaugcaucacuccaaauggaagcauucccaaugacaaaccauuucaaaauguaaacagaaucgcauauggggccugucccagauauguuaagcaaaacacucugaaauuggcaacagggaugagaaauguaccagagaaacaaacuagaggcauauuuggcgcaaucgcagguuucauagaaaaugguugggagggaaugguggaugguugguacgguuucaggcaucaaaauucugagggaauaggacaagcagcagaucucaaaagcacucaagcagcaaucaaucaaaucaaugggaagcugaauagguugaucgggaaaaccaacgagaaauuccaucagauugaaaaagaauucucagaaguagaagggagaauucaggaccucgagaaauauguugaggacacuaaaauagaucucuggucauacaacgcggagcuucuuguugcccuggagaaccaacauacaauugaucuaacugacucagaaaugaacaaacuguuugaaagaacaaagaagcaacugagggaaaaugcugaggauaugggcaaugguuguuucaaaauauaccacaaaugugacaaugccugcauaggaucaaucagaaauggaacuuaugaccaugauguauacagagaugaagcauuaaacaaccgguuccagaucaaaggcauugagcugaagucaggauacaaagauuggauccuauggauuuccuuugccauaucauguuuuuugcuuuguguuguuuuguugggguucaucaugugggccugccaaaaaggcaacauuaggugcaacauuugcauauga

SEQ ID NO: 33807 - RNA, 1701 nt, Artificial Sequence
  derived and/or modified CDS sequence (wt) from hemagglutinin__InfluenzaA__ABU92646
augaagacuaucauugcuuugagcuacauucuaugucugguuuucgcucaaaaacuucccggaaaugacaacagcacggcaacgcugugccuugggcaccaugcaguaccaaacggaacgauagugaaaacaaucacgaaugaccaaauugaaguuacuaaugcuacugagcugguucagaguuccucaacagguggaauaugcgacaguccucaucagauccuugauggagaaaacugcacacuaauagaugcucuauugggagacccucagugugauggcuuccaaaauaagaaaugggaccuuuuuguugaacgcagcaaagccuacagcaacuguuacccuuaugaugugccggauuaugccucccuuaggucacuaguugccucauccggcacacuggaguuuaacaaugaaagcuucaauuggacuggagucacucaaaauggaacaagcucugcuugcaaaaggagaucuaauaaaaguuucuuuaguagauugaauugguugacccacuuaaaauucaaauacccagcauugaacgugacuaugccaaacaaugaaaaauuugacaaauuguacauuugggggguucaccacccggguacggacaaugaccaaaucagccuauaugcucaagcaucaggaagaaucacagucucuaccaaaagaagccaacaaacuguaaucccgaauaucggaucuagacccaggguaagggauguccccagcagaauaagcaucuauuggacaauaguaaaaccgggagacauacuuuugauuaacagcacagggaaucuaauugcuccucgggguuacuucaaaauacgaagugggaaaagcucaauaaugagaucagaugcacccauuggcaaaugcaauucugaaugcaucacuccaaauggaagcauucccaaugacaaaccauuucaaaauguaaacaggaucacauauggggccugucccagauauguuaagcaaaacacucugaaauuggcaacagggaugcgaaauguaccagagaaacaaacuagaggcauauuuggcgcaaucgcggguuucauagaaaaugguugggagggaaugguggacgguugguacgguuucaggcaucaaaauucugagggaacaggacaagcagcagaucucaaaagcacucaagcagcaaucaaccaaaucaaugggaagcugaauagguugaucgggaaaacaaacgagaaauuccaucagauugaaaaagaauucucagaaguagaagggagaauucaggaccucgagaaauauguugaggacacuaaaauagaucucuggucauacaacgcggagcuucuuguugcccuggagaaccaacauacaauugaucuaacugacucagaaaugaacaaacuguuugaaagaacaaagaagcaacugagggaaaaugcugaggauaugggcaaugguuguuucaaaauauaccacaaaugugacaaugccugcauagggucaaucagaaauggaacuuaugaccaugauguauacagagaugaagcauuaaacaaccgguuccagaucaaagguguugagcugaagucaggauacaaagauuggauccuauggauuuccuuugccauaucauguuuuuugcuuuguguugcuuuguugggguucaucaugugggccugccaaaaaggcaacauuaggugcaacauuugcauuuga

SEQ ID NO: 33808 - RNA, 1701 nt, Artificial Sequence; identical to SEQ ID NO: 33773
  derived and/or modified CDS sequence (wt) from hemagglutinin__InfluenzaA__ABU92647

SEQ ID NO: 33809 - RNA, 1701 nt, Artificial Sequence
  derived and/or modified CDS sequence (wt) from hemagglutinin__InfluenzaA__ABU92648
augaagacuaucauugcuuugagcuacauucuaugucugguuuucgcucaaaaacuucccggaaaugacaacagcacggcaacgcugugccuugggcaccaugcaguaccaaacggaacgauagugaaaacaaucacgaaugaccaaauugaaguuacuaaugcuacugagcugguucagauuuccucaacaggugaaauaugcgacaguccccaucagauccuugauggagaaaacugcacacuaauagaugcucuauugggagacccucagugugauggcuuccaaaauaagaaaugggaccuuuuuguugaacgcagcaaagccuacagcaacuguuacccuuaugaugugccggauuaugccucccuuaggucacuaguugccucauccggcacacuggaguuuaacaaugaaagcuucaauuggacuggagucacucagaauggaacaagcucugcuugcaaaaggagaucugauaaaaguuucuuuaguagauugaauugguugacccacuuaaaauacaaauacccagcauugaacguaacuaugccaaacaaugaaaaauuugacaaauuguacauuugggggguucaccacccggguacggacagugaccaaaucagccuauaugcucaagcaucaggaagaaucacagucucuaccaaaagaagccaacaaacuguaaucccgaauaucggaucuagacccaggguaagggaugucuccagccgaauaagcaucuauuggacaauaguaaaaccgggagacauacuuuugauuaacagcacagggaaucuaauugcuccucgggguuacuucaaaauacgaagugggaaaagcucaauaaugagaucagaugcacccauuggcaaaugcaauucugaaugcaucacuccaaauggaagcauucccaaugacaaaccauuucaaaauguaaacaggaucacauauggggccugucccagauauguuaagcaaaacacucugaaauuggcaacagggaugcgaaauguaccagagaaacaaacuagaggcauauuuggcgcaaucgcggguuucauagaaaaugguugggagggaaugguggacgguugguacgguuucaggcaucaaaauucugagggcacaggacaagcagcagaucucaaaagcacucaagcagcaaucaaccaaaucaaugggaaacugaauagguuaaucgggaaaacaaacgagaaauuccaucagauugaaaaagaauucucggaaguagaaggaagaauucaggaccucgagaaauauguugaggacacuaaaauagaucucuggucauacaacgcggagcuucuuguugcccuggagaaccaacauacaauugaucuaacugacucagaaaugaacaaacuguuugaaagaacaaagaagcaacugagggaaaaugcugaggauaugggcaaugguuguuucaaaauauaccacaaaugugacaaugccugcauagggucaaucagaaauggaacuuaugaccaugauguguacagagaugaagcauuaaacaaccgguuccagaucaaagguguugagcugaagucaggauacaaagauuggauccuauggauuuccuuugccauaucauguuuuuugcuuuguguugcuuuguugggguucaucaugugggccugccaaaaaggcaacauuaggugcaacauuugcauuuga

SEQ ID NO: 33810 - RNA, 1701 nt, Artificial Sequence
  derived and/or modified CDS sequence (wt) from hemagglutinin__InfluenzaA__ABU92649
augaagacuaucauugcuuugagcuacauucuaugucugguuuucgcucaaaaacuucccggaaaugacaacagcacggcaacgcugugccuugggcaccaugcaguaccaaacggaacgauagugaaaacaaucacgaaugaccaaauugaaguuacuaaugcuacugagcugguucagauuuccucaacagguggaauaugcgacaguccucaucagauccuugauggagaaaacugcacacuaauagaugcucuauugggagacccucagugugauggcuuccaaaauaagaaaugggaccuuuuuguugaacgcagcaaagccuacagcaacuguuacccuuaugaugugccggauuaugccucccuuaggucacuaguugccucauccggcacacuggaguuuaacaaugaaagcuucgauuggacuggagucacucagaauggaacaagcucugcuugcaaaaggagaucuaauaaaaguuucuuuaguagauugaauugguugacccacuuaaaauacaaauacccagcauugaacgugacuaugccaaacaaugaaaaauuugacaaauuguacauuugggggguucaccacccggguacggacagugaccaaaucagccuauaugcucaagcaucaggaagaaucacagucucuaccaaaagaagccaacaaacuguaaucccgaauaucggaucuagacccaggguaagggaugucuccagccgaauaagcaucuauuggacaauaguaaaaccgggagacauacuuuugauuaacagcacagggaaucuaauugcuccucgggguuacuucaaaauacgaagugggaaaagcucaauaaugagaucagaugcacccauuggcaaaugcaauucugaaugcaucacuccaaauggaagcauucccaaugacaagccauuucaaaacguaaacaggaucacauauggggccugucccagauauguuaagcaaaacacucugaaauuggcaacagggaugcgaaauguaccagagaaacaaacuagaggcauauuuggcgcaaucgcggguuucauagaaaaugguugggagggaaugguggacgguugguacgguuucaggcaucaaaauucugagggcacaggacaagcagcagaucucaaaagcacucaagcagcaaucaaccaaaucaaugggaaacugaauagguuaaucgggaaaacaaaugagaaauuccaucagauugaaaaagaauucucggaaguagaaggaagaauucaggaccucgagaaauauguugaggacacuaaaauagaucucuggucauacaacgcggagcuucuuguugcccuggagaaccaacauacaauugaucuaacugacucagaaaugaacaaacuguuugaaagaacaaagaagcaacugagggaaaaugcugaggauaugggcaaugguuguuucaaaauauaccacaaaugugacaaugccugcauagggucaaucagaaauggaacuuaugaccaugauguguacagagaugaagcauuaaacaaccgguuccagaucaaagguguugagcugaagucaggauacaaagauuggauccuauggauuuccuuugccauaucauguuuuuugcuuuguguugcuuuguugggguucaucaugugggccugucagaaaggcaacauuaggugcaacauuugcauuuga

SEQ ID NO: 33811 - RNA, 1701 nt, Artificial Sequence
  derived and/or modified CDS sequence (wt) from hemagglutinin__InfluenzaA__ABU92650
augaagacuaucauugcuuugagcuacauucuaugucugguuuucgcucaaaaacuucccggaaaugacaacagcacggcaacgcugugccuugggcaccaugcaguaccaaacggaacgauagugaaaacaaucacgaaugaccaaauugaaguuacuaaugcuacugagcugguucagauuuccucaacaggugaaauaugcgacaguccccaucagauccuugauggagaaaacugcacacuaauagaugcucuauugggagacccucagugugauggcuuccaaaauaagaaaugggaccuuuuuguugaacgcagcaaagccuacagcaacuguuacccuuaugaugugccggauuaugccucccuuaggucacuaguugccucauccggcacacuggaguuuaacaaugaaagcuucgauuggacuggagucacucagaauggaacaagcucugcuugcaaaaggagaucugauaaaaguuucuuuaguagauugaauugguugacccacuuaaaauacaaauacccagcauugaacguaacuaugccaaacaaugaaaaauuugacaaauuguacauuugggggguucaccacccggguacggacagugaccaaaucagccuauaugcucaagcaucaggaagaaucacagucucuaccaaaagaagccaacaaacuguaaucccgaauaucggaucuagacccaggguaagggaugucuccagccgaauaagcaucuauuggacaauaguaaaaccgggagacauacuuuugauuaacagcacagggaaucuaauugcuccucgggguuacuucaaaauacgaagugggaaaagcucaauaaugagaucagaugcacccauuggcaaaugcaauucugaaugcaucacuccaaauggaagcauucccaaugacaaaccauuucaaaauguaaacaggaucacauauggggccugucccagauauguuaagcaaaacacucugaaauuggcaacagggaugcgaaauguaccagagaaacaaacuagaggcauauuuggcgcaaucgcggguuucauagaaaaugguugggagggaaugguggacgguugguacgguuucaggcaccaaaauucugagggcacaggacaagcagcagaucucaaaagcacucaagcagcaaucaaccaaaucaaugggaaacugaauagguuaaucgggaaaacaaacgagaaauuccaucagauugaaaaagaauucucggaaguagaaggaagaauucaggaccucgagaaauauguugaggacacuaaaauagaucucuggucauacaacgcggagcuucuuguugcccuggagaaccaacauacaauugaucuaacugacucagaaaugaacaaacuguuugaaagaacaaagaagcaacugagggaaaaugcugaggauaugggcaaugguuguuucaaaauauaccacaaaugugacaaugccugcauagggucaaucagaaauggaacuuaugaccaugauguguacagagaugaagcauuaaacaaccgguuccagaucaaagguguugagcugaagucaggauacaaagauuggauccuauggauuuccuuugccauaucauguuuuuugcuuuguguugcuuuguugggguucaucaugugggccugccaaaaaggcaacauuaggugcaacauuugcauuuga

SEQ ID NO: 33812 - RNA, 1701 nt, Artificial Sequence
  derived and/or modified CDS sequence (wt) from hemagglutinin__InfluenzaA__ABU92651
augaagacuaucauugcuuugagcuacauucuaugucugguuuucgcucaaaaacuucccggaaaugacaacagcacggcaacgcugugccuugggcaccaugcaguaccaaacggaacgauagugaaaaccaucacgaaugaccaaauugaaguuacuaaugcuacugagcugguucagauuuccucaacaggugaaauaugcgacaguccccaucagauccuugauggagaaaacugcacacuaauagaugcucuauugggagacccucagugugauggcuuccaaaauaagaaaugggaccuuuuuguugaacgcagcaaagccuacagcaacuguuacccuuaugaugugccggauuaugccucccuuaggucacuaguugccucauccggcacacuggaguuuuacaaugaaagcuucgauuggacuggagucacucagaauggaacaagcucugcuugcaaaaggagaucugauaaaaguuucuuuaguagauugaauugguugacccacuuaaaauacaaauacccagcauuaaacguaacuaugccaaacaaugaaaaauuugacaaauuguacauuugggggguucaccacccggguacggacagugaccaaaucagccuauaugcucaagcaucaggaagaaucacagucucuaccaaaagaagccaacaaacuguaaucccgaauaucggaucuagacccaggguaagggaugucuccagccgaauaagcaucuauuggacaauaguaaaaccgggagacauacuuuugauuaacagcacagggaaucuaauugcuccucgggguuacuucaaaauacgaagugggaaaagcucaauaaugagaucagaugcacccauuggcaaaugcaauucugaaugcaucacuccaaauggaagcauucccaaugacaaaccauuucaaaauguaaacaggaucacauauggggccugucccagauauguuaagcaaaacacucugaaauuggcaacagggaugcgaaauguaccagagaaacaaacuagaggcauauuuggcgcaaucgcggguuucauagaaaaugguugggagggaaugguggacgguugguacgguuucaggcaucaaaauucugagggcacaggacaagcagcagaucucaaaagcacucaagcagcaaucaaccaaaucaaugggaaacugaauagguuaaucgggaaaacaaacgagaaauuccaucagauugaaaaagaauucucggaaguagaaggaagaauucaggaccucgagaaauauguugaggacacuaaaauagaucucuggucauacaacgcggagcuucuuguugcccuggagaaccaacauacaauugaucuaacugacucagaaaugaacaaacuguuugaaagaacaaagaagcaacugagggaaaaugcugaggauaugggcaaugguuguuucaaaauauaccacaaaugugacaaugccugcauagggucaaucagaaauggaacuuaugaccaugauguguacagagaugaagcauuaaacaaccgguuccagaucaaagguguugagcucaagucaggauacaaagauuggauccuauggauuuccuuugccauaucauguuuuuugcuuuguguugcuuugcugggguucaucaugugggccugccaaaaaggcaacauuaggugcaacauuugcauuuga

SEQ ID NO: 33813 - RNA, 1701 nt, Artificial Sequence
  derived and/or modified CDS sequence (wt) from hemagglutinin__InfluenzaA__ABU92652
augaagacuaucauugcuuugagcuacauucuaugucugguuuucgcucaaaaacuucccggaaaugacaacagcacggcaacgcugugccuugggcaccaugcaguaccaaacggaacgauagugaaaacaaucacgaaugaccaaauugaaguuacuaaugcuacugagcugguacagaguuccucaacagguggaauaugcgacaguccucaucagauccuugauggagaaaacugcacacuaauagaugcucuauugggagacccucagugugauggcuuccaaaauaagaaaugggaccuuuuuguugaacgcagcaaagccuacagcaacuguuacccuuaugaugugccggauuaugccucccuuaggucacuaguugccucauccggcacacuggaguuuaacaaugaaagcuucgauuggacuggagucacucagaauggaacaagcucugcuugcaaaaggagaucuaauaaaaguuucuuuaguagauugaauugguugacccacuuaaaauacaaauacccagcauugaacgugacuaugccaaacaaugaaaaauuugacaaauuguacauuugggggguucaccacccggguacagacagugaccaaaucagccuauaugcucaagcaucaggaagaaucacagucucuaccaaaagaagccaacaaacuguaaucccgaauaucggaucuagacccaggguaagggaugucucuagccgaauaagcaucuauuggacaauaguaaaaccgggagacauacuuuugauuaacagcacagggaaucuaauugcuccucgggguuacuucaaaauacgaagugggaaaagcucaauaaugagaucagaugcacccauuggcaaaugcaauuccgaaugcaucacuccaaauggaagcauucccaaugacaaaccauuucaaaauguaaacaggaucacauauggggccugucccagauauguuaagcaaaacacuuugaaauuggcaacagggaugcgaaauguaccagagaaacaaacuagaggcauauuuggcgcaaucgcgggcuucauagaaaaugguugggagggaaugguggacgguugguacgguuucaggcaucaaaauucugagggcacaggacaagcagcagaucucaaaagcacucaagcagcaaucaaccaaaucaaugggaaacugaauagguuaaucgggaaaacaaacgagaaauuccaucagauugaaaaagaauucucagaaguagaagggagaauucaggaccucgagaaauauguugaggacacuaaaauagaucucuggucauacaacgcggagcuucuuguugcccuggagaaccaacauacaauugaucuaacugacucagaaaugaacaaacuguuugaaagaacaaagaagcaacugagggaaaaugcugaggauauaggcaaugguuguuucaaaauauaccacaaaugugacaaugccugcauagggucaaucagaaauggaacuuaugaccaugauguguacagagaugaagcauuaaacaaccgguuccagaucaaagguguugagcugaagucaggauacaaagauuggauccuauggauuuccuuugccauaucauguuuuuugcuuuguguugcuuuguugggguucaucaugugggccugccaaaaaggcaacauuaggugcaacauuugcauuuga

SEQ ID NO: 33814 - RNA, 1701 nt, Artificial Sequence; identical to SEQ ID NO: 33774
  derived and/or modified CDS sequence (wt) from hemagglutinin__InfluenzaA__ABU92653

SEQ ID NO: 33815 - RNA, 1701 nt, Artificial Sequence
  derived and/or modified CDS sequence (wt) from hemagglutinin__InfluenzaA__ABU92654
augaagacuaucauugcuuugagcuacauucuaugucugguuuucgcucaaaaacuucccggaaaugacaacagcacggcaacacugugccuugggcaccaugcaguaccaaacggaacgauagugaaaacaaucacgaaugaccaaauugaaguuacuaaugcuacugagcugguucagaguuccucaacagguggaauaugcgacaguccucaucagauccuugauggagaaaacugcacacuaauagaugcucuauugggagacccucagugugauggcuuccaaaauaagaaaugggaccuuuuuguugaacgcagcaaagccuacagcaacuguuacccuuaugaugugccggauuaugccucccuuaggucacuaguugccucauccggcacacuggaguuuaacaaugaaagcuucaauuggacuggagucacucaaaauggaacaagcucugcuugcaaaaggagaucuaauaaaaguuucuuuaguagauugaauugguugacccacuuaaaauucaaauacccagcauugaacgugacuaugccaaacaaugaaaaauuugacaaauuguacauuugggggguucaccacccggguacggacaaugaccaaaucagccuauaugcucaagcaucaggaaaaaucacagucucuaccaaaagaagccaacaaacuguaaucccgaauaucggaucuagacccaggguaagggauguccccagcagaauaagcaucuauuggacaauaguaaaaccgggagacauacuuuugauuaacagcacagggaaucuaauugcuccucgggguuacuucaaaauacgaagugggaaaagcucaauaaugagaucagaugcacccauuggcaaaugcaauucugaaugcaucacuccaaauggaagcauucucaaugacaaaccauuucaaaauguaaacaggaucacauauggggccugucccagauauguuaagcaaaacacucugaaauuggcaacagggaugcgaaauguaccagagaaacaaacuagaggcauauuuggcgcaaucgcggguuucauagaaaaugguugggagggaaugguggacgguugguacgguuucaggcaucaaaaugcugagggaacaggacaagcagcagaucucaaaagcacucaagcagcaaucaaccaaaucaaugggaagcugaauagguugaucgggaaaacaaacgagaaauuccaucagauugaaaaagaauucucagaaguagaaggaagaauucaggaccucgagaaauauguugaggacacuaaaauagaucucuggucauacaacgcggagcuucuuguugcccuggagaaccaacauacaauugaucuaacugacucagaaaugaacaaacuguuugaaagaacaaagaagcaacugagggaaaaugcugaggauaugggcaaugguuguuucaaaauauaccacaaaugugacaaugccugcauagggucaaucagaaauggaacuuaugaccaugauguauacagagaugaagcauuaaacaaccgguuccagaucaaagguguugagcugaagucaggauacaaagauuggauccuauggauuuccuuugccauaucauguuuuuugcuuuguguugcuuuguugggguucaucaugugggccugccaaaaaggcaacauuaggugcaacauuugcauuuga

SEQ ID NO: 33816 - RNA, 1701 nt, Artificial Sequence
  derived and/or modified CDS sequence (wt) from hemagglutinin__InfluenzaA__ABU92655
augaagacuaucauugcuuugagcuacauucuaugucugguuuucgcucaaaaacuucccggaaaugacaacagcacggcaacacugugccuugggcaccaugcaguaccaaacggaacgauagugaaaacaaucacgaaugaccaaauugaaguuacuaaugcuacugagcugguucagaguuccucaacagguggaauaugcgacaguccucaucagauccuugauggagaaaacugcacacuaauagaugcucuauugggagacccucagugugauggcuuccaaaauaagaaaugggaccuuuuuguugaacgcagcaaagccuacagcaacuguuacccuuaugaugugccggauuaugccucccuuaggucacuaguugccucauccggcacacuggaguuuaacaaugaaagcuucaauuggacuggagucacucaaaauggaacaagcucugcuugcaaaaggagaucuaauaaaaguuucuuuaguagauugaauugguugacccacuuaaaauucaaauacccagcauugaacgugacuaugccaaacaaugaaaaauuugacaaauuguacauuugggggguucaccacccggguacggacaaugaccaaaucagccuauaugcucaagcaucaggaagaaucacagucucuaccaaaagaagccaacaaacuguaaucccgaauaucggaucuagacccaggguaagggauguccccagcagaauaagcaucuauuggacaauaguaaaaccgggagacauacuuuugauuaacagcacagggaaucuaauugcuccucgggguuacuucaaaauacgaagugggaaaagcucaauaaugagaucagaugcacccauuggcaaaugcaauucugaaugcaucacuccaaauggaagcauucccaaugacaaaccauuucaaaauguaaacaggaucacauauggggccugucccagauauguuaagcaaaacacucugaaauuggcaacagggaugcgaaauguaccagagaaacaaacuagaggcauauuuggcgcaaucgcggguuucauagaaaaugguugggagggaaugguggacgguugguacgguuucaggcaucaaaaugcugagggaacaggacaagcagcagaucucaaaagcacucaagcagcaaucaaccaaaucaaugggaagcugaauagguugaucgggaaaacaaacgagaaauuccaucagauugaaaaagaauucucagaaguagaaggaagaauucaggaccucgagaaauauguugaggacacuaaaauagaucucuggucauacaacgcggagcuucuuguugcccuggagaaccaacauacaauugaucuaacugacucagaaaugaacaaacuguuugaaagaacaaagaagcaacugagggaaaaugcugaggauaugggcaaugguuguuucaaaauauaccacaaaugugacaaugccugcauagggucaaucagaaauggaacuuaugaccaugauguauacagagaugaagcauuaaacaaccgguuccagaucaaagguguugagcugaaaucaggauacaaagauuggauccuauggauuuccuuugccauaucauguuuuuugcuuuguguugcuuuguugggguucaucaugugggccugccaaaaaggcaacauuaggugcaacauuugcauuuga

SEQ ID NO: 33817 - RNA, 1701 nt, Artificial Sequence
  derived and/or modified CDS sequence (wt) from hemagglutinin__InfluenzaA__ABU92656
augaagacuaucauugcuuugagcuacauucuaugucugguuuucgcucaaaaacuucccggaaaugacaacagcacggcaacgcugugccuugggcaccaugcaguaccaaacggaacgauagugaaaacaaucacgaaugaccaaauugaaguuacuaaugcuacugagcugguucagauuuccucaacaggugaaauaugcgacaguccucaucagauccuugauggagaaaacugcacacuaauagaugcucuauugggagacccucagugugauggcuuccaaaauaagaaaugggaccuuuuuguugaacgcagcaaagccuacagcaacuguuacccuuaugaugugccggauuaugccucccuuaggucacuaguugccucauccggcacacuggaguuuaacaaugaaagcuucgauuggacuggagucacucagaauggaacaagcucugcuugcaaaaggagaucugauaaaaguuucuuuaguagauugaauugguugacccacuuaaaauacaaauacccagcauugaacguaacuaugccaaacaaugaaaaauuugacaaauuguacauuugggggguucaccacccggguacggacagugaccaaaucagccuauaugcucaagcaucaggaagaaucacagucucuaccaaaagaagccaacaaacuguaaucccgaauaucggaucuagacccaggguaagggaugucuccagccgaauaagcaucuauuggacaauaguaaaaccgggagacauacuuuugauuaacagcacagggaaucuaauugcuccucgggguuacuucaaaauacgaagugggaaaagcucaauaaugagaucagaugcacccauuggcaaaugcaauucugaaugcaucacuccaaauggaagcauucccaaugacaaaccauuucaaaauguaaacaggaucacauauggggccugucccagauauguuaagcaaaacacucugaaauuggcaacagggaugcgaaauguaccagagaaacaaacuagaggcauauuuggcgcaaucgcggguuucauagaaaaugguugggagggaaugguggacgguugguacgguuucaggcaucaaaauucugagggcacaggacaagcagcagaucucaaaagcacucaagcagcaaucaaccaaaucaaugggaaacugaauagguuaaucgggaaaacaaacgagaaauuccaucagauugaaaaagaauucucggaaguagaaggaagaauucaggaccucgagaaauauguugaggacacuaaaauagaucucuggucauacaacgcggagcuucuuguugcccuggagaaccaacauacaauugaucuaacugacucagaaaugaacaaacuguuugaaagaacaaagaagcaacugagggaaaaugcugaggauaugggcaaugguuguuucaaaauauaccacaaaugugacaaugccugcauagggucaaucagaaauggaacuuaugaccaugauguguacagagaugaagcauuaaacaaccgguuccagaucaaagguguugaguugaagucaggauacaaagauuggauccuauggauuuccuuugccauaucauguuuuuugcuuuguguugcuuuguugggguucaucaugugggccugccaaaaaggcaacauuaggugcaacauuugcauuuga

SEQ ID NO: 33818 - RNA, 1701 nt, Artificial Sequence
  derived and/or modified CDS sequence (wt) from hemagglutinin__InfluenzaA__ABU92657
augaagacuaucauugcuuugagcuacauucuaugucugguuuucgcucaaaaacuucccggaaaugacaacagcacggcaacgcugugccuugggcaccaugcaguaccaaacggaacgauagugaaaacaaucacgaaugaccaaauugaaguuacuaaugcuacugagcugguucagaguuccucaacagguggaauaugcgacaguccucaucagauccuugauggagaaaacugcacacuaauagaugcucuauugggagacccucagugugauggcuuccaaaauaagaaaugggaccuuuuuguugaacgcagcaaagccuacagcaacuguuacccuuaugaugugccggauuaugccucccuuaggucacuaauugccucauccggcacacuggaguuuaacaaugaaagcuucaauuggacuggagucacucaaaauggaacaagcucugcuugcaaaaggagaucuaauagcaguuucuuuaguagauugaauugguugacccacuuaaaauucaaauacccagcauugaacgugacuaugccaaacaaugaagaauuugacaaauuguacauuugggggguucaccacccggguacauacaaugaccaaaucagccuauaugcucaagcaucaggaagaaucacagucucuaccaaaagaagccaacaaacuguaaucccgaauaucgggucuagacccaggguaagggauauccccagcagaauaagcaucuauuggacaauaguaaaaccgggagacauacuuuugauuaacagcacagggaaucuaauugcuccucgggguuacuucaaaauacgaagugggaaaagcucaauaaugagaucagaugcacccauuggaaaaugcaauucugaaugcaucacuccaaauggaagcauucccaaugacaaaccauuucaaaauguaaacaggaucacauauggggccugucccagauauguuaagcaaaacacucugaaauuggcaacagggaugcgaaauguaccagagaaacaaacuagaggcauauuuggcgcaaucgcggguuucauagaaaaugguugggagggaaugguggaugguugguacgguuucaggcaucaaaauucugagggaauaggacaagcagcagaucucaaaagcacucaagcagcaaucgaccaaaucaaugggaagcugaauagguugaucgggaaaaccaacgagaaauuccaucagauugaaaaagaauucucagaaguagaagggagaauucaggaccucgagaaauauguugaggacacuaaaauagaucucuggucauacaacgcggagcuucuuguugcccuggagaaccaacauacaauugaucuaacugacucagaaaugaacaaacuguuugaaagaacaaagaagcaacugagggaaaaugcugaggauaugggcaaugguuguuucaaaauauaccacaaaugugacaaugccugcauagggucaaucagaaauggaacuuaugaccaugauguauacagagaugaagcauuaaacaaccgguuccagaucaaagguguugagcugaagucaggauacaaagauuggauccuauggauuuccuuugccauaucauguuuuuugcuuuguguugcuuuguugggguucaucaugugggccugccaaaaaggcaacauuaggugcaacauuugcauuuga

SEQ ID NO: 33819 - RNA, 1701 nt, Artificial Sequence
  derived and/or modified CDS sequence (wt) from hemagglutinin__InfluenzaA__ABU92658
augaagacuaucauugcuuugagcuacauucuaugucugguuuucgcucaaaaacuucccggaaaugacaacagcacggcaacgcugugccuugggcaccaugcaguaccaaacggaacgauagugaaaacaaucacgaaugaccaaauugaaguuacuaaugcuacugagcugguucagauuuccucaacaggugaaauaugcgacaguccccaucagauccuugauggagaaaacugcacacuaauagaugcucuauugggagacccucagugugauggcuuccaaaauaagaaaugggaccuuuuuguugaacgcagcaaagccuacagcaacuguuacccuuaugaugugccggauuaugccucccuuaggucacuaguugccucauccggcacacuggaguuuaacaaugaaagcuucgauuggacuggagucacucagaauggaacaagcucugcuugcaaaaggagaucugauaaaaguuucuuuaguagauugaauugguugacccacuuaaaauacaaauacccagcauugaacguaacuaugccaaacaaugaaaaauuugacaaauuguacauuugggggguucaccacccggguacggacagugaccaaaucagccuauaugcucaagcaucaggaagaaucacagucucuaccaaaagaagccaacaaacuguaaucccgaauaucggaucuagacccaggguaagggaugucuccagccgaauaagcaucuauuggacaauaguaaaaccgggagacauacuuuugauuaacagcacagggaaucuaauugcuccucgggguuacuucaaaauacgaagugggaaaagcucaauaaugagaucagaugcacccauuggcaaaugcaauucugaaugcaucacuccaaauggaagcauucccaaugacaaaccauuucaaaauguaaacaggaucacauauggggccugucccagauauguuaagcaaaacacucugaaauuggcaacagggaugcgaaauguaccagagaaacaaacuagaggcauauuuggcgcaaucgcggguuucauagaaaaugguugggagggaaugguggacgguugguacgguuucaggcaucaaaauucugagggcacaggacaagcagcagaucucaaaagcacucaagcagcaaucaaccaaaucaaugggaaacugaauagguuaaucgggaaaacaaacgagaaauuccaucagauugaaaaagaauucucggaaguagaaggaagaauucaggaccucgagaaauauguugaggacacuaaaauagaucucuggucauacaacgcggagcuucuuguugcccuggagaaccaacauacaauugaucuaacugacucagaaaugaacaaacuguuugaaagaacaaagaagcaacugagggaaaaugcugaggauaugggcaaugguuguuucaaaauauaccacaaaugugacaaugccugcauagggucaaucagaaauggaacuuaugaccaugauguguacagagaugaagcauuaaacaaccgguuccaaaucaaagguguugaguugaagucaggauacaaagauuggauccuauggauuuccuuugccauaucauguuuuuugcuuuguguugcuuuguugggguucaucaugugggccugccaaaaaggcaacauuaggugcaacauuugcauuuga

SEQ ID NO: 33820 - RNA, 1701 nt, Artificial Sequence
  derived and/or modified CDS sequence (wt) from hemagglutinin__InfluenzaA__ABU92659
augaagacuaucauugcuuugagcuacauucuaugucugguuuucgcucaaaaacuucccggaaaugacaacagcacggcaacgcugugccuugggcaccaugcaguaccaaacggaacgauagugaaaacaaucacgaaugaccaaauugaaguuacuaaugcuacugagcugguucagaguuccucaacagguggaauaugcgacaguccucaucagauccuugauggagaaaacugcacacuaauagaugcucuauugggagacccucagugugauggcuuccaaaauaagaaaugggaccuuuuuguugaacgcagcaaagccuacagcaacuguuacccuuaugaugugccggauuaugccucccuuaggucacuaauugccucauccggcacacuggaguuuaacaaugaaagcuucaauuggacuggagucacucaaaauggaacaagcucugcuugcaaaaggagaucuaauagcaguuucuuuaguagauugaauugguugacccacuuaaaauucaaauacccagcauugaacgugacuaugccaaacaaugaagaauuugacaaauuauacauuugggggguucaccacccggguacauacaaugaccaaaucagccuauaugcucaagcaucaggaagaaucacagucucuaccaaaagaagccaacaaacuguaaucccgaauaucgggucuagacccaggguaagggauauccccagcagaauaagcaucuauuggacaauaguaaaaccgggagacauacuuuugauuaacagcacagggaaucuaauugcuccucgggguuacuucaaaauacgaagugggaaaagcucaauaaugagaucagaugcacccauuggcaaaugcaauucugaaugcaucacuccaaauggaagcauucccaaugacaaaccauuucaaaauguaaacaggaucacauauggggccugucccagauauguuaagcaaaacacucugaaauuggcaacagggaugcgaaauguaccagagaaacaaacuagaggcauauuuggcgcaaucgcggguuucauagaaaaugguugggagggaaugguggaugguugguaugguuucaggcaucaaaauucugagggaauaggacaagcagcagaucucaaaagcacucaagcagcaaucgaccaaaucaaugggaagcugaauagguugaucgggaaaaccaacgagaaauuccaucagauugaaaaagaauucucagaaguagaagggagaauucaggaccucgagaaauauguugaggacacuaaaauagaucucuggucauacaacgcggagcuucuuguugcccuggagaaccaacauacaauugaucuaacugacucagaaaugaacaaacuguuugaaagaacaaagaagcaacugagggaaaaugcugaggauaugggcaaugguuguuucaaaauauaccacaaaugugacaaugccugcauagggucaaucagaaauggaacuuaugaccaugauguauacagagaugaagcauuaaacaaccgguuccagaucaaagguguugagcugaagucaggauacaaagauuggauccuauggauuuccuuugccauaucauguuuuuugcuuuguguugcuuuguugggguucaucaugugggccugccaaaaaggcaacauuaggugcaacauuugcauuuga

SEQ ID NO: 33821 - RNA, 1701 nt, Artificial Sequence
  derived and/or modified CDS sequence (wt) from hemagglutinin__InfluenzaA__ABU92660
augaagacuaucauugcuuugagcuacauucuaugucugguuuucgcucaaaaacuucccggaaaugacaacagcacggcaacgcugugccuugggcaccaugcaguaccaaacggaacgauagugaaaacaaucacgaaugaccaaauugaaguuacuaaugcuacugagcugguucagauuuccucaacaggugaaauaugcgacaguccccaucagauccuugauggagaaaacugcacacuaauagaugcucuauugggagacccucagugugauggcuuccaaaauaagaaaugggaccuuuuuguugaacgcagcaaagccuacagcaacuguuacccuuaugaugugccggauuaugccucccuuaggucacuaguugccucauccggcacacuggaguuuaacaaugaaagcuucgauuggacuggagucacucagaauggaacaagcucugcuugcaaaaggagaucugauaaaaguuucuuuaguagauugaauugguugacccacuuaaaauacaaauacccagcauugaacguaacuaugccaaacaaugaaaaauuugacaaauuguacauuugggggguucaccacccggguacggacagugaccaaaucagccuauaugcucaagcaucaggaagaaucacagucucuaccaaaagaagccaacaaacuguaaucccgaauaucggaucuagacccaggguaagggaugucuccagccgaauaagcaucuauuggacaauaguaaaaccgggagacauacuuuugauuaacagcacagggaaucuaauugcuccucgggguuacuucaaaauacgaagugggaaaagcucaauaaugagaucagaugcacccauuggcaaaugcaauucugaaugcaucacuccaaauggaagcauucccaaugacaaaccauuucaaaauguaaacaggaucacauauggggccugucccagauauguuaagcaaaacacucugaaauuggcaacagggaugcgaaauguaccagagaaacaaacuagaggcauauuuggcgcaaucgcggguuucauagaaaaugguugggagggaaugguggacgguugguacgguuucaggcaucaaaauucugagggcacaggacaagcagcagaucucaaaagcacucaagcagcaaucaaccaaaucaaugggaaacugaauagguuaaucgggaaaacaaacgagaaauuccaucagauugaaaaagaauucucggaaguagaaggaagaauucaggaccucgagaaauauguugaggacacuaaaauagaucucuggucauacaacgcggagcuucuuguugcccuggagaaccaacauacaauugaucuaacugacucagaaaugaacaaacuguuugaaagaacaaagaagcaacugagggaaaaugcugaggauaugggcaaugguuguuucaaaauauaccacaaaugugacaaugccugcauagggucaaucagaaauggaacuuaugaucaugauguguacagagaugaagcauuaaacaaccgguuccagaucaaagguguugagcugaagucaggauacaaagauuggauccuauggauuuccuuugccauaucauguuuuuugcuuuguguugcuuuguugggguucaucaugugggccugccaaaaaggcaacauuaggugcaacauuugcauuuga

SEQ ID NO: 33822 - RNA, 1701 nt, Artificial Sequence
  derived and/or modified CDS sequence (wt) from hemagglutinin__InfluenzaA__ABU92661
augaagacuaucauugcuuugagcuacauucuaugucugguuuucgcucaaaaacuucccggaaaugacaacagcacggcaacgcugugccuugggcaccaugcaguaccaaacggaacgauagugaaaacaaucacgaaugaccaaauugaaguuacuaaugcuacugagcugguucagauuuccucaacaggugaaauaugcgacaguccccaucagauccuugauggagaaaacugcacacuaauagaugcucuauugggagacccucagugugauggcuuccaaaauaagaaaugggaccuuuuuguugaacgcagcaaagccuacagcaacuguuacccuuaugaugugccggauuaugccucccuuaggucacuaguugccucauccggcacacuggaguuuaacaaugaaagcuucgauuggacuggagucacucagaauggaacaagcucugcuugcaaaaggagaucugauaaaaguuucuuuaguagauugaauugguugacccacuuaaaauacaaauacccagcauugaacguaacuaugccaaacaaugaaaaauuugacaaauuguacauuugggggguucaccacccggguacggacagugaccaaaucagccuauaugcucaagcaucaggaagaaucacagucucuaccaaaagaagccaacaaacuguaaucccgaauaucggaucuagacccaggguaagggaugucuccagccgaauaagcaucuauuggacaauaguaaaaccgggagacauacuuuugauuaacagcacagggaaucuaauugcuccucgggguuacuucaaaauacgaagugggaaaagcucaauaaugagaucagaugcacccauuggcaaaugcaauucugaaugcaucacuccaaauggaagcauucccaaugacaaaccauuucaaaauguaaacaggaucacauauggggccugucccagauauguuaagcaaaacacucugaaauuggcaacagggaugcgaaauguaccagagaaacaaacuagaggcauauuuggcgcaaucgcggguuucauagaaaaugguugggagggaaugguggacgguugguacgguuucaggcaucaaaauucugagggcacaggacaagcagcagaucucaaaagcacucaagcagcaaucaaccaaaucaaugggaaacugaauagguuaaucgggaaaacaaacgagaaauuccaucagauugaaaaagaauucucggaaguagaaggaagaauucaggaccucgagaaauauguugaggacacuaaaauagaucucuggucauacaacgcggagcuucuuguugcccuggagaaccaacauacaauugaucuaacugacucagaaaugaacaaacuguuugaaagaacaaagaagcaacugagggaaaaugcugaggauaugggcaaugguuguuucaaaauauaccacaaaugugacaaugccugcauagggucaaucagaaauggaacuuaugaccaugauguguacagagaugaagcauuaaacaaccgguuccagaucaaagguguugaguuggagucaggauacaaagauuggauccuauggauuuccuuugccauaucauguuuuuugcuuuguguugcuuuguugggguucaucaugugggccugccaaaaaggcaacauuaggugcaacauuugcauuuga

SEQ ID NO: 33823 - RNA, 1701 nt, Artificial Sequence
  derived and/or modified CDS sequence (wt) from hemagglutinin__InfluenzaA__ABU92662
augaagacuaucauugcuuugagcuacauucuaugucugguuuucgcucaaaaacuucccggaaaugacaacagcacggcaacgcugugccuugggcaccaugcaguaccaaacggaacgauagugaaaacaaucacgaaugaccaaauugaaguuacuaaugcuacugagcugguucagauuuccucaacagguggaauaugcgacaguccucaucagauccuugauggagaaaacugcacacuaauagaugcucuauugggagacccucagugugauggcuuccaaaauaagaaaugggaccuuuuuguugaacgcagcaaagccuacagcaacuguuacccuuaugaugugccggauuaugccucccuuaggucacuaguugccucauccggcacacuggaguuuaacaaugaaagcuucgauuggacuggagucacucagaauggaacaagcucugcuugcaaaaggagaucuaauaaaaguuucuuuaguagauugaauugguugacccacuuaaaauacaaauacccagcauugaacgugacuaugccaaacaaugaaaaauuugacaaauuguacauuugggggguucaccacccggguacggacagugaccaaaucagccuauaugcucaagcaucaggaagaaucacagucucuaccaaaagaagccaacaaacuguaaucccgaauaucggaucuagacccaggguaagggaugucuccagccgaauaagcaucuauuggacaauaguaaaaccgggagacauacuuuugauuaacagcacagggaaucuaauugcuccucgggguuacuucaaaauacgaagugggaaaagcucaauaaugagaucagaugcacccauuggcaaaugcaauucugaaugcaucacuccaaauggaagcauucccaaugacaaaccauuucaaaauguaaacaggaucacauauggggccugucccagauauguuaagcaaaacacucugaaauuggcaacagggaugcgaaauguaccagagaaacaaacuagaggcauauuuggcgcaaucgcggguuucauagaaaaugguugggagggaaugguggacgguugguacgguuucaggcaucaaaauucugagggcacaggacaagcagcagaucucaaaagcacucaagcagcaaucaaccaaaucaaugggaaacugaauagguuaaucgggaaaacaaacgagaaauuccaucagauugaaaaagaauucucggaaguagaaggaagaauucaggaccucgagaaauauguugaggacacuaaaauagaucucuggucauacaacgcggagcuucuuguugcccuggagaaccaacauacaauugaucuaacugacucagaaaugaacaaacuguuugaaagaacaaagaagcaacugagggaaaaugcugaggauaugggcaaugguuguuucaaaauauaccacaaaugugacaaugccugcauagggucaaucagaaauggaacuuaugaccaugauguguacagagaugaagcauuaaacaaccgguuccagaucaaagguguugagcugaagucaggauacaaagauuggauccuauggauuuccuuugccauaucauguuuuuugcuuuguguugcuuuguugggguucaucaugugggccugccaaaaaggcaacauuaggugcaacauuugcauuuga

SEQ ID NO: 33824 - RNA, 1701 nt, Artificial Sequence; identical to SEQ ID NO: 33774
  derived and/or modified CDS sequence (wt) from hemagglutinin__InfluenzaA__ABU92663

SEQ ID NO: 33825 - RNA, 1701 nt, Artificial Sequence
  derived and/or modified CDS sequence (wt) from hemagglutinin__InfluenzaA__ABU92664
augaagacuaucauugcuuugagcuacauucuaugucugguuuucgcucaaaaacuucccggaaaugacaacagcacggcaacgcugugccuugggcaccaugcaguaccaaacggaacgauagugaaaacaaucacgaaugaccaaauugaaguuacuaaugcuacugagcugguucagauuuccucaacaggugaaauaugcgacaguccccaucagauccuugauggagaaaacugcacacuaauagaugcucuauugggagacccucagugugauggcuuccaaaauaagaaaugggaccuuuuuguugaacgcagcaaagccuacagcaacuguuacccuuaugaugugccggauuaugccucccuuaggucacuaguugccucauccggcacacuggaguuuaacaaugaaagcuucgauuggacuggagucacucagaauggaacaagcucugcuugcaaaaggagaucugauaaaaguuucuuuaguagauugaauugguugacccacuuaaaauacaaauacccagcauugaacguaacuaugccaaacaaugaaaaauuugacaaauuguacauuugggggguucaccacccggguacggacagugaccaaaucagccuauaugcucaagcaucaggaagaaucacagucucuaccaaaagaagccaacaaacuguaaucccgaauaucggaucuagacccaggguaagggaugucuccagccgaauaagcaucuauuggacaauaguaaaaccgggagacauacuuuugauuaacagcacagggaaucuaauugcuccucgggguuacuucaaaauacgaagugggaaaagcucaauaaugagaucagaugcacccauuggcaaaugcaauucugaaugcaucacuccaaauggaagcauucccaaugacaaaccauuucaaaauguaaacaggaucacauauggggccugucccagauauguuaagcaaaacacucugaaauuggcaacagggaugcgaaauguaccagagaaacaaacuagaggcauauuuggcgcaaucgcggguuucauagaaaaugguugggagggaaugguggacgguugguacgguuucaggcaucaaaauucugagggcacaggacaagcagcagaucucaaaagcacucaagcagcaaucaaccaaaucaaugggaaacugaauagguuaaucgggaaaacaaacgagaaauuccaucagauugaaaaagaauucucggaaguagaaggaagaauucaggaccucgagaaauauguugaggacacuaaaauagaucucuggucauacaacgcggagcuucuuguugcccuggagaaccaacauacaauugaucuaacugacucagaaaugaacaaacuguuugaaagaacaaagaagcaacugagggaaaaugcugaggauaugggcaaugguuguuucaaaauauaccacaaaugugacaaugccugcauagggucaaucagaaauggaacuuaugaccaugauguguacagagaugaagcauuaaacaaccgguuccagaucaaagguguugagcugaagucaggauacaaagauuggauccuauggauuuccuuugccauaucauguuuuuugcuuuguguugcuuuguugggguucaucaugugggccugccaaaaaggcaauauuaggugcaacauuugcauuuga

SEQ ID NO: 33826 - RNA, 1701 nt, Artificial Sequence
  derived and/or modified CDS sequence (wt) from hemagglutinin__InfluenzaA__ABU92665
augaagacuaucauugcuuugagcuacauucuaugucugguuuucgcucaaaaacuucccggaaaugacaacagcacggcaacgcugugccuugggcaccaugcaguaccaaacggaacaauagugaaaacaaucacgaaugaccaaauugaaguuacuaaugcuacugagcugguucagaguuccucaacagguggaauaugcgacaguccucaucagauccuugauggagaaaacugcacacuaauagaugcucuauugggagacccucagugugauggcuuccaaaauaagaaaugggaccuuuuuguugaacgcagcaaagccuacagcaacuguuacccuuaugaugugccggauuaugccucccuuaggucacuaguugccucauccggcacacuggaguuuaacaaugaaagcuucaauuggacuggagucacucaaaauggaacaagcucugcuugcaaaaggagaucuaauaaaaguuucuuuaguagauugaauugguugacccacuuaaaauucaaauacccagcauugaacgugacuaugccaaacaaugaaaaauuugacaaauuguacauuugggggguucaccacccggguacggacaaugaccaaaucagccuauaugcucaagcaucaggaagaaucacagucucuaccaaaagaagccaacaaacuguaaucccgaauaucggaucuagacccaggguaagggauguccccagcagaauaagcaucuauuggacaauaguaaaaccgggagacauacuuuugauuaacagcacagggaaucuaauugcuccucgggguuacuucaaaauacgaagugggaaaagcucaauaaugagaucagaugcacccauuggcaaaugcaauucugaaugcaucacuccaaauggaagcauucccaaugacaaaccauuucaaaauguaaacaggaucacauauggggccugucccagauauguuacgcaaaacacucugaaauuggcaacagggaugcgaaauguaccagagaaacaaacuagaggcauauuuggcgcaaucgcggguuucauagaaaaugguugggagggaaugguggacgguugguacgguuucaggcaucaaaauucugagggaacaggacaagcugcagaucucaaaagcacucaagcagcaaucaaccaaaucaaugggaagcugaauagguugaucggaaaaacaaacgagaaauuccaucagauugaaaaagaauucucagaaguagaagggagaauucaggaccucgagaaauauguugaggacacuaaaauagaucucuggucauacaacgcggagcuucuuguugcccuggagaaccaacauacaauugaucuaacugacucagaaaugaacaaacuguuugaaagaacaaagaagcaacugagggaaaaugcugaggauaugggcaaugguuguuucaaaauauaccacaaaugugacaaugccugcauagggucaaucagaaauggaacuuaugaccaugauguauacagagaugaagcauuaaacaaccgguuccagaucaaagguguugagcugaagucaggauacaaagauuggauccuauggauuuccuuugccauaucauguuuuuugcuuuguguugcuuuguugggguucaucaugugggccugccaaaaaggcaacauuaggugcaacauuugcauuuga

SEQ ID NO: 33827 - RNA, 1701 nt, Artificial Sequence; identical to SEQ ID NO: 33774
  derived and/or modified CDS sequence (wt) from hemagglutinin__InfluenzaA__ABU92666

SEQ ID NO: 33828 - RNA, 1701 nt, Artificial Sequence; identical to SEQ ID NO: 32358
  derived and/or modified CDS sequence (wt) from hemagglutinin__InfluenzaA__ABU92667

SEQ ID NO: 33829 - RNA, 1701 nt, Artificial Sequence
  derived and/or modified CDS sequence (wt) from hemagglutinin__InfluenzaA__ABU92668
augaagacuaucauugcuuugagcuacauuuuaugucugguuuucgcucaaaaacuucccguaaaugacaacagcacggcaacgcuaugccugggacaccaugcagugccaaacggaacgcuagugaaaacaaucacgaaugaccacauugaagugacuaaugcuacugagcugguucagaguuccucaacagguagaauaugcgacaguccucaccaaauccuugauggagaaaacugcacacuaauagaugcucuauugggagacccucauugugauggcuuccaaaauaaggaaugggaccuuuuuguugaacgcagcacagccuacagcaacuguuacccuuaugaugugccggauuaugccucccuuaggucacuaguugccucauccggcacacuggaguuuaacaaugaaagcuucaauuggacuggagucgcucagaauggaacaagcucugcuugcaaaaggagaucuauuaaaaguuucuuuaguagauugaauugguugcaccaauuaaaauacaaauacccagcacugaacgugacuaugccaaacaaugaaaaauuugacaaauuguacauuugggggguucaccacccgaguacggacagugaccaaaucagccuauaugcucaagcaucagggagagucacagucucuaccaaaagaagccaacaaacuguaaucccgaauaucggaucuagacccuggguaaggggugucuccagcagaauaagcaucuauuggacaauaguaaaaccgggagacauacuuuugauuaacagcacagggaaucuaauugcuccucgggguuacuuuaaaauacgaagugggaaaagcucaauaaugaggucaaaugcacccauuggcaaaugcaauucugaaugcaucacuccaaauggaagcauucccaaugacaaaccauuucaaaauguaaacaggaucacauauggggccugucccagauauguuaagcaaaacacucugaaauuggcaacagggaugcggaauguaccagagaaacaaacuagaggcauauucggcgcaaucgcggguuucauagaaaaugguugggagggaaugguggacgguugguacgguuucaggcaucaaaauucggagggcacaggacaagcagcagaucuuaaaagcacucaagcagcaaucaaccaaaucaacgggaaacugaauagguuaaucgagaaaacaaacgagaaauuccaucaaauugaaaaagaauucucagaaguagaagggagaauucaggaccucgagaaauauguugaggacacuaaaauagaucucuggucguacaacgcggagcuucuuguugcccuggagaaccaacauacaauugaucuaacugacucagaaaugaacaaacuguuugaaagaacaaggaagcaacugagggaaaaugcugaggauaugggcaaugguuguuucaaaauauaccacaaaugugacaaugccugcauagggucaaucagaaauggaacuuaugaccaugauguauacagagacgaagcauuaaacaaccgguuccagaucaaagguguugagcugaagucaggauacaaagauuggauccuauggauuuccuuugccauaucauguuuuuugcuuuguguuguuuugcugggguucaucaugugggccugccaaaaaggcaacauuaggugcaacauuugcauuuga

SEQ ID NO: 33830 - RNA, 1701 nt, Artificial Sequence
  derived and/or modified CDS sequence (wt) from hemagglutinin__InfluenzaA__ABU92669
augaagacuaucauugcuuugagcuacauuuuaugucugguuuucgcucaaaaacuucccguaaaugacaacagcacggcaacgcugugccugggacaccaugcagugccaaacggaacgcuagugaaaacaaucacgaaugaccacauugaagugacuaaugcuacugagcugguucagaguuccucaacagguagaauaugcgacaguccucaccaaauccuugauggagaaaacugcacacuaauagaugcucuauugggagacccucauugugauggcuuccaaaauaaggaaugggaccuuuuuguugaacgcagcacagccuacagcaacuguuacccuuaugaugugccggauuaugccucccuuaggucacuaguugccucauccggcacacuggaguuuaacaaugaaagcuucaauuggacuggagucgcucagaauggaacaagcucugcuugcaaaaggagaucuauuaaaaguuucuuuaguagauugaauugguugcaccaauuaaaauacaaauauccagcacugaacgugacuaugccaaacaaugaaaaauuugacaaauuguacauuugggggguucaccacccgaguacggacagugaccaaaucagccuauaugcucaagcaucagggagaguaacagucucuaccaaaagaagccaacaaacuguaaucccgaauaucggaucuagacccuggguaaggggugucuccagcagaauaagcaucuauuggacaauaguaaaaccgggagacauacuuuugauuaacagcacagggaaucuaauugcuccucgggguuacuuuaaaauacgaaaugggaaaagcucaauaaugaggucaaaugcacccauuggcaaaugcaauucugaaugcaucacuccaaauggaagcauucccaaugacaaaccauuucaaaauguaaacaggaucacauauggggccugucccagauauguuaagcaaaacacucugaaauuggcaacagggaugcggaauguaccagagaaacaaacuagaggcauauucggcgcaaucgcggguuucauagaaaaugguugggagggaaugguggacgguugguacgguuucaggcaucaaaauucugagggcacaggacaagcagcagaucuuaaaagcacucaagcagcaaucaaccaaaucaacgggaaacugaauagguuaaucgagaaaacaaacgagaaauuccaucaaauugaaaaagaauucucagaaguagaagggagaauucaggaccucgagaaauauguugaggacacuaaaauagaucucuggucguacaacgcggagcuucuuguugcccuggagaaccaacauacaauugaucuaacugacucagaaaugaacaaacuguuugaaagaacaaggaagcaacugagggaaaaugcugaggauaugggcaaugguuguuucaaaauauaccacaaaugugacaaugccugcauagggucaaucagaaauggaacuuaugaccaugauguauacagagacgaagcauuaaacaaccgguuccagaucaaagguguugagcugaagucaggauacaaagauuggauccuauggauuuccuuugccauaucauguuuuuugcuuuguguuguuuugcugggguucaucaugugggccugccaaaaaggcaacauuaggugcaacauuugcauuuga

SEQ ID NO: 33831 - RNA, 1701 nt, Artificial Sequence
  derived and/or modified CDS sequence (wt) from hemagglutinin__InfluenzaA__ABU92670
augaagacuaucauugcuuugagcuacauuuuaugucugguuuucgcucaaaaacuucccguaaaugacaacagcacggcaacgcugugccugggacaccaugcagugccaaacggaacgcuagugaaaacaaucacgaaugaccacauugaagugacuaaugcuacugagcugguucagaguuccucaacagguagaauaugcgacaguccucaccaaauccuugauggagaaaacugcacacuaauagaugcucuauugggagacccucauugugauggcuuccagaauaaggaaugggaccuuuuuguugaacgcagcacagccuacagcaacuguuacccuuaugauguaccggauuaugccucccuuaggucacuaguugccucauccggcacacuggaguuuaacaaugaaagcuucaauuggacuggagucgcucagaauggaacaagcucugcuugcaaaaggagaucuauuaaaaguuucuuuaguagauugaauugguugcaccaauuaaaauacaaauauccagcacugaacgugacuaugccaaacaaugaaaaauuugacaaauuguacauuugggggguucaccacccgaguacggacagugaccaaaucagccuauaugcucaagcaucagggagagucacagucucuaccaaaagaagccaacaaacuguaaucccgaauaucggaucuagacccuggguaaggggugucuccagcagaauaagcaucuauuggacaauaguaaaaccgggagacauacuuuugauuaacagcacagggaaucuaauugcuccucgggguuacuuuaaaauacgaagugggaaaagcucaauaaugaggucaaaugcacccauuggcaaaugcaauucugaaugcaucacuccaaauggaagcauucccaaugacaaaccauuucaaaauguaaacaggaucacauauggggccugucccagauauguuaagcaaaacacucugaaauuggcaacagggaugcggaauguaccagagaaacaaacuagaggcauauucggcgcaaucgcggguuucauagaaaaugguugggagggaaugguggacgguugguacgguuucaggcaucaaaauucugagggcacaggacaagcagcagaucuuaaaagcacucaagcagcaaucaaccaaaucaacgggaaacugaauagauuaaucgagaaaacaaacgagaaauuccaucaaauugaaaaagaauucucagaaguagaagggagaauucaggaccucgagaaauauguugaggacacuaaaauagaucucuggucguacaacgcggagcuucuuguugcccuggagaaccaacauacaauugaucuaacugacucagaaaugaacaaacuguuugaaagaacaaggaagcaacugagggaaaaugcugaggauaugggcaaugguuguuucaaaauauaccacaaaugugacaaugccugcauagggucaaucagaaauggaacuuaugaccaugauguauacagagacgaagcauuaaacaaccgguuccagaucaaagguguugagcugaagucaggauacaaagauuggauccuauggauuuccuuugccauaucauguuuuuugcuuuguguuguuuugcugggguucaucaugugggccugccaaaaaggcaacauuaggugcaacauuugcauuuga

SEQ ID NO: 33832 - RNA, 1701 nt, Artificial Sequence
  derived and/or modified CDS sequence (wt) from hemagglutinin__InfluenzaA__ABU92671
augaagacuaucauugcuuugagccacauuuuaugucugguuuucgcucaaaaacuucccguaaaugauaacagcacggcaacgcuaugccugggacaccaugcagugccaaacggaacgcuagugaaaacaaucacgaaugaccacauugaagugacuaaugcuacugagcugguucagaguuccucaacagguagaauaugcgacauuccucaccaaauccuugauggagaaaacugcacacuaauagaugcucuauugggagacccucauugugauggcuuccaaaauaaggaaugggaccuuuuuguugaacgcagcacagccuacagcaacuguuacccuuaugaugugccggauuaugccucccuuaggucacuaguugccucauccggcacacuggaguuuaacaaugaaagcuucaauuggacuggagucgcucagaauggaacaagcucugcuugcaaaaggagaucuauuaaaaguuucuuuaguagauugaauugguugcaccaauuaaaauacaaauauccagcacugaacgugacuaugccaaacaaugaaaaauuugacaaauuguacauuugggggguucaccacccgaguacggacagugaccaaaucagccuauaugcucaagcaccagggagagucacagucucuaccaaaagaagccaacaaacuguaaucccgaauaucggaucuagacccuggguaaggggugucuccagcagaauaagcaucuauuggacaauaguaaaaccgggagacauacuuuugauuaacagcacagggaaucuaauugcuccucgggguuacuucaaaauacgaagugggaaaagcucaauaaugaggucaaaugcacccauuggcaaaugcaauucugaaugcaucacuccaaauggaagcauucccaaugacaaaccauuucaaaauguaaacaggaucacauauggggccugucccagauauguuaagcaaaacacucugaaauuggcaacagggaugcggaauguaccagagaaacaaacuagaggcauauucggcgcaaucgcggguuucauagaaaaugguugggagggaaugguggacgguugguacgguuucaggcaucaaaauucugagggcacaggacaagcagcagaucuuaaaagcacucaagcagcaaucaaccaaaucaacgggaaacugaauagguuaaucgagaaaacaaacgagaaauuccaucaaauugaaaaagaauucucagaagcagaagggagaauucaggaccucgagaaauauguugaggacacuaaaauagaucucuggucguacaacgcggagcuucuuguugcccuggagaaccaacauacaauugaucuaacugacucagaaaugaacaaacuguuugaaagaacaaggaagcaacugagggaaaaugcugaggauaugggcaaugguuguuucaaaauauaccacaaaugugacaaugccugcauagggucaaucagaaauggaacuuaugaccaugauguauacagagacgaagcauuaaacaaccgguuccagaucaaagguguugagcugaagucaggauacaaagauuggauccuauggauuuccuuugccauaucauguuuuuugcuuuguguuguuuugcugggguucaucaugugggccugccaaaaaggcaacauuaggugcaacauuugcauuuga

SEQ ID NO: 33833 - RNA, 1701 nt, Artificial Sequence
  derived and/or modified CDS sequence (wt) from hemagglutinin__InfluenzaA__ABU92672
augaagacuaucauugcuuugagcuacauuuuaugucugguuuucgcucaaaaacuucccguaaaugacaacagcacggcaacgcugugccugggacaccaugcagugccaaacggaacgcuagugaaaacaaucacgaaugaccacauugaagugacuaaugcuacugagcugguucagaguuccucaacagguagaauaugcgacaguccucaccaaauccuugauggagaaaacugcacacuaauagaugcucuauugggagacccucauugugauggcuuccaaaauaaggaaugggaccuuuuuguugaacgcagcacagccuacagcaacuguuacccuuaugaugugccggauuaugccucccuuaggucacuaguugccucauccggcacacuggaguuuaacaaugaaagcuucaauuggacuggagucgcucagaauggaacaagcucugcuugcaaaaggagaucuauuaaaaguuucuuuaguagauugaauugguugcaccaauuaaaauacaaauauccagcacugaacgugacuaugccaaacaaugaaaaauuugacaaauuguacauuugggggguucaccacccgaguacggacagugaccaaaucagccuauaugcucaagcaucagggagagucacagucucuaccaaaagaagccaacaaacuguaaucccgaauaucggaucuagacccuggguaaggggugucuccagcagaauaagcaucuauuggacaauaguaaaaccgggagacauacuuuugauuaacagcacagggaaucuaauugcuccucgggguuacuuuaaaauacgaagugggaaaagcucaauaaugaggucaaaugcacccauuggcaaaugcaauucugaaugcaucacuccaaauggaagcauucccaaugacaaaccauuucaaaauguaaacaggaucacauauggggccugucccagauauguuaagcaaaacacucugaaauuggcaacagggaugcggaauguaccagagaaacaaacuagaggcauauucggcgcaaucgcggguuucauagaaaaugguugggagggaaugguggacgguugguacgguuucaggcaucaaaauucugagggcacaggacaagcagcagaucuuaaaagcacucaagcagcaaucaaccaaaucaacgggaaacugaauagguuaaucgagaaaacaaacgagaaauuccaucaaauugaaaaagaauucucagaaguagaagggagaauucaggaccucgagaaauauguugaagacacuaaaauagaucucuggucguacaacgcggagcuucuuguugcccuggagaaccaacauacaauugaucuaacugacucagaaaugaacaaacuguuugaaagaacaaggaagcaacugagggaaaaugcugaggauaugggcaaugguuguuucaaaauauaccacaaaugugacaaugccugcauagggucaaucagaaauggaacuuaugaccaugauguauacagagacgaagcauuaaacaaccgguuccagaucaaagguguugagcugaagucaggauacaaagauuggauccuauggauuuccuuugccauaucauguuuuuugcuuuguguuguuuugcugggguucaucaugugggccugccaaaaaggcaacauuaggugcaacauuugcauuuga

SEQ ID NO: 33834 - RNA, 1701 nt, Artificial Sequence; identical to SEQ ID NO: 32084
  derived and/or modified CDS sequence (wt) from hemagglutinin__InfluenzaA__ABU92673

SEQ ID NO: 33835 - RNA, 1701 nt, Artificial Sequence
  derived and/or modified CDS sequence (wt) from hemagglutinin__InfluenzaA__ABU92674
augaagacuaucauugcuuugagcuacauuuuaugucugguuuucgcucaaaaacuucccguaaaugacaacagcacggcaacgcugugccugggacaccaugcagugccaaacggaacgcuagugaaaacaaucacgaaugaccacauugaagugacuaaugcuacugagcugguucagaguuccucaacagguagaauaugcgacaguccucaccaaauccuugauggagaaaacugcacacuaauagaugcucuauugggagacccucauugugauggcuuccaaaauaaggaaugggaccuuuuuguugaacgcagaacagccuacagcaacuguuacccuuaugaugugccggauuaugccucccuuaggucacuaguugccucauccggcacacuggaguuuaacaaugaaagcuucaauuggacuggagucgcucagaauggaacaagcucugcuugcaaaaggagaucuauuaaaaguuucuuuaguagauugaauugguugcaccaauuaaaauacaaauauccagcacugaacgugacuaugccaaacaaugaaaaauuugacaaauuguacauuugggggguucaccacccgaguacggacagugaccaaaucagccuauaugcucaagcaucagggagagucacagucucuaccaaaagaagccaacaaacuguaaucccgaauaucggaucuagacccuggguaaggggugucuccagcagaauaagcaucuauuggacaauaguaaaaccgggagacauacuuuugauuaacagcacagggaaucuaauugcuccucgggguuacuuuaaaauacgaagugggaaaagcucaauaaugaggucaaaugcacccauuggcaaaugcaauucugaaugcaucacuccaaauggaagcauucccaaugacaaaccauuucaaaauguaaacaggaucacauauggggccugucccagauauguuaagcaaaacacucugaaauuggcaacagggaugcggaauguaccagagaaacaaacuagaggcauauucggcgcaaucgcggguuucauagaaaaugguugggagggaaugguggacgguugguacgguuucaggcaucaaaauucugagggcacaggacaagcagcagaucuuaaaagcacucaagcagcaaucaaccaaaucaacgggaaacugaauagguuaaucgagaaaacaaacgagaaauuccaucaaauugaaaaagaauucucagaaguagaagggagaauucaggaccucgagaaauauguugaggacacuaaaauagaucucuggucguacaacgcggagcuucuuguugcccuggagaaccaacauacaauugaucuaacugacucagaaaugaacaaacuguuugaaagaacaaggaagcaacugagggaaaaugcugaggauaugggcaaugguuguuucaaaauauaccacaaaugugacaaugccugcauagggucaaucagaaauggaacuuaugaccaugauguauacagagacgaagcauuaaacaaccgguuccagaucaaagguguugagcugaagucaggauacaaagauuggauccuauggauuuccuuugccauaucauguuuuuugcuuuguguuguuuugcugggguucaucaugugggccugccaaaaaggcaacauuaggugcaacauuugcauuuga

SEQ ID NO: 33836 - RNA, 1701 nt, Artificial Sequence
  derived and/or modified CDS sequence (wt) from hemagglutinin__InfluenzaA__ABU92675
augaagacuaucauugcuuugagcuacauucuaugucugguuuucgcucaaaaacuucccggaaaugacaacagcacggcaacgcugugccuugggcaccaugcaguaccaaacggaacgauagugaaaacaaucacgaaugaccaaauugaaguuacuaaugcuacugagcugguucagaguuccucaacagguggaauaugcgacaguccucaucagauccuugauggagaaaacugcacacuaauagaugcucuauugggagacccucagugugauggcuuccaaaauaagaaaugggaccuuuuuguugaacgcagcaaagccuacagcaacuguuacccuuaugaugugccggauuaugccucccuuaggucacuaauugccucauccggcacacuggaguuuaacaaugaaagcuucaauuggacuggagucacucaaaauggaacaagcucugcuugcaaaaggagaucuaauagcaguuucuuuaguagauugaauugguugacccacuuaaaauucaaauacccagcauugaacgugacuaugccaaacaaugaagaauuugacaaauuauacauuugggggguucaccacccggguacagacaaugaccaaaucagccuauaugcucaagcaucaggaagaaucacagucucuaccaaaagaagccaacaaacuguaaucccgaauaucgggucuagacccaggguaagggauauccccagcagaauaagcaucuauuggacaauaguaaaaccgggagacauacuuuugauuaacagcacagggaaucuaauugcuccucgggguuacuucaaaauacgaagugggaaaagcucaauaaugagaucagaugcacccauuggcaaaugcaauucugaaugcaucacuccaaauggaagcauucccaaugacaaaccauuucaaaauguaaacaggaucacauauggggccugucccagauauguuaagcaaaacacucugaaauuggcaacagggaugcgaaauguaccagagaaacaaacuagaggcauauuuggcgcaaucgcggguuucauagaaaaugguugggagggaaugguggaugguugguacgguuucaggcaucaaaauucugagggaauaggacaagcagcagaucucaaaagcacucaagcagcaaucgaccaaaucaaugggaagcugaauagguugaucgggaaaaccaacgagaaauuccaucagauugaaaaagaauucucagaaguagaagggagaauucaggaccucgagaaauauguugaggacacuaaaauagaucucuggucauacaacgcggagcuucuuguugcccuggagaaccaacauacaauugaucuaacugacucagaaaugaacaaacuguuugaaagaacaaagaagcaacugagggaaaaugcugaggauaugggcaaugguuguuucaaaauauaccacaaaugugacaaugccugcauggggucaaucagaaauggaacuuaugaccaugauguauacagagaugaagcauuaaacaaccgguuccagaucaaagguguugagcugaagucaggauacaaagauuggauccuauggauuuccuuugccauaucauguuuuuugcuuuguguugcuuuguugggguucaucaugugggccugccaaaaaggcaacauuaggugcaacauuugcauuuga

SEQ ID NO: 33837 - RNA, 1701 nt, Artificial Sequence; identical to SEQ ID NO: 33818
  derived and/or modified CDS sequence (wt) from hemagglutinin__InfluenzaA__ABU92676

SEQ ID NO: 33838 - RNA, 1701 nt, Artificial Sequence; identical to SEQ ID NO: 33766
  derived and/or modified CDS sequence (wt) from hemagglutinin__InfluenzaA__ABU92677

SEQ ID NO: 33839 - RNA, 1701 nt, Artificial Sequence
  derived and/or modified CDS sequence (wt) from hemagglutinin__InfluenzaA__ABU92678
augaagacuaucauugcuuugagcuacauucuaugucugguuuucgcucaaaaacuucccggaaaugacaacagcacggcaacgcugugccuugggcaccaugcaguaccaaacggaacgauagugaaaacaaucacgaaugaccaaauugaaguuacuaaugcuacugagcugguucagaguuccucaacagguggaauaugcgacaguccucaucagauccuugauggagaaaacugcacacuaauagaugcucuacugggagacccucagugugauggccuccaaaacaagaaaugggaccuuuuuguugaacgcagcaaagccuacagcaacuguuacccuuaugaugugccggauuaugccucccuuaggucacuaauugccucauccggcacacuggaguuuaacaaugagagcuucaauuggacuggagucacucaaaauggaacaagcucugcuugcaaaaggagaucuaauaacaguuucuuuaguagauugaauugguugacccacuuaaaauucaaauacccagcauugaacgugacuaugccaaacaaugaagaauuugacaaauuguacauuugggggguucaccacccggguacggacaaugaccaaaucagccuauaugcucaagcaucaggaagaaucacagucucuaccaaaagaagccaacaaacuguaaucccgaauaucggaucuagaccccggguaagggauauccccagcagaauaagcaucuauuggacaauaguaaaaccgggagacauacuuuugauuaacagcacagggaaucuaauugcuccucgggguuacuucaaaauacgaagugggaaaagcucaauaaugagaucagaugcacccauuggcaauugcaauucugaaugcaucacuccaaauggaagcauucccaaugacaaaccauuucaaaauguaaacaggaucacauauggggccugucccagauauguuaagcaaaacacucugaaauuggcaacagggaugcgaaauguaccagagaaacaaacuagaggcauauuuggcgcaaucgcggguuucauagaaaaugguugggagggaaugguggaugguugguacgguuucaggcaucaaaauucugagggaauaggacaagcagcagaucucaaaagcacucaagcagcaaucgaccaaaucaaugggaagcugaauagguugaucgggaaaaccaacgagaaauuccaucagauugaaaaagaauucucagaaguagaagggagaauucaggaccucgagaaauauguugaggacacuaaaauagaucucuggucauacaacgcggagcuucuuguugcccuggagaaccaacauacaauugaucuaacugacucagaaaugaacaaacuguuugaaagaacaaagaagcaacugagggaaaaugcugaggauaugggcaaugguuguuucaaaauauaccacaaaugugacaaugccugcauagggucaaucagaaauggaacuuaugaccaugauguauacagagaugaagcacuaaacaaccgguuccagaucaaagguguugagcugaagucaggauacaaagauuggauccuauggauuuccuuugccauaucauguuuuuugcuuuguguugcuuuguugggguucaucaugugggccugccaaaaaggcaacauuaggugcaacauuugcauuuga

SEQ ID NO: 33840 - RNA, 1701 nt, Artificial Sequence
  derived and/or modified CDS sequence (wt) from hemagglutinin__InfluenzaA__ABU92680
augaagacuaucauugcuuugagcuacauucuaugucugguuuucgcucaaaaacuucccggaaaugacaacagcacggcaacgcugugccuugggcaccaugcaguaccaaacggaacgauagugaaaacaaucacgaaugaccaaauugaaguuacuaaugcuacugagcugguucagaguuccucaacagguggaauaugcgacaguccucaucagauccuugauggagaaaacugcacacuaauagaugcucuauugggagacccucagugugauggcuuccaaaauaagaaaugggaccuuuuuguugaacgcagcaaagccuacagcaacuguuacccuuaugaugugccggauuaugccucccuuaggucacuaguugccucauccggcacacuggaguuuaacaaugaaagcuucaauuggacuggagucacucaaaacggaacaagcucugcuugcaaaaggagaucuaauaacaguuucuuuaguagauugaauugguugacccacuuaaaauucaaauacccagcauugaacgugacuaugccaaacaaugaaaaauuugacaaauuguacauuugggggguucaccacccggguacggacaaugaccaaaucuuccuguaugcucaagcaucaggaagaaucacagucucuaccaaaagaagccaacaaacuguaaucccgaauaucggaucuagacccagaguaaggaauauccccagcagaauaagcaucuauuggacaauaguaaaaccgggagacauacuuuugauuaacagcacagggaaucuaauugcuccuagggguuacuucaaaauacgaagugggaaaagcucaauaaugagaucagaugcacccauuggcaaaugcaauucugaaugcaucacuccaaauggaagcauucccaaugacaaaccauuucaaaauguaaacaggaucacauacggggccugucccagauauguuaagcaaaacacucugaaauuggcaacagggaugcgaaauguaccagagaaacaaacuagaggcauauuuggcgcaaucgcggguuucauagaaaaugguugggagggaaugguggaugguugguacgguuucaggcaucaaaauucugagggaauaggacaagcagcagaucucaaaagcacucaagcagcaaucgaucaaaucaaugggaagcugaauagguugaucgggaaaaccaacgagaaauuccaucagauugaaaaagaauucucagaaguagaagggagaauucaggaccucgagaaauauguugaggacacuaaaauagaucucuggucauacaacgcggagcuucuuguugcccuggagaaccaacauacaauugaucuaacugacucagaaaugaacaaacuguuugaaaaaacaaagaagcaacugagggaaaaugcugaggauaugggcaaugguuguuucaaaauauaccacaaaugugacaaugccugcauaggaucaaucagaaauggaacuuaugaccaugauguauacagagaugaagcauuaaacaaccgguuccagaucaagggcguugagcugaagucaggauacaaagauuggauccuauggauuuccuuugccauaucauguuuuuugcuuuguguugcuuuguugggguucaucaugugggccugccaaaaaggcaacauuaggugcaacauuugcauuuga

SEQ ID NO: 33841 - RNA, 1701 nt, Artificial Sequence
  derived and/or modified CDS sequence (wt) from hemagglutinin__InfluenzaA__ABU92681
augaagacuaucauugcuuugagcuacauucuaugucugguuuucgcucaaaaacuucccgaaaaugacaacagcacggcaacgcugugccuugggcaccaugcaguaccaaacggaacgauagugaaaacaaucacgaaugaccaaauugaaguuacuaaugcuacugagcugguucagaguuccucaacagguggaauaugcgacaguccucaucagauccuugauggagaaaacugcacacuaauagaugcucuauugggagacccucagugugauggcuuccaaaauaagaaaugggaccuuuuuguugaacgcagcaaagccuacagcaacuguuacccuuaugaugugccggauuaugccucccuuaggucacuaguugccucauccggcacacuggaguuuaacaaugaaagcuucaauuggacuggagucacucaaaacggaacaagcucugcuugcaaaaggagaucuaauaacaguuucuuuaguagauugaauugguugacccacuuaaaauucaaauacccagcauugaacgugacuaugccaaacaaugaaaaauuugacaaauuguacauuugggggguucaccacccggguacggacaaugaccaaaucuuccuguaugcucaagcaucaggaagaaucacagucucuaccaaaagaagccaacaaacuguaaucccgaauaucggaucuagacccagaguaaggaauauccccagcagaauaagcaucuauuggacaauaguaaaaccgggagacauacuuuugauuaacagcacagggaaucuaauugcuccuagggguuacuucaaaauacgaagugggaaaagcucaauaaugagaucagaugcacccauuggcaaaugcaauucugaaugcaucacuccaaauggaagcauucccaaugacaaaccauuucaaaauguaaacaggaucacauauggggccugucccagauauguuaagcaaaacacucugaaauuggcaacagggaugcgaaauguaccagagaaacaaacuagaggcauauuuggcgcaaucgcggguuucauagaaaaugguugggagggaaugguggaugguugguacgguuucagacaucaaaauucugagggaauaggacaagcagcagaucucaaaagcacucaagcagcaaucgaucaaaucaaugggaagcugaauagguugaucgggaaaaccaacgagaaauuccaucagauugaaaaagaauucucagaaguagaagggagaauucaggaccucgagaaauauguugaggacacuaaaauagaucucuggucauacaacgcggagcuucuuguugcccuggagaaccaacauacaauugaucuaacugacucagaaaugaacaaacuguuugaaaaaacaaagaagcaacugagggaaaaugcugaggauaugggcaaugguuguuucaaaauauaccacaaaugugacaaugccugcauaggaucaaucagaaauggaacuuaugaccaugauguauacagagaugaagcauuaaacaaccgguuccagaucaagggcguugagcugaagucaggauacaaagauuggauccuauggauuuccuuugccauaucauguuuuuugcuuuguguugcuuuguugggguucaucaugugggccugccaaaaaggcaacauuaggugcaacauuugcauuuga

SEQ ID NO: 33842 - RNA, 1701 nt, Artificial Sequence
  derived and/or modified CDS sequence (wt) from hemagglutinin__InfluenzaA__ABU92682
augaagacuaucauugcuuugagcuacauucuaugucugguuuucgcucaaaaacuucccggaaaugacaacagcacggcaacgcugugccuugggcaccaugcaguaccaaacggaacgauagugaaaacaaucacgaaugaccaaauugaaguuacuaaugcuacugagcugguucagauuuccucaacagguggaauaugcgacaguccucaucagauccuugauggagaaaacugcacacuaauagaugcucuauugggagacccucagugugauggcuuccaaaauaagaaaugggaccuuuuuguugaacgcagcaaagccuacagcaacuguuacccuuaugaugugccggauuaugccucccuuaggucacuaguugccucauccggcacacuggaguuuaacaaugaaagcuucgauuggacuggagucacucagaauggaacaagcucugcuugcaaaaggagaucuaauaaaaguuucuuuaguagauugaauugguugacccacuuaaaauacaaauacccagcauugaacgugacuaugccaaacaaugaaaaauuugacaaauuguacauuugggggguucaccacccggguacggacagugaccaaaucagccuauaugcucaagcaucaggaagaaucacagucucuaccaaaagaagccaacaaacuguaaucccgaauaucggaucuagacccaggguaagggaugucuccagccgaauaagcaucuauuggacaauaguaaaaccgggagacauacuuuugauuaacagcacagggaaucuaauugcuccucgggguuacuucaaaauacgaagugggaaaagcucaauaaugagaucagaugcacccauuggcaaaugcaauucugaaugcaucacuccaaauggaagcauucccaaugacaaaccauuucaaaacguaaacaggaucacauauggggccugucccagauauguuaagcaaaacacucugaaauuggcaacagggaugcgaaauguaccagagaaacaaacuagaggcauauuuggcgcaaucgcggguuucauagaaaaugguugggagggaaugguggacgguugguacgguuucaggcaucaaaauucugagggcacaggacaagcagcagaucucaaaagcacucaagcagcaaucaaccaaaucaaugggaaacugaauagguuaaucgggaaaacaaacgagaaauuccaucagauugaaaaagaauucucggaaguagaaggaagaauucaggaccucgagaaauauguugaggacacuaaaauagaucucuggucauacaacgcggagcuucuuguugcucuggagaaccaacauacaauugaucuaacugacucagaaaugaacaaacuguuugaaagaacaaagaagcaacugagggaaaaugcugaggauaugggcaaugguuguuucaaaauauaccacaaaugugacaaugccugcauagggucaaucagaaauggaacuuaugaccaugauguguacagagaugaagcauuaaacaaccgguuccagaucaaagguguugagcugaagucaggauacaaagauuggauccuauggauuuccuuugccauaucauguuuuuugcuuuguguugcuuuguugggguucaucaugugggccugucagaaaggcaacauuaggugcaacauuugcauuuga

SEQ ID NO: 33843 - RNA, 1701 nt, Artificial Sequence; identical to SEQ ID NO: 33774
  derived and/or modified CDS sequence (wt) from hemagglutinin__InfluenzaA__ABU92683

SEQ ID NO: 33844 - RNA, 1701 nt, Artificial Sequence
  derived and/or modified CDS sequence (wt) from hemagglutinin__InfluenzaA__ABU92684
augaagacuaucauugcuuugagcuacauucuaugucugguuuucgcucaaaaacuucccggaaaugacaacagcacggcaacgcugugccuugggcaccaugcaguaccaaacggaacgauagugaaaacaaucacgaaugaccaaauugaaguuacuaaugcuacugagcugguucagauuuccucaacagguggaauaugcgacaguccucaucagauccuugauggagaaaacugcacacuaauagaugcucuauugggagacccucagugugauggcuuccaaaauaagaaaugggaccuuuuuauugaacgcagcaaagccuacagcaacuguuacccuuaugaugugccggauuaugccucccuuaggucacuaguugccucauccggcacacuggaguuuaacaaugaaagcuucgauuggacuggagucacucagaauggaacaagcucugcuugcaaaaggagaucuaauaaaaguuucuuuaguagauugaauugguugacccacuuaaaauacaaauacccagcauugaacgugacuaugccaaacaaugaaaaauuugacaaauuguacauuugggggguucaccacccggguacggacagugaccaaaucagccuauaugcucaagcaccaggaagaaucacagucucuaccaaaagaagccaacaaacuguaaucccgaauaucggaucuagacccaggguaagggaugucuccagccgaauaagcaucuauuggacaauaguaaaaccgggagacauacuuuugauuaacagcacagggaaucugauugcuccucgggguuacuucaaaauacgaagugggaaaagcucaauaaugagaucagaugcacccauuggcaaaugcaauucugaaugcaucacuccaaauggaagcauucccaaugacaaaccauuucaaaauguaaacaggaucacauauggggccugucccagauauguuaagcaaaacacucugaaauuggcaacagggaugcgaaauguaccagagaaacaaacuagaggcauauuuggcgcaaucgcggguuucauagaaaaugguugggagggaaugguggacgguugguacgguuucaggcaucaaaauucugagggcacaggacaagcagcagaucucaaaagcacucaagcagcaaucaaccaaaucaaugggaaacugaauagguuaaucgggaaaacaaacgagaaauuccaucagauugaaaaagaauucucggaaguagaaggaagaauucaggaccucgagaaauauguugaggacacuaaaauagaucucuggucauacaacgcggagcuucuuguugcccuggagaaccaacauacaauugaucuaacugacucagaaaugaacaaacuguuugaaagaacaaagaagcaacugagggaaaaugcugaggauaugggcaaugguuguuucaaaauauaccacaaaugugacaaugccugcauagggucaaucagaaauggaacuuaugaccaugauguguacagagaugaagcauuaaacaaccgguuucagaucaaagguguugagcugaagucaggauacaaagauuggauccuauggauuuccuuugccauaucauguuuuuugcuuuguguugcuuuguugggguucaucaugugggccugccaaaaaggcaacauuaggugcaacauuugcauuuga

SEQ ID NO: 33845 - RNA, 1701 nt, Artificial Sequence
  derived and/or modified CDS sequence (wt) from hemagglutinin__InfluenzaA__ABU92685
augaagacuaucauugcuuugagcuacauucuaugucugguuuucgcucaaaaacuucccggaaaugacaacagcacggcaacgcugugccuugggcaccaugcaguaccaaacggaacgauagugaaaacaaucacgaaugaccaaaucgaaguuacuaaugcuacugagcugguucagauuuccucaacagguggaauaugcgacaguccucaucagauccuugauggagaaaacugcacacuaauagaugcucuauugggagacccucagugugauggcuuccaaaauaagaaaugggaccuuuuuguugaacgcagcaaagccuacagcaacuguuacccuuaugaugugccggauuaugccucccuuaggucacuaguugccucauccggcacacuggaguuuaacaaugaaagcuucgauuggacuggagucacucagaauggaacaagcucugcuugcaaaaggagaucuaauaaaaguuucuuuaguagauugaauugguugacccacuuaaaauacaaauacccagcauugaacgugacuaugccaaacaaugaaaaauuugacaaauuguacauuugggggguucaccacccggguacggacagugaccaaaucagccuauaugcucaagcaucaggaagaaucacagucucuaccaaaagaagccaacaaacuguaaucccgaauaucggaucuagacccaggguaagggaugucuccagccgaauaagcaucuauuggacaauaguaaaaccgggagacauacuuuugauuaacagcacagggaaucuaauugcuccucgggguuacuucaaaauacgaagugggaaaagcucaauaaugaaaucagaugcacccauuggcaaaugcaauucugaaugcaucacuccaaauggaagcauucccaaugacaaaccauuucaaaauguaaacaggaucacauauggggccugucccagauauguuaagcaaaacacucugaaauuggcaacagggaugcgaaauguaccagagaaacaaacuagaggcauauuuggcgcaaucgcggguuucauagaaaaugguugggagggaaugguggacgguugguacgguuucaggcaucaaaauucugagggcacaggacaagcagcagaucucaaaagcacucaagcagcaaucaaccaaaucaaugggaaacugaauagguuaaucgggaaaacaaacgagaaauuccaucagauugaaaaagaauucucggaaguagaagggagaauucaggaccucgagaaauauguugaggacacuaaaauagaucucuggucauacaacgcggagcuucuuguugcccuggagaaccaacauacaauugaucuaacugacucagaaaugaacaaacuguuugaaagaacaaagaagcaacugagggaaaaugcugaggauaugggcaaugguuguuucaaaauauaccacaaaugugacaaugccugcauagggucaaucagaaauggaacuuaugaccaugauguguacagagaugaagcauuaaacaaccgguuccagaucaaagguguugagcugaagucaggauacaaagauuggauccuauggauuuccuuugccauaucauguuuuuugcuuuguguugcuuuguugggguucaucaugugggccugccaaaaaggcaacauuaggugcaacauuugcauuuga

SEQ ID NO: 33846 - RNA, 1701 nt, Artificial Sequence; identical to SEQ ID NO: 33792
  derived and/or modified CDS sequence (wt) from hemagglutinin__InfluenzaA__ABU92686

SEQ ID NO: 33847 - RNA, 1701 nt, Artificial Sequence; identical to SEQ ID NO: 33774
  derived and/or modified CDS sequence (wt) from hemagglutinin__InfluenzaA__ABU92687

SEQ ID NO: 33848 - RNA, 1701 nt, Artificial Sequence
  derived and/or modified CDS sequence (wt) from hemagglutinin__InfluenzaA__ABU92688
augaagacuaucauugcuuugagcuacauucuaugucugguuuucgcucaaaaacuccccggaaaugacaacagcacggcaacgcugugccuugggcaccaugcaguaccaaacggaacgauagugaaaacaaucacgaaugaccaaauugaaguuacuaaugcuacugagcugguucagaguuccucaacagguggaauaugcgacaguccucaucagauccuugauggagaaaacugcacacuaauagaugcucuauugggagacccucagugugauggcuuccaaaauaagaaaugggaccuuuuuguugaacgcagcaaagccuacagcaacuguuacccuuaugaugugccggauuaugccucccuuaggucacuaguugccucauccggcacacuggaguuuaacaaugaaagcuucaauuggacuggagucacucaaaauggaacaagcucugcuugcaaaaggagaucuaauaaaaguuucuuuaguagauugaauugguugacccacuuaaaauucaaauacccagcauugaacgugacuaugccaaacaaugaaaaauuugacaaauuguacauuugggggguucaccacccggguacggacaaugaccaaaucagccuauaugcccaagcaucaggaagaaucacagucucuaccaaaagaagccaacaaacuguaaucccgaauaucggaucuagaccuaggguaagggauguccccagcagaauaagcaucuauuggacaauaguaaaaccgggagacauacuuuugauuaacagcacagggaaucuaauugcuccucgggguuacuucaaaauacgaagugggaaaagcucaauaaugagaucagaugcacccauuggcaaaugcaauucugaaugcaucacuccaaauggaagcauucccaaugacaaaccauuucaaaauguaaacaggaucacauauggggccugucccagauauguuaagcaaaacacucugaaauuggcaacagggaugcgaaauguaccagagaaacaaacuagaggcauauuuggcgcaaucgcggguuucauagaaaaugguugggagggaaugguggaugguugguacgguuucaggcaucaaaauucugagggaacaggacaagcagcagaucucaaaagcacucaagcagcaaucaaccaaaucaaugggaagcugaauagguugaucgggaaaaccaacgagaaauuccaucagauugaaaaagaauucucagaaguagaagggagaauucaggaccucgagaaauauguugaggacacuaaaauagaucucuggucauacaacgcggagcuucuuguugcccuggagaaccaacauacaauugaucuaacugacucagaaaugaacaaacuguuugaaagaacaaagaagcaacugagggaaaaugcugaggauaugggcaaugguuguuucaaaauauaccacaaaugugacaaugccugcauagggucaaucagaaauggaacuuaugaccaugauguauacagagaugaagcauuaaacaaccgguuccagaucaaagguguugagcugaagucaggauacaaagauuggauccuauggauuuccuuugccauaucauguuuuuugcuuuguguugcuuuguugggguucaucaugugggccugccaaaaaggcaacauuaggugcaacauuugcauuuga

SEQ ID NO: 33849 - RNA, 1701 nt, Artificial Sequence; identical to SEQ ID NO: 33774
  derived and/or modified CDS sequence (wt) from hemagglutinin__InfluenzaA__ABU92689

SEQ ID NO: 33850 - RNA, 1701 nt, Artificial Sequence
  derived and/or modified CDS sequence (wt) from hemagglutinin__InfluenzaA__ABU92691
augaagacuaucauugcuuugagcuacauucuaugucugguuuucgcucaaaaacuucccggaaaugacaacagcacggcaacgcugugccuugggcaccaugcaguaccaaacggaacgauagugaaaacaaucacgaaugaccaaauugaaguuacuaaugcuacugagcugguucagauuuccucaacagguggaauaugcgacaguccucaucagauccuugauggagaaaacugcacacuaauagaugcucuauugggagacccucagugugauggcuuccaaaauaagaaaugggaccuuuuuguugaacgcagcaaagccuacagcaacuguuacccuuaugaugugccggauuaugccucccuuaggucacuaguugccucauccggcacacuggaguuuaacaaugaaagcuucgauuggacuggagucacucagaauggaacaagcucugcuugcaaaaggagaucuaauaaaaguuucuuuaguagauugaauugguugacccacuuaaaauacaaauacccagcauugaacgugacuaugccaaacaaugaaaaauuugacaaauuguacauuugggggguucaccacccggguacggacagugaccaaaucagccuauaugcucaagcaucaggaagaaucacagucucuaccaaaagaagccaacaaacuguaaucccgaauaucggaucuagacccaggguaagggaugucuccagccgaauaagcaucuauuggacaauaguaaaaccgggagacauacuuuugauuaacagcacagggaaucuaauugcuccucgggguuacuucaaaauacgaagugggaaaagcucaguaaugagaucagaugcacccauuggcaaaugcaauucugaaugcaucacuccaaauggaagcauucccaaugacaaaccauuucaaaaugucaacaggaucacauauggggccugucccagauauguuaagcaaaacacucugaaauuggcaacagggaugcgaaauguaccagagaaacaaacuagaggcauauuuggcgcaaucgcggguuucauagaaaaugguugggagggaaugguggacgguugguacgguuucaggcaucaaaauucugagggcacaggacaagcagcagaucucaaaagcacucaagcagcaaucaaccaaaucaaugggaaacugaauagguuaaucgggaaaacaaacgagaaauuccaucagauugaaaaagaauucucggaaguagaaggaagaauucaggaccucgagaaauauguugaggacacuaaaauagaucucuggucauacaaugcggagcuucuuguugcccuggagaaccaacauacaauugaucuaacugacucagaaaugaacaaacuguuugaaagaacaaagaagcaacugagggaaaaugcugaggauauaggcaaugguuguuucaaaauauaccacaaaugugacaaugccugcauagggucaaucagaaauggaacuuaugaccauaauguguacagagaugaagcauuaaacaaccgguuccagaucaaagguguugagcugaagucgggauacaaagauuggauccuauggauuuccuuugccauaucauguuuuuugcuuuguguugcuuuguugggguucaucaugugggccugccaaaaaggcaacauuaggugcaacauuugcauuuga

SEQ ID NO: 33851 - RNA, 1701 nt, Artificial Sequence
  derived and/or modified CDS sequence (wt) from hemagglutinin__InfluenzaA__ABU92692
augaagacuaucauugcuuugagcuacauucuaugucugguuuucgcucaaaaacuucccggaaaugacaacagcacggcaacgcugugccuugggcaccaugcaguaccaaacggaacgauagugaaaacaaucacgaaugaccaaauugaaguuacuaaugcuacugagcugguucagauuuccucaacagguggaauaugcgacaguccuuaucagauccuugauggagaaaacugcacacuaauagaugcucuauugggagacccucagugugauggcuuccaaaauaagaaaugggaccuuuuuguugaacgcagcaaagccuacagcaacugcuacccuuaugaugugccggauuaugccucccuuaggucacuaguugccucauccggcacacuggaguuuaacaaugaaagcuucgauuggacuggagucacucagaauggaacaagcucugcuugcaaaaggagaucuaauaaaaguuucuuuaguagauugaauugguugacccacuuaaaauacaaauacccagcauugaacgugacuaugccaaacaaugaaaaauuugacaaauuguacauuugggggguucaccacccggguacagacagugaccaaaucagccuauaugcucaagcaucaggaagaaucacagucucuaccaaaagaagccaacaaacuguaaucccgaauaucggaucuagacccaggguaagggaugucuccagccgaauaagcaucuauuggacaauaguaaaaccgggagacauacuuuugauuaacagcacagggaaucuaauugcuccucgggguuacuucaaaauacgaagugggaaaagcucaauaaugagaucagaugcacccauuggcaaaugcaauucugaaugcaucacuccaaauggaagcauucccaaugacaaaccauuucaaaauguaaacagaaucacauauggggccugucccagauauguuaagcaaaacacucugaaauuggcaacagggaugcgaaauguaccagagaaacaaacuagaggcauauuuggcgcaaucgcggguuucauagaaaaugguugggagggaaugguggacgguugguacgguuucaggcaucaaaauucugagggcacaggacaagcagcagaucucaaaagcacucaagcagcaaucaaccaaaucaaugggaaacugaauagguuaaucgggaaaacaaacgagaaauuccaucagauugaaaaagaauucucggaaguagaaggaagaauucaggaccucgagaaauauguugaggacacuaaaauagaucucuggucauacaacgcggagcuucuuguugcccuggagaaccaacauacaauugaucuaacugacucagaaaugaacaaacuguuugaaagaacaaagaagcaacugagggaaaaugcugaggauaugggcaaugguuguuucaaaauauaccacaaaugugacaaugccugcauagggucaaucagaaauggaacuuaugaccaugauguguacagagaugaagcauugaacaaccgguuucagaucaaagguguugagcugaagucaggauacaaagauuggauccuauggauuuccuuugccauaucauguuuuuugcuuuguguugcuuuguugggguucaucaugugggccugccaaaaaggcaacauuaggugcaacauuugcauuuga

SEQ ID NO: 33852 - RNA, 1701 nt, Artificial Sequence
  derived and/or modified CDS sequence (wt) from hemagglutinin__InfluenzaA__ABU92693
augaaggcuaucauugcuuugagcuacauucuaugucugguuuucgcucaaaaacuucccggaaaugacaacagcacggcaacgcugugccuugggcaccaugcaguaccaaacggaacgauagugaaaacaaucacgaaugaccaaauugaaguuacuaaugcuacugagcugguucagauuuccucaacaggugaaauaugcgacaguccccaucagauccuugauggagaaaacugcacacuaauagaugcucuauugggagacccucagugugauggcuuccaaaauaagaaaugggaccuuuuuguugaacgcagcaaagccuacagcaacuguuacccuuaugaugugccggauuaugccucccuuaggucacuaguugccucauccggcacacuggaguuuaacaaugaaagcuucgauuggacuggagucacucagaauggaacaagcucugcuugcaaaaggagaucugauaaaaguuucuuuaguagauugaauugguugacccacuuaaaauacaaauacccagcauugaacguaacuaugccaaacaaugaaaaauuugacaaauuguacauuugggggguucaccacccggguacggacagugaccaaaucagccuauaugcucaagcaucaggaagaaucacagucucuaccaaaagaagccaacaaacuguaaucccgaauaucggaucuagacccaggguaagggaugucuccagccgaauaagcaucuauuggacaauaguaaaaccgggagacauacuuuugauuaacagcacagggaaucuaauugcuccucgggguuacuucaaaauacgaagugggaaaagcucaauaaugagaucagaugcacccauuggcaaaugcaauucugaaugcaucacuccaaauggaagcauucccaaugacaaaccauuucaaaauguaaacaggaucacauauggggccugucccagauauguuaagcaaaacacucugaaauuggcaacagggaugcgaaauguaccagagaaacaaacuagaggcauauuuggcgcaaucgcggguuucauagaaaaugguugggagggaaugguggacgguugguacgguuucaggcaucaaaauucugagggcacaggacaagcagcagaucucaaaagcacucaagcagcaaucaaccaaaucaaugggaaacugaauagguuaaucgggaaaacaaacgagaaauuccaucagauugaaaaagaauucucggaaguagaaggaagaauucaggaccucgagaaauauguugaggacacuaaaauagaucucuggucauacaacgcggagcuucuuguugcccuggagaaccaacauacaauugaucuaacugacucagaaaugaacaaacuguuugaaagaacaaagaagcaacugagggaaaaugcugaggauaugggcaaugguuguuucaaaauauaccacaaaugugacaaugccugcauagggucaaucagaaauggaacuuaugaccaugauguguacagagaugaagcauuaaacaaccgguuccaaaucaaagguguugaguugaagucaggauacaaagauuggauccuauggauuuccuuugccauaucauguuuuuugcuuuguguugcuuuguugggguucaucaugugggccugccaaaaaggcaacauuaggugcaacauuugcauuuga

SEQ ID NO: 33853 - RNA, 1701 nt, Artificial Sequence
  derived and/or modified CDS sequence (wt) from hemagglutinin__InfluenzaA__ABU92694
augaagacuaucauugcuuugagcuacauucuaugucugguuuucgcucaaaaacuucccggaaaugacaacagcacggcaacgcugugccuugggcaccaugcaguaccaaacggaacgauagugaaaacaaucacgaaugaccaaauugaaguuacuaaugcuacugagcugguucagaguuccucaacagguggaauaugcgacaguccucaucagauccuugauggagaaaacugcacacuaauagaugcucuauugggagacccucagugugauggcuuccaaaauaagaaaugggaccuuuuuguugaacgcagcaaagccuacagcaacuguuacccuuaugaugugccggauuaugccucccuuaggucacuaguugccucauccggcacacuggaguuuaacaaugaaagcuucaauuggacuggagucacucaaaauggaacaagcucugcuugcaaaaggagaucuaauaacaguuucuuuaguagauugaauugguugacccacuuaaaauucaaauacccagcauugaacgugacuaugccaaacaaugaaaaauuugacaaauuguacauuugggggguucaccacccggguacggacaaugaccaaaucagccuauaugcucaagcuucaggaagaaucacagucucuaccaaaagaagccaacaaacuguaaucccgaauaucggaucuagacccaggguaagggauauccccagcagaauaagcaucuauuggacaauaguaaaaccgggagacauacuuuugauuaacagcacagggaaucuaauugcuccucgggguuacuucaaaauacgaagugggaaaagcucaauaaugagaucagaugcacccauuggcaaaugcaauucugaaugcaucacuccaaauggaagcauucccaaugacaaaccauuucaaaauguaaacaggaucacauauggggccugucccagauauguuaagcaaaacacucugaaauuggcaacagggaugcgaaauguaccagagaaacaaacuagaggcauauuuggcgcaaucgcggguuucauagaaaaugguugggagggaaugguggaugguugguacgguuucaggcaucaaaauucugagggaauaggacaagcagcagaucucaaaagcacucaagcagcaaucaaccaaaucaaugggaagcugaauagguugaucgggaaaaccaacgagaaauuccaucagauugaaaaggaauucucagaaguagaagggagaauucaggaccucgagaaauauguugaggacacuaaaguagaucucuggucauacaacgcagagcuucuuguugcccuggagaaccaacauacaauugaucuaacugacucagaaaugaacaaacuguuugaaagaacaaagaagcaacugagggaaaaugcugaggauaugggcaaugguuguuucaaaauauaccacaaaugugacaaugccugcauagggucaaucagaaauggaacuuaugaccaugauguauacagagaugaagcauuaaacaaccgguuccagaucaaagguguugagcugaagucaggauacaaagauuggauccuauggauuuccuuugccauaucauguuuuuugcuuuguguugcuuuguugggguucaucaugugggccugccaaaaaggcaacauuaggugcaacauuugcauuuga

SEQ ID NO: 33854 - RNA, 1701 nt, Artificial Sequence
  derived and/or modified CDS sequence (wt) from hemagglutinin__InfluenzaA__ABU92695
augaagacuaucauugcuuugagcuacauucuaugucugguuuucgcucaaaaacuucccggaaaugacaacagcacggcaacgcugugccuugggcaccaugcaguaccaaacggaacgauagugaaaacaaucacgaaugaccaaauugaaguuacuaaugcuacugagcugguucagaguuccucaacagguggaauaugcgacaguccucaucagauccuugauggagaaaacugcacacuaauagaugcucuauugggagacccucagugugauggcuuccaaaauaagaaaugggaccuuuuuguugaacgcagcaaagccuacagcaacuguuacccuuaugaugugccggauuaugccucccuuaggucacuaauugccucauccggcacacuggaguuuaacaaugaaagcuucaauuggacuggagucacucaaaauggaacaagcucugcuugcaaaaggagaucuaauagcaguuucuuuaguagauugaauugguugacccacuuaaaauucaaauacccagcauugaacgugacuaugccaaacaaugaagaauuugacaaauuguacauuugggggguucaccacccggguacagacaaugaccaaaucagccuauaugcucaagcaucaggaagaaucacagucucuaccaaaagaagccaacaaacuguaaucccgaauaucggaucuagaccccggguaagggauauccccagcagaauaagcaucuauuggacaauaguaaaaccgggagacauacuuuugauuaacagcacagggaaucuaauugcuccucgggguuacuucaaaauacgaagugggaaaagcucaauaaugagaucagaugcacccauuggcaaaugcaauucugaaugcaucacuccaaauggaagcauucccaaugacaaaccauuucaaaauguaaacaggaucacauauggggccugucccagauauguuaagcaaaacacucugaaauuggcaacagggaugcgaaauguaccagagaaacaaacuagaggcauauuuggcgcaaucgcggguuucauagaaaaugguugggagggaaugguggaugguugguacgguuucaggcaucaaaauucugagggaauaggacaagcagcagaucucaaaagcacucaagcagcaaucgaccaaaucaaugggaagcugaauagguugaucgggaaaaccaacgagaaauuccaucagauugaaaaagaauucucagaaguagaagggagaauucaggaccucgagaaauauguugaggacacuaaaauagaucucuggucauacaacgcggagcuucuuguugcccuggagaaccaacauacaauugaucuaacugacucagaaaugaacaaacuguuugaaagaacaaagaagcaacugagggaaaaugcugaggauaugggcaaugguuguuucaaaauauaccacaaaugugacaaugccugcauagggucaaucagaaauggaacuuaugaccaugauguauacagagaugaagcauuaaacaaccgguuccagaucaaagguguugagcugaagucaggauacaaagauuggauccuauggauuuccuuugccauaucauguuuuuugcuuuguguugcuuuguugggguucaucaugugggccugccaaaaaggcaacauuaggugcaacauuugcauuuga

SEQ ID NO: 33855 - RNA, 1701 nt, Artificial Sequence
  derived and/or modified CDS sequence (wt) from hemagglutinin__InfluenzaA__ABU92696
augaagacuaucauugcuuugggcuacauucuaugucugguuuucgcucaaaaacuucccggaaaugacaacagcacggcaacgcugugccuugggcaccaugcaguaccaaacggaacgauagugaaaacaaucacgaaugaccaaauugaaguuacuaaugcuacugagcugguucagaguuccucaacagguggaauaugcgacaguccucaucagauccuugauggagaaaacugcacacuaauagaugcucuauugggagacccucagugugauggcuuccaaaauaagaaaugggaccuuuuuguugaacgcagcaaagccuacagcaacuguuacccuuaugaugugccggauuaugccucccuuaggucacuaauugccucauccggcacacuggaguuuaacaaugaaagcuucaauuggacuggagucacucaaaauggaacaagcucugcuugcaaaaggagaucuaauagcaguuucuuuaguagauugaauugguugacccacuuaaaauucaaauacccagcauugaacgugacuaugccaaacaaugaagaauuugacaaauuguacauuugggggguucaccacccggguacagacaaugaccaaaucagccuauaugcucaagcaucaggaagaaucacagucucuaccaaaagaagccaacaaacuguaaucccgaauaucggaucuagacccaggguaagggauauccccagcagaauaagcaucuauuggacaauaguaaaaccgggagacauacuuuugauuaacagcacagggaaucuaauugcuccucgggguuacuucaaaauacgaagugggaaaagcucaauaaugagaucagaugcacccauuggcaaaugcaauucugaaugcaucacuccaaauggaagcauucccaaugacaaaccauuucaaaauguaaacaggaucacauauggggccugucccagauauguuaagcaaaacacucugaaauuggcaacagggaugcgaaauguaccagagaaacaaacuagaggcauauuuggcgcaaucgcggguuucauagaaaaugguugggagggaaugguggaugguugguacgguuucaggcaucaaaauucugagggaauaggacaagcagcagaucucaaaagcacucaagcagcaaucgaccaaaucaaugggaagcugaauagguugaucgggaaaaccaacgagaaauuccaucagauugaaaaagaauucucagaaguagaagggagaauucaggaccucgagaaauauguugaggacacuaaaauagaucucuggucauacaacgcggagcuucuuguugcccuggagaaccaacauacaauugaucuaacugacucagaaaugaacaaacuguuugaaagaacaaagaagcaacugagggaaaaugcugaggauaugggcaaugguuguuucaaaauauaccacaaaugugacaaugccugcauagggucaaucagaaauggaacuuaugaccaugauguauacagagaugaagcauuaaacaaccgguuccagaucaaagguguugagcugaagucaggauacaaagauuggauccuauggauuuccuuugccauaucauguuuuuugcuuuguguugcuuuguugggguucaucaugugggccugccaaaaaggcaacauuaggugcaacauuugcauuuga

SEQ ID NO: 33856 - RNA, 1701 nt, Artificial Sequence
  derived and/or modified CDS sequence (wt) from hemagglutinin__InfluenzaA__ABU92697
augaagacuaucauugcuuugagcuacauucuaugucugguuuucgcucaaaaacuucccggaaaugacaacagcacggcaacgcugugccuugggcaccaugcaguaccaaacggaacgauagugaaaacaaucacgaaugaccaaauugaaguuacuaaugcuacugagcugguucagaguuccucaacagguggaauaugcgacaguccucaucagauccuugauggagaaaacugcacacuaauagaugcucuauugggagacccucagugugauggcuuccaaaauaagaaaugggaccuuuuuguugaacgcagcaaagccuacagcaacuguuacccuuaugaugugccggauuaugccucccuuaggucacuaauugccucauccggcacacuggaguuuaacaaugaaagcuucaauuggacuggagucacucaaaauggaacaagcucugcuugcaaaaggagaucuaauagcaguuucuuuaguagauugaauugguugacccacuuaaaauucaaauacccagcauugaacgugacuaugccaaacaaugaagaauuugacaaauuguacauuugggggguucaccacccggguacauacaaugaccaaaucagccuauaugcucaagcaucaggaagaaucacagucucuaccaaaagaagccaacaaacuguaaucccgaauaucgggucuagacccaggguaagggacauccccagcagaauaagcaucuauuggacaauaguaaaaccgggagacauacuuuugauuaacagcacagggaaucuaauugcuccucgggguuacuucaaaauacgaagugggaaaagcucaauaaugagaucagaugcacccauuggcaaaugcaauucugaaugcaucacuccaaauggaagcauucccaaugacaaaccauuucaaaauguaaacaggaucacauauggggccugucccagauauguuaagcaaaacacucugaaauuggcaacagggaugcgaaauguaccagagaaacaaacuagaggcauauuuggcgcaaucgcggguuucauagaaaaugguugggagggaaugguggaugguugguacgguuucaggcaucaaaauucugagggaauaggacaagcagcagaucucaaaagcacucaagcagcaaucgaccaaaucaaugggaagcugaauagguugaucgggaaaaccaacgagaaauuccaucagauugaaaaagaauucucagaaguagaagggagaauucaggaccucgagaaauauguugaggacacuaaaauagaucucuggucauacaacgcggagcuucuuguugcccuggagaaccaacauacaauugaucuaacugacucagaaaugaacaaacuguuugaaagaacaaagaagcaacugagggaaaaugcugaggauaugggcaaugguuguuucaaaauauaccacaaaugugacaaugccugcauagggucaaucagaaauggaacuuaugaccaugauguauacagagaugaagcauuaaacaaccgguuccagaucaaagguguugagcugaagucaggauacaaagauuggauccuauggauuuccuuugccauaucauguuuuuugcuuuguguugcuuuguugggguucaucaugugggccugccaaaaaggcaacauuaggugcaacauuugcauuuga

SEQ ID NO: 33857 - RNA, 1701 nt, Artificial Sequence
  derived and/or modified CDS sequence (wt) from hemagglutinin__InfluenzaA__ABU92698
augaagacuaucauugcuuugagcuacauucuaugucugguuuucgcccaaaaacuucccggaaaugacaacagcacggcaacgcugugccuugggcaccaugcaguaccaaacggaacgauagugaaaacaaucacgaaugaccaaauugaaguuacuaaugcuacugagcugguucagaguuccucaacagguggaauaugcgacaguccucaucagauccuugauggagaaaacugcacacuaauagaugcucuauugggagacccucagugugauggcuuccaaaauaagaaaugggaccuuuuuguugaacgcagcaaagccuacagcaacuguuacccuuaugaugugccggauuaugccucccuuaggucacuaguugccucauccggcacacuggaguuuaacaaugaaagcuucaauuggacuggagucacucaaaauggaacaagcucugcuugcaaaaggagaucuaauaacaguuucuuuaguagauugaauugguugacccacuuaaaauucaaauacccagcauugaacgugacuaugccaaacaaugaaaaauuugacaaauuguacauuugggggguucaccacccggguacggacaaugaccaaaucagccuauaugcucaagcuucaggaagaaucacagucucuaccaaaagaagccaacaaacuguaaucccgaauaucggaucuagacccaggguaagggauauccccagcagaauaagcaucuauuggacaauaguaaaaccgggagacauacuuuugauuaacagcacagggaaucuaauugcuccucgggguuacuucaaaauacgaagugggaaaagcucaauaaugagaucagaugcacccauuggcaaaugcaauucugaaugcaucacuccaaauggaagcauucccaaugacaaaccauuucaaaauguaaacaggaucacauauggggccugucccagauauguuaagcaaaacacucugaaauuggcaacagggaugcgaaauguaccagagaaacaaacuagaggcauauuuggcgcaaucgcggguuucauagaaaaugguugggagggaaugguggaugguugguacgguuucaggcaucaaaauucugagggaauaggacaagcagcagaucucaaaagcacucaagcagcaaucaaccaaaucaaugggaagcugaauagguugaucgggaaaaccaacgagaaauuccaucagauugaaaaagaauucucagaaguagaagggagaauucaggaccucgagaaauauguugaggacacuaaaauagaucucuggucauacaacgcggagcuucuuguugcccuggagaaccaacauacaauugaucuaacugacucagaaaugaacaaacuguuugaaagaacaaagaagcaacugagggaaaaugcugaggauaugggcaaugguuguuucaaaauauaccacaaaugugacaaugccugcauagggucaaucagaaauggaacuuaugaccaugauguauacagagaugaagcauuaaacaaccgguuccagaucaaagguguugagcugaagucaggauacaaagauuggauccuauggauuuccuuugccauaucauguuuuuugcuuuguguugcuuuguugggguucaucaugugggccugccaaaaaggcaacauuaggugcaacauuugcauuuga

SEQ ID NO: 33858 - RNA, 1701 nt, Artificial Sequence
  derived and/or modified CDS sequence (wt) from hemagglutinin__InfluenzaA__ABU92699
augaagacuaucauugcuuugagcuacauucuaugucugguuuucgcucaaaaacuucccggaaaugacaacagcacggcaacgcugugccuugggcaccaugcaguaccaaacggaacgauagugaaaacaaucacgaaugaccaaauugaaguuacuaaugcuacugagcugguucagaguuccucaacagguggaauaugcgacaguccucaucagauccuugauggagaaaacugcacacuaauagaugcucuauugggagacccucagugugauggcuuccaaaauaagaaaugggaccuuuuuguugaacgcagcaaagccuacagcaacuguuacccuuaugaugugccggauuaugccucccuuaggucacuaguugccucauccggcacacuggaguuuaacaaugaaagcuucaauugggcuggagucacucaaaacggaacaagcucugcuugcaaaaggagaucuaauaacaguuucuuuaguagauugaauugguugacccacuuaaaauucaaauacccagcauugaacgugacuaugccaaacaaugaaaaauuugacaaauuguacauuugggggguucaccacccggguacggacaaugaccaaaucuuccuguaugcucaagcaucaggaagaaucacagucucuaccaaaagaagccaacaaacuguaaucccgaauaucggaucuagacccagaguaaggaauauccccagcagaauaagcaucuauuggacaauaguaaaaccgggagacauacuuuugauuaacagcacagggaaucuaauugcuccuagggguuacuucaaaauacgaagugggaaaagcucaauaaugagaucagaugcacccauuggcaaaugcaauucugaaugcaucacuccaaauggaagcauucccaaugacaaaccauuucaaaauguaaacaggaucacauacggggccugucccagauauguuaagcaaaacacucugaaauuggcaacagggaugcgaaauguaccagagaaacaaacuagaggcauauuuggcgcaaucgcggguuucauagaaaaugguugggagggaaugguggaugguugguacgguuucaggcaucaaaauucugagggaauaggacaagcagcagaucucaaaagcacucaagcagcaaucgaucaaaucaaugggaagcugaauagguugaucgggaaaaccaacgagaaauuccaucagauugaaaaagaauucucagaaguagaagggagaauucaggaccucgagaaauauguugaggacacuaaaauagaucucuggucauacaacgcggagcuucuuguugcccuggagaaccaacauacaauugaucuaacugacucagaaaugaacaaacuguuugaaaaaacaaagaagcaacugagggaaaaugcugaggauaugggcaaugguuguuucaaaauauaccacaaaugugacaaugccugcauaggaucaaucagaaauggaacuuaugaccaugauguauacagagaugaagcauuaaacaaccgguuccagaucaagggcguugagcugaagucaggauacaaagauuggauccuauggauuuccuuugccauaucauguuuuuugcuuuguguugcuuuguugggguucaucaugugggccugccaaaaaggcaacauuaggugcaacauuugcauuuga

SEQ ID NO: 33859 - RNA, 1701 nt, Artificial Sequence
  derived and/or modified CDS sequence (wt) from hemagglutinin__InfluenzaA__ABU92700
augaagacuaucauugcuuugagcuacauucuaugucugguuuucgcucaaaaacuucccgaaaaugacaacagcacggcaacgcugugccuugggcaccaugcaguaccaaacggaacgauagugaaaacaaucacgaaugaccaaauugaaguuacuaaugcuacugagcugguucagaguuccucaacagguggaauaugcgacaguccucaucagauccuugauggagaaaacugcacacuaauagaugcucuauugggagacccucagugugauggcuuccaaaauaagaaaugggaccuuuuuguugaacgcagcaaagccuacagcaacuguuacccuuaugaugugccggauuaugccucccuuaggucacuaguugccucauccggcacacuggaguuuaacaaugaaagcuucaauuggacuggagucacucaaaacggaacaagcucugcuugcaaaaggagaucuaauaacaguuucuuuaguagauugaauugguugacccacuuaaaauucaaauacccagcauugaacgugacuaugccaaacaaugaaagauuugacaaauuguacauuugggggguucaccacccggguacggacaaugaccaaaucuuccuguaugcucaagcaucaggaagaaucacagucucuaccaaaagaagccaacaaacuguaaucccgaauaucggaucuagacccagaguaaggaauauccccagcagaauaagcaucuauuggacaauaguaaaaccgggagacauacuuuugauuaacagcacagggaaucuaauugcuccuagggguuacuucaaaauacgaagugggaaaagcucaauaaugagaucagaugcacccauuggcaaaugcaauucugaaugcaucacuccaaauggaagcauucccaaugacaaaccauuucaaaauguaaacaggaucacauauggggccugucccagauauguuaagcaaaacacucugaaauuggcaacagggaugcgaaauguaccagagaaacaaacuagaggcauauuuggcgcaaucgcggguuucauagaaaaugguugggagggaaugguggaugguugguacgguuucaggcaucaaaauucugagggaauaggacaagcagcagaucucaaaagcacucaagcagcaaucgaucaaaucaaugggaagcugaauagguugaucgggaaaaccaacgagaaauuccaucagauugaaaaagaauucucagaaguagaagggagaauucaggaccucgagaaauauguugaggacacuaaaauagaucucuggucauacaacgcggagcuucuuguugcccuggagaaccaacauacaauugaucuaacugacucagaaaugaacaaacuguuugaaaaaacaaagaagcaacugagggaaaaugcugaggauaugggcaaugguuguuucaaaauauaccacaaaugugacaaugccugcauaggaucaaucagaaauggaacuuaugaccaugauguauacagagaugaagcauuaaacaaccgguuccagaucaagggcguugagcugaagucaggauacaaagauuggauccuauggauuuccuuugccauaucauguuuuuugcuuuguguugcuuuguugggguucaucaugugggccugccaaaaaggcaacauuaggugcaacauuugcauuuga

SEQ ID NO: 33860 - RNA, 1701 nt, Artificial Sequence
  derived and/or modified CDS sequence (wt) from hemagglutinin__InfluenzaA__ABU92701
augaagacuaucauugcuuugagcuacauucuaugucugguuuucgcucaaaaacuucccgaaaaugacaacagcacggcaacgcugugccuugggcaccaugcaguaccaaacggaacgauagugaaaacaaucacgaaugaccaaauugaaguuacuaaugcuacugagcugguucagaguuccucaacagguggaauaugcgacaguccucaucagauccuugauggagaaaacugcacacuaauagaugcucuauugggagacccucagugugauggcuuccaaaauaagaaaugggaccuuuuuguugaacgcagcaaagccuacagcaacuguuacccuuaugaugugccggauuaugccucccuuaggucacuaguugccucauccggcacacuggaguuuaacaaugaaagcuucaauuggacuggagucacucaaaacggaacaagcucugcuugcaaaaggagaucuaauaacaguuucuuuaguagauugaauugguugacccacuuaaaauucaaauacccagcauuaaacgugacuaugccaaacaaugaaagauuugacaaauuguacauuugggggguucaccacccggguacggacaaugaccaaaucuuccuguaugcucaagcaucaggaagaaucacagucucuaccaaaagaagccaacaaacuguaaucccgaauaucggaucuagacccagaguaaggaauauccccagcagaauaagcaucuauuggacaauaguaaaaccgggagacauacuuuugauuaacagcacagggaaucuaauugcuccuagggguuacuucaaaauacgaagugggaaaagcucaauaaugagaucagaugcacccauuggcaaaugcaauucugaaugcaucacuccaaauggaagcauucccaaugacaaaccauuucaaaauguaaacaggaucacauauggggccugucccagauauguuaagcaaaacacucugaaauuggcaacagggaugcgaaauguaccagagaaacaaacuagaggcauauuuggcgcaaucgcggguuucauagaaaaugguugggagggaaugguggaugguugguacgguuucaggcaucaaaauucugagggaauaggacaagcagcagaucucaaaagcacucaagcagcaaucgaucaaaucaaugggaagcugaauagguugaucgggaaaaccaacgagaaauuccaucagauugaaaaagaauucucagaaguagaagggagaauucaggaccucgagaaauauguugaggacacuaaaauagaucucuggucauacaacgcggagcuucuuguugcccuggagaaccaacauacaauugaucuaacugacucagaaaugaacaaacuguuugaaaaaacaaagaagcaacugagggaaaaugcugaggauaugggcaaugguuguuucaaaauauaccacaaaugugacaaugccugcauaggaucaaucagaaauggaacuuaugaccaugauguauacagagaugaagcauuaaacaaccggcuccagaucaagggcguugagcugaagucaggauacaaagauuggauccuauggauuuccuuugccauaucauguuuuuugcuuuguguugcuuuguugggguucaucaugugggccugccaaaaaggcaacauuaggugcaacauuugcauuuga

SEQ ID NO: 33861 - RNA, 1701 nt, Artificial Sequence; identical to SEQ ID NO: 32624
  derived and/or modified CDS sequence (wt) from hemagglutinin__InfluenzaA__ABU92702

SEQ ID NO: 33862 - RNA, 1701 nt, Artificial Sequence
  derived and/or modified CDS sequence (wt) from hemagglutinin__InfluenzaA__ABU92703
augaagacuaucauugcuuugagcuacauucuaugucugguuuucgcucaaaaacuucccggaaaugacaacagcacggcaacgcugugccuugggcaccaugcaguaccaaacggaacgauagugaaaacaaucacgaaugaccaaauugaaguuacuaaugcuacugagcugguucagaguuccucaacagguggaauaugcgacaguccucaucagauccuugauggagaaaacugcacacuaauagaugcucuauugggagacccucagugugauggcuuccaaaauaagaaaugggaccuuuuuguugaacgcagcaaagccuacagcaacuguuacccuuaugaugugccggauuaugccucccuuaggucacuaguugccucauccggcacacuggaguuuaacaaugaaagcuucaauuggacuggagucacucaaaauggaacaagcucugcuugcaaaaggagaucuaauaacaguuucuuuaguagauugaauugguugacccacuuaaaauucaaauacccagcauugaacgugacuaugccaaacaaugaaaaauuugacaaauuguacauuugggggguucaccacccggguacggacaaugaccaaaucuuccuguaugcucaagcaucaggaagaaucacagucucuaccaaaagaagccaacaaacuguaaucccgaauaucggaucuagacccagaguaaggaauauccccagcagaauaagcaucuauuggacaauaguaaaaccgggagacauacuuuugauuaacagcacagggaaucuaauugcuccuagggguuacuucaaaauacgaagugggaaaagcucaauaaugagaucagaugcacccauuggcaaaugcaauucugaaugcaucacuccaaauggaagcauucccaaugacaaaccauuucaaaauguaaacaggaucacauacggggccugucccagauauguuaagcaaaacacucugaaauuggcaacagggaugcgaaauguaccagagaaacaaacuagaggcauauuuggcgcaaucgcggguuucauagaaaaugguugggagggaaugguggaugguugguacgguuucaggcaucaaaauucugagggaauaggacaagcagcagaucucaaaagcacucaagcagcaaucgaucaaaucaaugggaagcugaauagguugaucgggaaaaccaacgagaaauuccaucagauugaaaaagaauucucagaaguagaagggagaauucaggaccucgagaaauauguugaggacacuaaaauagaucucuggucauacaacgcggagcuucuuguugcccuggagaaccaacauacaauugaucuaacugacucagaaaugaacaaacuguuugaaaaaacaaagaagcaacugagggaaaaugcugaggauaugggcaaugguuguuucaaaauauaccacaaaugugacaaugccugcauaggaucaaucagaaauggaacuuaugaccaugauguauacagagaugaagcauuaaacaaccgguuccagaucaagggcguugagcugaagucaggauacaaagauuggauccuauggauuuccuuugccauaucauguuuuuugcuuuguguugcuuuguugggguucaucaugugggccugccaaaaaggcaacauuaggugcaacauuugcauuuga

SEQ ID NO: 33863 - RNA, 1701 nt, Artificial Sequence
  derived and/or modified CDS sequence (wt) from hemagglutinin__InfluenzaA__ABU92704
augaagacuaucauugcuuugagcuacauucuaugucugguuuucgcucaaaaacuucccggaaaugacaacagcacggcaacgcugugccuugggcaccaugcaguaccaaacggaacgauagugaaaacaaucacgaaugaccaaauugaaguuacuaaugcuacugagcugguucagaguuccucaacagguggaauaugcgacaguccucaucagauccuugauggagaaaacugcacacuaauagaugcucuauugggagacccucagugugauggcuuccaaaauaagaaaugggaccuuuuuguugaacgcaacaaagccuacagcaacuguuacccuuaugaugugccggauuaugccucccuuaggucacuaguugccucauccggcacacuggaguuuaacaaugaaagcuucaauuggacuggagucacucaaaauggaacaagcucugcuugcaaaaggagaucuaauaacaguuucuuuaguagauugaauugguugacccacuuaaaauucaaauacccagcauugaacgugacuaugccaaacaaugaaaaauuugacaaauuguacauuugggggguucaccacccggguacggacaaugaccaaaucuuccuguaugcucaagcaucaggaagaaucacagucucuaccaaaagaagccaacaaacuguaaucccgaauaucggaucuagacccagaguaaggaauauccccagcagaauaagcaucuauuggacaauaguaaaaccgggagacauacuuuugauuaacagcacagggaaucuaauugcuccuagggguuacuucaaaauacgaagugggaaaagcucaauaaugagaucagaugcacccauuggcaaaugcaauucugaaugcaucacuccaaauggaagcauucccaaugacaaaccauuucaaaauguaaacaggaucacauacggggccugucccagauauguuaagcaaaacacucugaaauuggcaacagggaugcgaaauguaccagagaaacaaacuagaggcauauuuggcgcaaucgcggguuucauagaaaaugguugggagggaaugguggaugguugguacgguuucaggcaucaaaauucugagggaauaggacaagcagcagaucucaaaagcacucaagcagcaaucgaucaaaucaaugggaagcugaauagguugaucgggaaaaccaacgagaaauuccaucagauugaaaaagaauucucagaaguagaagggagaauucaggaccucgagaaauauguugaggacacuaaaauagaucucuggucauacaacgcggagcuucuuguugcccuggagaaccaacauacaauugaucuaacugacucagaaaugaacaaacuguuugaaaaaacaaagaagcaacugagggaaaaugcugaagauaugggcaaugguuguuucaaaauauaccacaaaugugacaaugccugcauaggaucaaucagaaauggaacuuaugaccaugauguauacagagaugaagcauuaaacaaccgguuccagaucaagggcguugagcugaagucaggauacaaagauuggauccuauggauuuccuuugccauaucauguuuuuugcuuuguguugcuuuguugggguucaucaugugggccugccaaaaaggcaacauuaggugcaacauuugcauuuga

SEQ ID NO: 33864 - RNA, 1701 nt, Artificial Sequence
  derived and/or modified CDS sequence (wt) from hemagglutinin__InfluenzaA__ABU92705
augaagacuaucauugcuuugagcuacauucuaugucugguuuucgcucaaaaacuucccggaaaugacaacagcacggcaacgcugugccuugggcaccaugcaguaccaaacggaacgauagugaaaacaaucacgaaugaccaaauugaaguuacuaaugcuacugaacugguucaaaguuccucaacagguggaauaugcgacaguccucaucagauccuugauggagaaaacugcacacuaauagaugcucuauugggagacccucagugugauggcuuccaaaauaagaaaugggaccuuuuuguugaacgcagcaaagccuacagcaacuguuacccuuaugaugugccggauuaugccucccuuaggucacuaauugccucauccggcacacuggaguuuaacaaugaaagcuucaauuggacuggagucacucaaaauggaacaagcucugcuugcaaaaggagaucuaauaacaguuucuuuaguagauugaauugguugacccacuuaaaauucaaauacccagcauugaacgugacuaugccaaacaaugaagaauuugacaaauuguacauuugggggguccaccacccggguacggacaaugaccaaaucagccuauaugcucaagcaccaggaagaaucacagucucuaccaaaagaagccaacaaacuguaaucccgaauaucggaucuagaccccgaguaagggauauucccagcagaauaagcaucuauuggacaauaguaaaaccgggagacauacuuuugauuaacagcacagggaaucuaauugcuccucgggguuacuucaaaauacgaagugggaaaagcucgauaaugagaucagaugcacccauuggcaaaugcaaaucugaaugcaucacuccaaauggaagcauucccaaugacaaaccauuucaaaauguaaacaggaucacauauggggccugucccagauauguuaagcaaaacacucugaaauuggcaacagggaugcgaaauguaccagagaaacaaacucgaggcauauuuggcgcaaucgcgggguucauagaaaaugguugggagggaaugguggaugguugguacgguuucaggcaucaaaauucugagggaauaggacaagcagcagaucucaaaagcacucaagcagcaaucgaccaaaucaaugggaagcugaauagguugaucgggaaaaccaacgagaaauuccaucagauugaaaaagaauucucagaaguagaagggagaauucaggaccucgagaaauauguugaggacacuaaaauagaucucuggucauacaacgcagagcuucuuguugcccuggagaaccaacauacaauugaucuaacugacucagaaaugaacaaacuguuugaaagaacaaagaagcaacugagggaaaaugcugaggauaugggcaaugguuguuucaaaauauaccacaaaugugacaaugccugcauagggucaaucagaaauggaacuuaugaccaugauguauacagagaugaagcauuaaacaaccgguuccggaucaaaaguguugagcugaagucaggauacaaagauuggauccuauggauuucauuugccauaucauguuuuuugcuuuguguugcuuuguugggguucaucaugugggccugccaaaaaggcaacauuaggugcaacauuugcauuuga

SEQ ID NO: 33865 - RNA, 1701 nt, Artificial Sequence
  derived and/or modified CDS sequence (wt) from hemagglutinin__InfluenzaA__ABU92706
augaagacuaucauugcuuugagcuacauucuaugucugguuuucgcucaaaaacuucccggaaaugacaacagcacggcaacgcugugccuugggcaccaugcaguaccaaacggaacgauagugaaaacaaucacgaaugaccaaauugaaguuacuaaugcuacugagcugguucagauuuccucaacagguggaauaugcgacaguccucaucagauccuugauggagaaaacugcacacuaauagaugcucuauugggagacccucagugugauggcuuccaaaauaagaaaugggaccuuuuuguugaacgcagcaaagccuacagcaacuguuacccuuaugaugugccggauuaugccucccuuaggucacuaguugccucauccggcacacuggaguuuaacaaugaaagcuucgauuggacuggagucacucagaauggaacaagcucugcuugcaaaaggagaucuaauaaaaguuucuuuaguagauugaauugguugacccacuuaaaauacaaauacccagcauugaacgugacuaugccaaacaaugaaaaauuugacaaauuguacauuugggggguucaccacccggguacggacagugaccaaaucagccuauaugcucaagcaucaggaagaaucacagucucuaccaaaagaagccaacaaacuguaaucccgaauaucggaucuagacccaggguaagggaugucuccagucgaauaagcaucuauuggacaauaguaaaaccgggagacauacuuuugauuaacagcacagggaaucuaauugcuccucgggguuacuucaaaauacgaagugggaaaagcucaauaaugagaucagaugcacccauuggcaaaugcaauucugaaugcaucacuccaaauggaagcauucccaaugacaaaccauuucaaaauguaaacaggaucacauauggggccugucccagauauguuaagcaaaacacucugaaauuggcaacagggaugcgaaauguaccagagaaacaaacuagaggcauauuuggcgcaaucgcggguuucauagaaaaugguugggagggaaugguggacgguugguacgguuucaggcaucaaaauucugagggcacaggacaagcagcagaucucaaaagcacucaagcagcaaucaaccaaaucaaugggaaacugaauagguuaaucgggaaaacaaacgagaaauuccaucagauugaaaaagaauucucggaaguagaaggaagaauucaggaccucgagaaauauguugaggacacuaaaauagaucucuggucauacaacgcggagcuucuuguugcccuggagaaccaacauacaauugaucuaacugacucagaaaugaacaaacuguuugaaagaacaaagaagcaacugagggaaaaugcugaggauaugggcaaugguuguuucaaaauauaccacaaaugugacaaugccugcauagggucaaucagaaauggaacuuaugaccaugauguguacagagaugaagcauuaaacaaccgguuccagaucaaagguguugagcugaagucaggauacaaagauuggauccuauggauuuccuuugccauaucauguuuuuugcuuuguguugcuuuguugggguucaucaugugggccugccagaaaggcaacauuaggugcaacauuugcauuuga

SEQ ID NO: 33866 - RNA, 1701 nt, Artificial Sequence; identical to SEQ ID NO: 33774
  derived and/or modified CDS sequence (wt) from hemagglutinin__InfluenzaA__ABU92707

SEQ ID NO: 33867 - RNA, 1701 nt, Artificial Sequence
  derived and/or modified CDS sequence (wt) from hemagglutinin__InfluenzaA__ABU92708
augaagacuaucauugcuuugagcuacauucuaugucugguuuucgcucaaaaacuucccggaaaugacaacagcacggcaacgcugugccuugggcaccaugcaguaccaaacggaacgauagugaaaacaaucacgaaugaccaaauugaaguuacuaaugcuacugagcugguucagauuuccucaacaggugaaauaugcgacaguccccaucagauccuugauggagaaaacugcacacuaauagaugcucuauugggagacccucagugugauggcuuccaaaauaagaaaugggaccuuuuugucgaacgcagcaaagccuacagcaacuguuacccuuaugaugugccggauuaugccucccuuaggucacuaguugccucauccggcacacuggaguuuaacaaugaaagcuucgauuggacuggagucacucagaauggaacaagcucugcuugcaaaaggagaucugauaaaaguuucuuuaguagauugaauugguugacccacuuaaaauacaaauacccagcauugaacguaacuaugccaaacaaugaaaaauuugacaaauuguacauuugggggguucaccacccggguacggacagugaccaaaucagccuauaugcucaagcaucaggaagaaucacagucucuaccaaaagaagccaacaaacuguaaucccgaauaucggaucuagacccaggguaagggaugucuccagccgaauaagcaucuauuggacaauaguaaaaccgggagacauacuuuugauuaacagcacagggaaucuaauugcuccucgggguuacuucaaaauacgaagugggaaaagcucaauaaugagaucagaugcacccauuggcaaaugcaauucugaaugcaucacuccaaauggaagcauucccaaugacaaaccauuucaaaauguaaacaggaucacauauggggccugucccagauauguuaagcaaaacacucugaaauuggcaacagggaugcgaaauguaccagagaaacaaacuagaggcauauuuggcgcaaucgcggguuucauagaaaaugguugggagggaaugguggacgguugguacgguuucaggcaucaaaauucugagggcacaggacaagcagcagaucucaaaagcacucaagcagcaaucaaccaaaucaaugggaaacugaauagguuaaucgggaaaacaaacgagaaauuccaucagauugaaaaagaauucucggaaguagaaggaagaauucaggaccucgagaaauauguugaggacacuaaaauagaucucuggucauacaacgcggagcuucuuguugcccuggagaaccaacauacaauugaucuaacugacucagaaaugaacaaacuguuugaaagaacaaagaagcaacugagggaaaaugcugaggauaugggcaaugguuguuucaaaauauaccacaaaugugacaaugccugcauagggucaaucagaaauggaacuuaugaccaugauguguacagagaugaagcauuaaacaaccgguuccagaucaaagguguugagcugaagucaggauacaaagauuggauccuauggauuuccuuugccauaucauguuuuuugcuuuguguugcuuuguugggguucaucaugugggccugccaaaaaggcaacauuaggugcaacauuugcauuuga

SEQ ID NO: 33868 - RNA, 1701 nt, Artificial Sequence
  derived and/or modified CDS sequence (wt) from hemagglutinin__InfluenzaA__ABU92709
augaagacuaucauugcuuuaagcuacauucuaugucugguuuucgcucaaaagcuucccggaaaugacaacagcacggcaacgcugugccuugggcaccaugcaguaccaaacggaacgauagugaaaacaaucacgaaugaccaaauugaaguuacuaaugcuacugagcugguucagaguuccucaacagguggaauaugcgacaguccucaucagauccuugauggagaaaacugcacacuaauagaugcucuauugggagacccucagugugauggcuuccaaaauaagaaaugggaccuuuuuguugaacgcagcaaagccuacagcaacuguuacccuuaugaugugccggauuaugccucccuuaggucacuaguugccucauccggcacacuggaguuuaacaaugaaagcuucaauugggcuggagucacucagaauggaacaagcucugcuugcaaaaggagaucuaauaaaaguuucuuuaguagauugaauugguugacccacuuaaaauacaaauacccagcauugaacgugacuaugccaaacaaugaaaaauuugacaaauuguacauuugggggguucaccacccggguacggacagugaccaaaucagccuauaugcucaagcaucaggaagaaucacagucucuaccaaaagaagccaacaaacuguaaucccgaauaucggaucuagacccaggguaagggaugucuccagcagaauaagcaucuauuggacaauaguaaaaccgggagacauacuuuugauuaacagcacagggaaucuaauugcuccucgggguuacuucaaaauacgaagugggaaaagcucaauaaugagaucagaugcacccauuggcaaaugcaauucugaaugcaucacuccaaauggaagcauucccaaugacaaaccauuucaaaauguaaacaggaucacauauggggccugucccagauauguuaagcaaaacacucugaaauuggcaacagggaugcgaaauguaccagagaaacaaacuagaggcauauuuggcgcaaucgcggguuucauagaaaaugguugggagggaaugguggacgguugguacgguuucaggcaucaaaauucugagggcacaggacaagcagcagaucucaaaagcacucaagcagcaaucaaccaaaucaaugggaaacugaauagguuaaucgggaaaacaaacgagaaauuccaucagauugaaaaagaauucucagaaguagaagggagaauucaggaccucgagaaauauguugaggacacuaaaauagaucucuggucauacaacgcggagcuucuuguugcccuggaaaaccaacauacaauugaucuaacugacucagaaaugaacaaacuguuugaaagaacaaagaagcaacugagggaaaaugcugaggauaugggcaaugguuguuucaaaauauaccacaaaugugacaaugccugcauagagucaaucagaaauggaacuuaugaccaugauguauacagagaugaagcauuaaacaaccgguuccagaucaaagguguugagcugaagucaggauacaaagauuggauccuauggauuuccuuugccauaucauguuuuuugcuuuguguugcuuuguugggguucaucaugugggccugccaaaaaggcaacauuaggugcaacauuugcauuuga

SEQ ID NO: 33869 - RNA, 1701 nt, Artificial Sequence
  derived and/or modified CDS sequence (wt) from hemagglutinin__InfluenzaA__ABU92710
augaagacuaucauugcuuuaagcuacauuuuaugucugguuuucgcucaaaaacuucccggaaaugacaacagcacggcaacgcugugccuggggcaccaugcagugccaaacggaacgcuagugaaaacaaucacgaaugaccaaauugaagugacuaaugcuacugagcugguucagaguuccucaacagguagaauaugcgacaguccucaccaaauccuugauggagaaaacugcacacuaauagaugcucuauugggagacccucauugugauggcuuccaaaauaaggaaugggaccuuuuuguugaacgcagcaaagccuacagcaacuguuacccuuaugaugugccggauuaugucucccuuaggucacuaguugccucaucaggcacgcuggaguuuaacaaugaaagcuucaacuggacuggagucgcucagaauggaacaagcucugcuugcaaaaggagaucugauaaaaguuucuuuaguagauugaauugguugcaccaauuaaaauacaaauauccagcacugaacgugacuaugccaaacaaugaaaaauuugacaaauuguacauuugggggguucaccacccggguacagacagugaccaaaucagccuauaugcucaagcaucagggagagucacagucucuaccaaaagaagccaacaaacuguaaucccgaauaucggaucuagacccuggguaaggggugucuccagcagaauaagcaucuauuggacaauaguaaaaccgggagacauacuuuugauuaacagcacagggaaucuaauugcuccucgggguuacuucaaaauacgaagugggaaaagcucaauaaugaggucagaugcacccauuggcaaaugcaauucugaaugcaucacuccaaauggaagcauucccaaugacaaaccauuucaaaauguaaacaggaucacauaugggcccugucccagauauguuaagcaaaacacucugaaauuggcaacagggaugcggaaugugccagaaaaacaaacuagaggcauauucggugcaaucgcgggcuucauagaaaaugguugggagggaaugauggacgguugguacgguuucaggcaucaaaauucugagggcacagggcaagcagcagaucuuaaaagcacucaagcagcaaucaaccaaaucaacgggaaacugaauagguuaaucgagaaaacgaacgagaaauuccaucaaauugaaaaagaauucucagaaguagaagggagaauucaggaccucgagaaauauguugaggacacuaaaauagaucucuggucguacaaugcggagcuucuuguugcccuggagaaccaacauacaauugaucuaacugacucagaaaugaacaaacuguuugaaagaacaaagaagcaacugagggaaaaugcugaggauaugggcaaugguuguuucaaaauauaccacaaaugugacaaugccugcauagggucaaucagaaauggaacuuaugaccaugauguauacagagacgaagcauugaacaaccgguuccagaucaaagguguugagcugaagucaggauacaaagauuggauccuauggauuuccuuugccauaucauguuuuuugcuuuguauuguuuugcugggguucaucaugugggccugccaaaaaggcaacauuaggugcaacauuugcauuuga

SEQ ID NO: 33870 - RNA, 1701 nt, Artificial Sequence; identical to SEQ ID NO: 33773
  derived and/or modified CDS sequence (wt) from hemagglutinin__InfluenzaA__ABU92711

SEQ ID NO: 33871 - RNA, 1701 nt, Artificial Sequence
  derived and/or modified CDS sequence (wt) from hemagglutinin__InfluenzaA__ABU92712
augaagacuaucauugcuuugagcuacauucuaugucugguuuucgcucaaaaacuucccggaaaugacaacagcacggcaacgcugugccuugggcaccaugcaguaccaaacggaacgauagugaaaacaaucacgaaugaccaaauugaaguuacuaaugcuacugagcugguucagauuuccucaacagguggaauaugcgacaguccucaucagauccuugauggagaaaacugcacacuaauagaugcucuauugggagacccucagugugauggcuuccaaaauaagaaaugggaccuuuuuguugaacgcaguaaagccuacagcaacuguuacccuuaugaugugccggauuaugccucccuuaggucacuaguugccucauccggcacacuggaguuuaacaaugaaagcuucgauuggacuggagucacucagaauggaacaagcucugcuugcaaaaggagaucuaauaaaagcuucuuuaguagauugaauugguugacccacuuaaaauacaaauacccagcauugaacgugacuaugccaaacaaugaaaaauuugacaaauuguacauuugggggguucaccacccggguacggacagugaccaaaucagccuauaugcucaagcaucaggaagaaucacagucucuaccaaaagaagccaacaaacuguaaucccgaauaucggaucuagacccaggguaagggaugucuccagccgaauaagcaucuauuggacaauaguaaaaccgggagacauacuuuugauuaacagcacagggaaucuaauugcuccucgggguuacuucaaaauacgaagugggaaaagcucaauaaugagaucagaugcacccauuggcaaaugcaauucugaaugcaucacuccaaauggaagcauucccaaugacaaaccauuucaaaauguaaacaggaucacauauggggccugucccagauauguuaagcaaaacacucugaaauuggcaacagggaugcgaaauguaccagagaaacaaacuagaggcauauuuggcgcaaucgcggguuucauagaaaaugguugggagggaaugguggacgguugguacgguuucaggcaucaaaauucugagggcacaggacaagcagcagaucucaaaagcacucaagcagcaaucaaccaaaucaaugggaaacugaauagguuaaucgggaaaacaaacgagaaauuccaucagauugaaaaagaauucucggaaguagaaggaagaauucaggaccucgagaaauauguugaggacacuaaaauagaucucuggucauacaacgcggagcuucuuguugcccuggagaaccaacauacaauugaucuaacugacucagaaaugaacaaacuguuugaaagaacaaagaagcaacugagggaaaaugcugaggauaugggcaaugguuguuucaaaauauaccacaaaugugacaaugccugcauagggucaaucagaaauggaacuuaugaccaugauguguacagagaugaagcauuaaacaaccgguuccagaucaaagguguugagcugaagucaggauacaaagauuggauccuauggauuuccuuugccauaucauguuuuuugcuuuguguugcuuuguugggguucaucaugugggccugccaaaaaggcaacauuaggugcaacauuugcauuuga

SEQ ID NO: 33872 - RNA, 1701 nt, Artificial Sequence; identical to SEQ ID NO: 33774
  derived and/or modified CDS sequence (wt) from hemagglutinin__InfluenzaA__ABU92713

SEQ ID NO: 33873 - RNA, 1701 nt, Artificial Sequence; identical to SEQ ID NO: 33774
  derived and/or modified CDS sequence (wt) from hemagglutinin__InfluenzaA__ABU92714

SEQ ID NO: 33874 - RNA, 1701 nt, Artificial Sequence
  derived and/or modified CDS sequence (wt) from hemagglutinin__InfluenzaA__ABU92715
augaagacuaucauugcuuugagcuacauucuaugucugguuuucgcucaaaaacuucccggaaaugacaacagcacggcaacgcugugccuugggcaccaugcaguaccaaacggaacgauagugaaaacaaucacgaaugaccaaauugaaguuacuaaugcuaccgagcugguucagauuuccucaacaggugaaauaugcgacaguccucaucagauccuugauggagaaaacugcacacuaauagaugcucuauugggagacccucagugugauggcuuccaaaauaagaaaugggaccuuuuuguugaacgcagcaaagccuacagcaacuguuacccuuaugaugugccggauuaugccucccuuaggucacuaguugccucauccggcacacuggaguuuaacaaugaaagcuucgauuggacuggagucacucagaauggaacaagcucugcuugcaaaaggagaucuaauaaaaguuucuuuaguagauugaauugguugacccacuugaaauacaaauacccagcauugaacgugacuaugccaaacaaugaaaaauuugaaaaauuguacauuugggggguucaccacccggguacggacagugaccaaaucaaccuauaugcucaagcaucaggaagaaucacagucucuaccaaaagaagccaacaaacuguaaucccgaauaucggaucuagacccaggguaagggaugucuccagccgaauaagcaucuauuggacaauaguaaaaccgggagacauacuuuugauuaacagcacagggaaucuaauugcuccucgggguuacuucaaaauacgaagugggaaaagcucaauaaugagaucagaugcacccauuggcaaaugcaauucugaaugcaucacuccaaauggaagcauucccaaugacaaaccauuucaaaauguaaacagaaucacauauggggccugucccagauauguuaagcaaaacacucugaaauuggcaacagggaugcgaaauguaccagagaaacaaacuagaggcauauuuggcgcaaucgcggguuucauagaaaaugguugggagggaaugguggacgguugguacgguuucaggcaucaaaauucugagggcacaggacaagcagcagaucucaaaagcacucaagcagcaaucaaccaaaucaaugggaaacugaauagguuaaucgggaaaacaaacgagaaauuccaucagauugaaaaagaauucucggaaguagaagggagaauucaggaccucgagaaauauguugaggacacuaaaauagaucucuggucauacaacgcggagcuucuuguugcccuggagaaccaacauacaauugaucuaacugacucagaaaugaacaaacuguuugaaagaacaaagaagcaacugagggaaaaugcugaggauaugggcaaugguuguuucaaaauauaccacaaaugugacaaugccugcauagggucaaucagaaauggaacuuaugaccaugauguguacagagaugaagcauuaaacaaccgguuccagaucaaagguguugagcugaagucaggauacaaagauuggauccuauggauuuccuuugccauaucauguuuuuugcuuuguguugcuuuguugggguucaucaugugggccugccaaaaaggcaacauuaggugcaacauuugcauuuga

SEQ ID NO: 33875 - RNA, 1701 nt, Artificial Sequence; identical to SEQ ID NO: 33774
  derived and/or modified CDS sequence (wt) from hemagglutinin__InfluenzaA__ABU92716

SEQ ID NO: 33876 - RNA, 1701 nt, Artificial Sequence
  derived and/or modified CDS sequence (wt) from hemagglutinin__InfluenzaA__ABU92717
augaagacuaucauugcuuugagcuacauucuaugucugguuuucgcucaaaaacuucccggaaaugacaacagcacggcaacgcugugccuugggcaccaugcaguaccaaacggaacgauagugaaaacaaucacgaaugaccaaauugaaguuacuaaugcuacugagcugguucagauuuccucaacaggugaaauaugcgacaguccccaucagauccuugauggagaaaacugcacacuaauagaugcucuauugggagacccucagugugauggcuuccaaaauaagaaaugggaccuuuuuguugaacgcagcaaagccuacagcaacuguuacccuuaugaugugccggauuaugccucccuuaggucacuaguugccucauccggcacacuggaguuuaacaaugaaagcuucgauuggacuggagucacucagaauggaacaagcucugcuugcaaaaggagaucugauaaaaguuucuuuaguagauugaauugguugacccacuuaaaauacaaauacccagcauugaacguaacuaugccaaacaaugaaaaauuugacaaauuguacauuugggggguucaccacccggguacggacagugaccaaaucagccuauaugcucaagcaucaggaagaaucacagucucuaccaaaagaagccaacaaacuguaaucccgaauaucggaucuagacccagaguaagggaugucuccagccgaauaagcaucuauuggacaauaguaaaaccgggagacauacuuuugauuaacagcacagggaaucuaauugcuccucgggguuacuucaaaauacgaagugggaaaagcucaauaaugagaucagaugcacccauuggcaaaugcaauucugaaugcaucacuccaaauggaagcauucccaaugacaaaccauuucaaaauguaaacaggaucacauauggggccugucccagauauguuaagcaaaacacucugaaauuggcaacagggaugcgaaauguaccagagaaacaaacuagaggcauauuuggcgcaaucgcggguuucauagaaaaugguugggagggaaugguggacgguugguacgguuucaggcaucaaaauucugagggcacaggacaagcagcagaucucaaaagcacucaagcagcaaucaaccaaaucaaugggaaacugaauagguuaaucgggaaaacaaacgagaaauuccaucagauugaaaaagaauucucggaaguagaaggaagaauucaggaccucgagaaauauguugaggacacuaaaauagaucucuggucauacaacgcggagcuucuuguugcccuggagaaccaacauacaauugaucuaacugacucagaaaugaacaaacuguuugaaagaacaaagaagcaacugagggaaaaugcugaggauaugggcaaugguuguuucaaaauauaccacaaaugugacaaugccugcauagggucaaucagaaauggaacuuaugaccaugauguguacagagaugaagcauuaaacaaccgguuccagaucaaagguguugagcugaagucaggauacaaagauuggauccuauggauuuccuuugccauaucauguuuuuugcuuuguguugcuuuguugggguucaucaugugggccugccaaaaaggcaacauuaggugcaacauuugcauuuga

SEQ ID NO: 33877 - RNA, 1701 nt, Artificial Sequence
  derived and/or modified CDS sequence (wt) from hemagglutinin__InfluenzaA__ABU92718
augaagacuaucauugcuuugagcuacauucuaugucugguuuucgcucaaaaacuucccggaaaugacaacagcacggcaacgcugugccuugggcaccaugcaguaccaaacggaacgauagugaaaacaaucacgaaugaccaaauugaaguuacuaaugcuacugagcugguucagauuuccucaacagguggaauaugcgacaguccucaucagauccuugauggagaaaacugcacacuaauagaugcucuauugggagacccucagugugauggcuuccaaaauaagaaaugggaccuuuuuguugaacgcagcaaagccuacagcaacuguuacccuuaugaugugccggauuaugccucccuuaggucacuaguugccucauccggcacacuggaguuuaacaaugaaagcuucgauuggacuggagucacucagaauggaacaagcucugcuugcaaaaggagaucuaauaaaaguuucuuuaguagauugaauugguugacccacuuaaaauacaaauacccagcauugaacgugacuaugccaaacaaugaaaaauuugacaaauuguacauuugggggguucaccacccggguacggacagugaccaaaucagccuauaugcucaagcaucaggaagaaucacagucucuaccaaaagaagccaacaaacuguaaucccgaauaucggaucuagacccaggguaagggaugucuccagccgaauaagcaucuauuggacaauaguaaaaccgggagacauacuuuugauuaacagcacagggaaucuaauugcuccucggggcuacuucaaaauacgaagugggaaaagcucaauaaugagaucagaugcacccauuggcaaaugcaauucugaaugcaucacuccaaauggaagcauucccaaugacaaaccauuucaaaauguaaacaggaucacauauggggccugucccagauauguuaagcaaaacacucugaaauuggcaacagggaugcgaaauguaccagagaaacaaacuagaggcauauuuggcgcaaucgcggguuucauagaaaaugguugggagggaaugguggacgguugguacgguuucaggcaucaaaauucugagggcacaggacaagcagcagaucucaaaagcacucaagcagcaaucaaccaaaucaaugggaaacugaauagguuaaucgggaaaacaaacgagaaauuccaucagauugaaaaagaauucucggaaguagaaggaagaauucaggaccucgagaaauauguugaggacacuaaaauagaucucuggucauacaacgcggagcuucuuguugcccuggagaaccaacauacaauugaucuaacugacucagaaaugaacaaacuguuugaaagaacaaagaagcaacugagggaaaaugcugaggauaugggcaaugguuguuucaaaauauaccacaaaugugacaaugccugcauagggucaaucagaaauggaacuuaugaccaugauguguacagagaugaagcauuaaacaaccgguuccagaucaaagguguugagcugaagucaggauacaaagauuggauccuauggauuuccuuugccauaucauguuuuuugcuuuguguugcuuuguugggguucaucaugugggccugccagaaaggcaacauuagaugcaacauuugcauuuga

SEQ ID NO: 33878 - RNA, 1701 nt, Artificial Sequence
  derived and/or modified CDS sequence (wt) from hemagglutinin__InfluenzaA__ABU92719
augaagacuaucauugcuuugagcuacauucuaugucugguuuucgcucaaaaacuucccggaaaugacaacagcacggcaacgcugugccuugggcaccaugcaguaccaaacggaacgauagugaaaacaaucacgaaugaccaaauugaaguuacuaaugcuacugagcugguucagauuuccucaacagguggaauaugcgacaguccucaucagauccuugauggagaaaacugcacacuaauagaugcucuauugggagacccucagugugauggcuuccaaaauaagaaaugggaccuuuuuguugaacgcagcaaagccuacagcaacuguuacccuuaugaugugccggauuaugccucccuuaggucacuaguugccucauccggcacacuggaguuuaacaaugaaagcuucgauuggacuggagucacucagaauggaacaagcucugcuugcaaaaggagaucuaauaaaaguuucuuuaguagauugaauugguugacccacuuaaaauacaaauacccagcauugaacgugacuaugccaaacaaugaaaaauuugacaaauuguacauuugggggguucaccacccggguacggacagugaccaaaucagccuauaugcucaagcaucaggaagaaucacagucucuaccaaaagaagccaacaaacuguaaucccgaauaucggaucuagacccaggguaagggaugucuccagccgaauaagcaucuauuggacaauaguaaaaccgggagacauacuuuugauuaacagcacagggaaucuaauugcuccucgggguuacuucaaaauacgaagugggaaaagcucaauaaugagaucagaugcacccauuggcaaaugcaauucugaaugcaucacuccaaauggaagcauucccaaugacaaaccauuucaaaacguaaacaggaucacauauggggccugucccagauauguuaagcaaaacacucugaaauuggcaacagggaugcgaaauguaccagagaaacaaacuagaggcauauuuggcgcaaucgcggguuucauagaaaaugguugggagggaaugguggacgguugguacgguuucaggcaucaaaauucugagggcacaggacaagcagcagaucucaaaagcacucaagcagcaaucaaccaaaucaaugggaaacugaauagguuaaucgggaaaacaaacgagaaauuccaucagauugaaaaagaauucucggaaguagaaggaagaauucaggaccucgagaaauauguugaggacacuaaaauagaucucuggucauacaacgcggagcuucuuguugcccuggagaaccaacauacaauugaucuaacugacucagaaaugaacaaacuguuugaaagaacaaagaagcaacugagggaaaaugcugaggauaugggcaaugguuguuucaaaauauaccacaaaugugacaaugccugcauagggucaaucagaaauggaacuuaugaccaugauguguacagagaugaagcauuaaacaaccgguuccagaucaaagguguugagcugaagucaggauacaaagauuggauccuauggauuuccuuugccauaucauguuuuuugcuuuguguugcuuuguugggguucaucaugugggccugucagaaaggcaacauuaggugcaacauuugcauuuga

SEQ ID NO: 33879 - RNA, 1701 nt, Artificial Sequence
  derived and/or modified CDS sequence (wt) from hemagglutinin__InfluenzaA__ABU92720
augaagacuaucauugcuuugagcuacauucuaugucugguuuucgcucaaaaacuucccggaaaugacaacagcacggcaacgcugugccuugggcaccaugcaguaccaaacggaacgauagugaaaacaaucacgaaugaccaaauugaaguuacuaaugcuacugagcugguucagauuuccucaacaggugaaauaugcgacaguccccaucagauccuugauggagaaaacugcacacuaauagaugcucuauugggagacccucagugugauggcuuccaaaauaagaaaugggaccuuuuuguugaacgcagcaaagccuacagcaacuguuacccuuaugaugugccggauuauuccucccuuaggucacuaguugccucauccggcacacuggaguuuaacaaugaaagcuucgauuggacuggagucacucagaauggaacaagcucugcuugcaaaaggagaucugauaaaaguuucuuuaguagauugaauugguugacccacuuaaaauacaaauacccagcauugaacguaacuaugccaaacaaugaaaaauuugacaaauuguacauuugggggguucaccacccggguacggacagugaccaaaucagccuauaugcucaagcaucaggaagaaucacagucucuaccaaaagaagccaacaaacuguaaucccgaauaucggaucuagacccaggguaagggaugucuccagccgaauaagcaucuauuggacaauaguaaaaccgggagacauacuuuugauuaacagcacagggaaucuaauugcuccucgggguuacuucaaaauacgaagugggaaaagcucaauaaugagaucagaugcacccauuggcaaaugcaauucugaaugcaucacuccaaauggaagcauucccaaugacaaaccauuucaaaauguaaacaggaucacauauggggccugucccagauauguuaagcaaaacacucugaaauuggcaacagggaugcgaaauguaccagagaaacaaacuagaggcauauuuggcgcaaucgcggguuucauagaaaaugguugggagggaaugguggacgguugguacgguuucaggcaccaaaauucugagggcacaggacaagcagcagaucucaaaagcacucaagcagcaaucaaccaaaucaaugggaaacugaauagguuaaucgggaaaacaaacgagaaauuccaucagauugaaaaagaauucucggaaguagaaggaagaauucaggaccucgagaaauauguugaggacacuaaaauagaucucuggucauacaacgcggagcuucuuguugcccuggagaaccaacauacaauugaucuaacugacucagaaaugaacaaacuguuugaaagaacaaagaagcaacugagggaaaaugcugaggauaugggcaaugguuguuucaaaauauaccacaaaugugacaaugccugcauagggucaaucagaaauggaacuuaugaccaugauguguacagagaugaagcauuaaacaaccgguuccagaucaaagguguugagcugaagucaggauacaaagauuggauccuauggauuuccuuugccauaucauguuuuuugcuuuguguugcuuuguugggguucaucaugugggccugccaaaaaggcaacauuaggugcaacauuugcauuuga

SEQ ID NO: 33880 - RNA, 1701 nt, Artificial Sequence
  derived and/or modified CDS sequence (wt) from hemagglutinin__InfluenzaA__ABU92721
augaagacuaucauugcuuugagcuacauucuaugucugguuuucgcucaaaaacuucccggaaaugacaacagcacggcaacgcugugccuugggcaccaugcaguaccaaacggaacgauagugaaaacaaucacgaaugaccaaauugaaguuacuaaugcuacugagcugguucagauuuccucaacaggugaaauaugcgacaguccccaucagauccuugauggagaaaacugcacacuaauagaugcucuauugggagacccucagugugauggcuuccaaaauaagaaaugggaccuuuuuguugaacgcagcaaagccuacagcaacuguuacccuuaugaugugccggauuaugccucccuuaggucacuaguugccucauccggcacacuggaguuuaacaaugaaagcuucgauuggacuggagucacucagaauggaacaagcucugcuugcaaaaggagaucugauaaaaguuucuuuaguagauugaauugguugacccacuuaaaauacaaauacccagcauugaacguaacuaugccaaacaaugaaaaauuugacaaauuguacauuugggggguucaccacccagguacggacagugaccaaaucagccuauaugcucaagcaucaggaagaaucacagucucuaccaaaagaagccaacaaacuguaaccccgaauaucggaucuagacccaggguaagggaugucuccagccgaauaagcaucuauuggacaauaguaaaaccgggagacauacuuuugauuaacagcacagggaaucuaauugcuccucgggguuacuucaaaauacgaagugggaaaagcucaauaaugagaucagaugcacccauuggcaaauguaauucugaaugcaucacuccaaauggaagcauucccaaugacaaaccauuucaaaauguaaacaggaucacauauggggccugucccagauauguuaagcaaaacacucugaaauuggcaacagggaugcgaaauguaccagagaaacaaacuagaggcauauuuggcgcaaucgcggguuucauagaaaaugguugggagggaaugguggacgguugguacgguuucaggcaucaaaauucugagggcacaggacaagcagcagaucucaaaagcacucaagcagcaaucaaccaaaucaaugggaaacugaauagguuaaucgggaaaacaaacgagaaauuccaucagauugaaaaagaauucucggaaguagaaggaagaauucaggaccucgagaaauauguugaggacacuaaaauagaucucuggucauacaacgcggagcuucuuguugcccuggagaaccaacauacaauugaucuaacugacucagaaaugaacaaacuguuugaaagaacaaagaagcaacugagggaaaaugcugaggauaugggcaaugguuguuucaaaauauaccacaaaugugacaaugccugcauagggucaaucagaaauggaacuuaugaccaugauguguacagagaugaagcauuaaacaaccgguuccagaucaaagguguugagcugaagucaggauacaaagauuggauccuauggauuuccuuugccauaucauguuuuuugcuuuguguugcuuuguugggguucaucaugugggccugccaaaaaggcaacauuaggugcaacauuugcauuuga

SEQ ID NO: 33881 - RNA, 1701 nt, Artificial Sequence
  derived and/or modified CDS sequence (wt) from hemagglutinin__InfluenzaA__ABU92722
augaagacuaucauugcuuugagcuacauucuaugucugguuuucgcucaaaaacuucccggaaaugacaacagcacggcaacgcugugccuugggcaccaugcaguaccaaacggaacgauagugaaaacaaucacgaaugaccaaauugaaguuacuaaugcuacugagcugguucagaguuccucaacagguggaauaugcgacaguccucaucagauccuugauggagaaaacugcacacuaauagaugcucuauugggagacccucagugugauggcuuccaaaauaagaaaugggaccuuuuuguugaacgcagcaaagccuacagcaacuguuacccuuaugaugugccggauuaugccucccuuaggucacuaauugccucauccggcacacuggaguuuaacaaugaaagcuucaauuggacuggagucacucaaaauggaacaagcucugcuugcaaaagaagaucuaauagcaguuucuuuaguagauugaauugguugacccacuuaaaauucaaauacccagcauugaacgugacuaugccaaacaaugaagaauuugacaaauuguacauuugggggguucaccacccggguacagacaaugaccaaaucagccuauaugcucaagcaucaggaagaaucacagucucuaccaaaagaagccaacaaacuguaaucccgaauaucggaucuagacccaggguaagggauauccccagcagaauaagcaucuauuggacaauaguaaaaccgggagacauacuuuugauuaacagcacagggaaucuaauugcuccucgggguuacuucaaaauacgaagugggaaaagcucaauaaugagaucagaugcacccauuggcaaaugcaauucugaaugcaucacuccaaauggaagcauucccaaugacaaaccauuucaaaauguaaacaggaucacauauggggccugucccagauauguuaagcaaaacacucugaaauuggcaacagggaugcgaaauguaccagagaaacaaacuagaggcauauuuggcgcaaucgcggguuucauagaaaaugguugggagggaaugguggaugguugguacgguuucaggcaucaaaauucugagggaauaggacaagcagcagaucucaaaagcacucaagcagcaaucgaccaaaucaaugggaagcugaauagguugaucgggaaaaccaacgagaaauuccaucagauugaaaaagaauucucagaaguagaagggagaauucaggaccucgagaaauauguugaggacacuaaaauagaucucuggucauacaacgcggagcuucuuguugcccuggagaaccaacauacaauugaucuaacugacucagaaaugaacaaacuguuugaaagaacaaagaagcaacugagggaaaaugcugaggauaugggcaaugguuguuucaaaauauaccacaaaugugacaaugccugcauagggucaaucagaaauggaacuuaugaccaugauguauacagagaugaagcauuaaacaaccgguuccagaucaaagguguugagcugaagucaggauacaaagauuggauccuauggauuuccuuugccauaucauguuuuuugcuuuguguugcuuuguugggguucaucaugugggccugccaaaaaggcaacauuaggugcaacauuugcauuuga

SEQ ID NO: 33882 - RNA, 1701 nt, Artificial Sequence
  derived and/or modified CDS sequence (wt) from hemagglutinin__InfluenzaA__ABU92723
augaagacuaucauugcuuugagcuacauucuaugucugguuuucgcucaaaaacuucccggaaaugacaacagcacggcaacgcugugccuugggcaccaugcaguaccaaacggaacgauagugaaaacaaucacgaaugaccaaauugaaguuacuaaugcuacugagcugguucagauuuccucaacagguggaauaugcgacaguccucaucagauccuugauggagaaaacugcacacuaauagaugcucuauugggagacccucagugugauggcuuccaaaauaagaaaugggaccuuuuuguugaacgcagcaaagccuacagcaacuguuacccuuaugaugugccggauuaugccucccuuaggucacuaguugccucauccggcacacuggaguuuaacaaugaaagcuucgauuggacuggagucacucagaauggaacaagcucugcuugcaaaaggagaucuaauaaaaguuucuuuaguagauugaauugguugacccacuuaaaauacaaauacccagcauugaacgugacuaugccaaacaaugaaaaauuugacaaauuguacauuugggggguucaccacccggguacggacagugaccaaaucagccuauaugcucaagcaucaggaagaaucacagucucuaccaaaagaagccaacaaacuguaaucccgaauaucggaucuagacccaggguaagggaugucuccagccgaauaagcaucuauuggacaauaguaaaaccgggagacauacuuuugauuaacagcacagggaaucuaauugcuccucgggguuacuucaaaauacgaagugggaaaagcucaauaaugagaucagaugcacccauuggcaaaugcaauucugaaugcaucacuccaaauggaagcauucccaaugacaaaccauuucaaaauguaaacaggaucacauauggggccugucccagauauguuaagcaaaacacucugaaauuggcaacagggaugcgaaauguaccagagaaacaaacuagaggcauauuuggcgcaaucgcggguuucauagaaaaugguugggagggaaugguggacgguugguacgguuucaggcaucaaaauucugagggcacaggacaagcagcagaucucaaaagcacucaagcagcaaucaaccaaaucaaugggaaacugaauagguuaaucgggaaaacaaacgagaaauuccaucagauugaaaaagaauucucggaaguagaaggaagaauucaggaccucgagaaauauguugaggacacuaaaauagaucucuggucauacaacgcggagcuucuuguugcccuggagaaccaacauacaauugaucuaacugacucagaaaugaacaaacuguuugaaagaacaaagaagcaacugagggaaaaugcugaggauaugggcaaugguuguuucaaaauauaucacaaaugugacaaugccugcauagggucaaucagaaauggaacuuaugaccaugauguguacagagaugaagcauuaaacaaccgguuccagaucaaagguguugagcugaagucaggauacaaagacuggauccuauggauuuccuuugccauaucauguuuuuugcuuuguguugcuuuguugggguucaucaugugggccugucagaaaggcaacauuaggugcaacauuugcauuuga

SEQ ID NO: 33883 - RNA, 1701 nt, Artificial Sequence; identical to SEQ ID NO: 33868
  derived and/or modified CDS sequence (wt) from hemagglutinin__InfluenzaA__ABU92724

SEQ ID NO: 33884 - RNA, 1701 nt, Artificial Sequence
  derived and/or modified CDS sequence (wt) from hemagglutinin__InfluenzaA__ABU92725
augaagacuaucauugcuuugagcuacauucuaugucugguuuucgcucaaaaacuucccggaaaugacaacagcacggcaacgcugugccuugggcaccaugcaguaccaaacggaacgauagugaaaacaaucacgaaugaccaaauugaaguuacuaaugcuacugagcugguucagaguuccucaacagguggaauaugcgacaguccucaucagauccuugauggagaaaacugcacacuaauagaugcucuauugggagacccucagugugauggcuuccaaaauaagaaaugggaccuuuuuguugaacgcagcaaagccuacagcaacuguuacccuuaugaugugccggauuaugccucccuuaggucacuaguugccucauccggcacacuggaguuuaacaaugaaagcuucaauuggacuggagucacucagaauggaacaagcucugcuugcaaaaggagaucuaauaaaaguuucuuuaguagauugaauugguugacccacuuaaaauacaaauacccagcauugaacgugacuaugccaaacaaugaaaaauuugacaaauuguacauuugggggguucaccacccggguacggacagugaccaaauuaaccuauaugcucaagcaucaggaagaaucacaguuucuaccaaaagaagccaacaaacuguaaucccgaauaucggaucuagacccaggguaagggauguccccagcagaauaagcaucuauuggacaauaguaaaaccgggagacuuacuuuugauuaacagcacagggaaucuaauugcuccucgggguuacuucaaaauacgaagugggaaaagcucaauaaugagaucagaugcacccauuggcaaaugcaauucugaaugcaucaccccaaauggaagcauucccaaugacaagccauuucaaaauguaaacaggaucacauauggggcuugucccagauauguuaagcaaaacacccugaaauuggcaacagggaugcgaaauguaccagagaaacaaacuagaggcauauuuggcgcaaucgcggguuucauagaaaaugguugggagggaaugguggacgguugguacgguuucaggcaucaaaauucugagggcacaggacaagcagcagaucucaaaagcacucaagcagcaaucaaccaaaucaaugggaaacugaauagguuaaucgggaaaacaaacgaaaaauuccaucagauugaaaaagaauucucagaaguagaagggagaauucaggaccucgagaaauauguugaggacacuaaaauagaucucuggucauacaacgcggagcuucuuguugcccuggagaaccaacauacaauugaucuaacugacucagaaaugaacaaacuguuugaaagaacaaagaagcaacugagggaaaaugcugaggauaugggcaaugguuguuucaaaauauaccacaaaugugacaaugccugcauagggucaaucagaaauggaacuuaugaccaugauguauacagagaugaagcauuaaacaaccgguuccagaucaaagguguugagcugaagucaggauacaaagauuggauccuauggauuuccuuugccauaucauguuuuuugcuuuguguugcuuuguugggguucaucaugugggccugccaaaaaggcaacauuaggugcaacauuugcauuuga

SEQ ID NO: 33885 - RNA, 1701 nt, Artificial Sequence; identical to SEQ ID NO: 33868
  derived and/or modified CDS sequence (wt) from hemagglutinin__InfluenzaA__ABU92726

SEQ ID NO: 33886 - RNA, 1701 nt, Artificial Sequence
  derived and/or modified CDS sequence (wt) from hemagglutinin__InfluenzaA__ABU92727
augaagacuaucauugcuuugagcuacauucuaugucugguuuucgcucaaaaacuucccggaaaugacaacagcacggcaacgcugugccuugggcaccaugcaguaccaaacggaacgauagugaaaacaaucacaaaugaccaaauugaaguuacuaaugcuacugagcugguucagaguuccucaacagguggaauaugcgacaguccucaucagauccuugauggagaaaacugcacacuaauagaugcucuauugggagacccucagugugauggcuuccaaaauaagaaaugggaccuuuuuguugaacgcagcaaagccuacagcaacuguuacccuuaugaugugccggauuaugccucccuuaggucacuaauugccucauccggcacacuggaguuuaacaaugaaagcuucaauuggacuggagucacucaaaauggaacaagcucugcuugcaaaaggagaucuaauagcaguuucuuuaguagauugaauugguugacccacuuaaaauucaaauacccagcauugaacgugacuaugccaaacaaugaagacuuugacaaauuguacauuugggggguucaccacccggguacagacaaugaccaaaucagccuauaugcucaagcaucaggaagaaucacagucucuaccaaaagaagccaacaaacuguaaucccgaauaucggaucuagacccaggguaagggauauccccagcagaauaagcaucuauuggacaauaguaaaaccgggagacauacuuuugauuaacagcacagggaaucuaauugcuccucgggguuacuucaaaauacgaagugggaaaagcucaauaaugagaucagaugcacccauuggcaaaugcaauucugaaugcaucacuccaaauggaagcauucccaaugacaaaccauuucaaaauguaaacaggaucacauauggggccugucccagauauguuaagcaaaacacucugaaauuggcaacagggaugcgaaauguaccagagaaacaaacuagaggcauauuuggcgcaaucgcggguuucauagaaaaugguugggagggaaugguggaugguugguacgguuucaggcaucaaaauucugagggaauaggacaagcagcagaucucaaaagcacucaagcagcaaucgaccaaaucaaugggaagcugaauagguugaucgggaaaaccaacgagaaauuccaucagauugaaaaagaauucucagaaguagaagggagaauucaggaccucgagaaauauguugaggacacuaaaauagaucucuggucauacaacgcggagcuucuuguugcccuggagaaccaacauacaauugaucuaacugacucagaaaugaacaaacuguuugaaagaacaaagaagcaacugagggaaaaugcugaggauaugggcaaugguuguuucaaaauauaccacaaaugugacaaugccugcauagggucaaucagaaauggaacuuaugaccaugauguauacagagaugaagcauuaaacaaccgguuccagaucaaagguguugagcugaagucaggauacaaggauuggauccuauggauuuccuuugccauaucauguuuuuugcuuuguguugcuuuguugggguucaucaugugggccugccaaaaaggcaacauuaggugcaacauuugcauuuga

SEQ ID NO: 33887 - RNA, 1701 nt, Artificial Sequence
  derived and/or modified CDS sequence (wt) from hemagglutinin__InfluenzaA__ABU92728
augaagacuaucauugcuuugagcuacauucuaugucagguuuucgcucaaaaacuucccggaaaugacaacagcacggcaacgcugugccuugggcaccaugcaguaccaaacggaacgauagugaaaacaaucacgaaugaccaaauugaaguuacuaaugcuacugagcugguucagauuuccucaacaggugaaauaugcgacaguccccaucagauccuugauggagaaaacugcacacuaauagaugcucuauugggagacccucagugugauggcuuccaaaauaagaaaugggaccuuuuuguugaacgcagcaaagccuacagcaacuguuacccuuaugaugugccggauuaugccucccuuaggucacuaguugccucauccggcacacuggaguuuaacaaugaaagcuucgauuggacuggagucacucagaauggaacaagcucugcuugcaaaaggagaucugauaaaaguuucuuuaguagauugaauugguugacccacuuaaaauacaaauacccagcauugaacguaacuaugccaaacaaugaaaaauuugacaaauuguacauuugggggguucaccacccggguacggacaaugaccaaaucagccuauaugcucaagcaucaggaagaaucacagucucuaccaaaagaagccaacaaacuguaaucccgaauaucggaucuagacccaggguaagggaugucuccagccgaauaagcaucuauuggacaauaguaaaaccgggagacauacuuuugauuaacagcacagggaaucuaauugcuccucgggguuacuucaaaauacgaagugggaaaagcucaauaaugagaucagaugcacccauuggcaaaugcaauucugaaugcaucacuccaaauggaagcauucccaaugacaaaccauuucaaaauguaaacaggaucacauauggggccugucccagauauguuaagcaaaacacucugaaauuggcaacagggaugcgaaauguaccagagaaacaaacuagaggcauauuuggcgcaaucgcggguuucauagaaaaugguugggagggaaugguggacgguugguacgguuucaggcaucaaaauucugagggcacaggacaagcagcagaucucaaaagcacucaagcagcaaucaaccaaaucaaugggaaacugaauagguuaaucgggaaaacaaacgagaaauuccaucagauugaaaaagaauucucggaaguagaaggaagaauucaggaccucgagaaauauguugaggacacuaaaauagaucucuggucauacaacgcggagcuucuuguugcccuggagaaccaacauacaauugaucuaacugacucagaaaugaacaaacuguuugaaagaacaaagaagcaacugagggaaaaugcugaggauaugggcaaugguuguuucaaaauauaccacaaaugugacaaugccugcauagggucaaucagaaauggaacuuaugaccaugauguguacagagaugaagcauuaaacaaccgguuccagaucaaagguguugagcugaagucaggauacaaagauuggauccuauggauuuccuuugccauaucauguuuuuugcuuuguguugcuuuguugggguucaucaugugggccugccaaaaaggcaacauuaggugcaacauuugcauuuga

SEQ ID NO: 33888 - RNA, 1701 nt, Artificial Sequence; identical to SEQ ID NO: 33887
  derived and/or modified CDS sequence (wt) from hemagglutinin__InfluenzaA__ABU92729

SEQ ID NO: 33889 - RNA, 1701 nt, Artificial Sequence; identical to SEQ ID NO: 33766
  derived and/or modified CDS sequence (wt) from hemagglutinin__InfluenzaA__ABU92730

SEQ ID NO: 33890 - RNA, 1701 nt, Artificial Sequence
  derived and/or modified CDS sequence (wt) from hemagglutinin__InfluenzaA__ABU92731
augaagacuaucauugcuuugagcuacauucuaugucugguuuucgcucaaaaacuucccggaaaugacaacagcacggcaacgcugugccuugggcaccaugcaguaccaaacggaacgauagugaaaacaaucacgaaugaccaaauugaaguuacuaaugcuacugagcugguucagaguuccucaacagguggaauaugcgacaguccucaucagauccuugauggagaaaacugcacacuaauagaugcucuauugggggacccucagugugauggcuuccaaaauaagaaaugggaccuuuuuguugaacgcagcaaagccuacagcaacuguuacccuuaugaugugccggauuaugccucccuuaggucacuaauugccucauccggcacacuggaguuuaacaaugaaagcuucaauuggacuggagucacucaaaauggaacaagcucugcuugcaaaaggagaucuaauagcaguuucuuuaguagauugaauugguugacccacuuaaaauucaaauacccagcauugaacgugacuaugccaaacaaugaagaauuugacaaauuguacguuugggggguucaccacccggguacauacaaugaccaaaucagccuauaugcucaagcaucaggaagaaucacagucucuaccaaaagaagccaacaaacuguaaucccgaauaucgggucuagacccaggguaagggauauccccagcagaauaagcaucuauuggacaauaguaaaaccgggagacauacuuuugauuaacagcacagggaaucuaauugcuccucgggguuacuucaaaauacgaagugggaaaagcucaauaaugagaucagaugcacccauuggcaaaugcaauucugaaugcaucacuccaaauggaagcauucccaaugacaaaccauuucaaaauguaaacaggaucacauauggggccugucccagauauguuaagcaaaacacucugaaauuggcaacagggaugcgaaauguaccagagaaacaaacuagaggcauauuuggcgcaaucgcggguuucauagaaaaugguugggagggaaugguggaugguugguacgguuucaggcaucaaaauucugagggaauaggacaagcagcagaucucaaaagcacucaagcagcaaucgaccaaaucaaugggaagcugaauagguugaucgggaaaaccaacgagaaauuccaucagauugaaaaagaauucucagaaguagaagggagaauucaggaccucgagaaauauguugaggacacuaaaauagaucucuggucauacaacgcggagcuucuuguugcccuggagaaccaacauacaauugaucuaacugacucagaaaugaacaaacuguuugaaagaacaaagaagcaacugagggaaaaugcugaggauaugggcaaugguuguuucaaaauauaccacaaaugugacaaugccugcauagggucaaucagaaauggaacuuaugaccaugauguauacagagaugaagcauuaaacaaccgguuccagaucaaagguguugagcugaagucaggauacaaagauuggauccuauggauuuccuuugccauaucauguuuuuugcuuuguguugcuuuguugggguucaucaugugggccugccaaaaaggcaacauuaggugcaacauuugcauuuga

SEQ ID NO: 33891 - RNA, 1701 nt, Artificial Sequence
  derived and/or modified CDS sequence (wt) from hemagglutinin__InfluenzaA__ABU92732
augaagacuaucauugcuuugagcuacauucuaugucugguuuucgcucaaaaacuucccggaaaugacaacagcacggcaacgcugugccuugggcaccaugcaguaccaaacggaacgauagugaaaacaaucacgaaugaccaaauugaaguuacuaaugcuacugagcugguucagaguuccucaacagguggaauaugcgacaguccucaucagauccuugauggagaaaacugcacacuaauagaugcucuauugggagacccucagugugauggcuuccaaaauaagaaaugggaccuuuuuguugaacgcagcaaagccuacagcaacuguuacccuuaugaugugccggauuaugccucccuuaggucacuaauugccucauccggcacacuggaguuuaacaaugaaagcuucaauuggacuggagucacucaaaauggaacaagcucugcuugcaaaaggagaucuaauagcaguuucuuuaguagauugaauugguugacccacuuaaaauucaaauacccagcauugaacgugacuaugccaaacaaugaagaauuugacaaauuguacauuugggggguucaccacccggguacauacaaugaccaaaucagccuauaugcucaagcaucaggaagaaucacagucucuaccaaaagaagccaacaaacuguaaucccgaauaucgggucuagacccaggguaagggauauccccagcagaauaagcaucuauuggacaauaguaaaaccgggagacauacuuuugauuaacagcacagggaaucuaauugcuccucgggguuacuucaaaauacgaagugggaaaagcucaauaaugagaucagaugcacccauuggcaaaugcaauucugaaugcaucacuccaaauggaagcauucccaaugacaaaccauuucaaaauguaaacaggaucacauauggggccugucccagauauguuaagcaaaacacucugaaauuggcaacagggaugcgaaauguaccagagaaacaaacuagaggcauauuuggcgcaaucgcggguuucauagaaaaugguugggagggaaugguggaugguugguacgguuucaggcaucaaaauucugagggaauaggacaagcagcagaucucaaaagcacucaagcagcaaucgaccaaaucaaugggaagcugaauagguugaucgggaaaaccaacgagaaauuccaucagauugaaaaagaauucucagaaguagaagggagaauucaggaccucgagaaauauguugaggacacuaaaauagaucucuggucauacaacgcggagcuucuuguugcccuggagaaccaacauacaauugaucuaacugacucagaaaugaacaaacuguuugaaagaacaaagaagcaacugagggaaaaugcugaggauaugggcaaugguuguuucaaaauauaccacaaaugugacaaugccugcauagggucaaucagaaauggaacuuaugaccaugauguauacagagaugaagcauuaaacaaccgguuccagaucaaagguguugagcugaagucaggauacaaagauuggauccuauggauuuccuuugccauaucauguuuuuugcuuuguguuguuuuguugggguucaucaugugggccugccaaaaaggcaacauuaggugcaacauuugcauuuga

SEQ ID NO: 33892 - RNA, 1701 nt, Artificial Sequence
  derived and/or modified CDS sequence (wt) from hemagglutinin__InfluenzaA__ABU92733
augaagacuaucauugcuuugagcuacauucuaugucugguuuucgcucaaaaacuucccggaaaugacaacagcacggcaacgcugugccuugggcaccaugcaguaccaaacggaacgauagugaaaacaaucacgaaugaccaaauugaaguuacuaaugcuacugagcugguucagaguuccucaacagguggaauaugcgacaguccucaucagauccuugauggagaaaacugcacacuaauagaugcucuauugggagacccucagugugauggcuuccaaaauaagaaaugggaccuuuuuauugaacgcagcaaagccuacagcaacuguuacccuuaugaugugccggauuaugccucccuuaggucacuaguugccucauccggcacacuggaauuuaacaaugaaagcuucaauuggacuggagucacucaaaauggaacaagcucugcuugcaaaaggagaucuaauaacaguuucuuuaguagauugaauugguugacccacuuaaaauucaaauacccagcauugaacgugacuaugccaaacaaugaaaaauuugacaaauuguacauuugggggguucaccacccggguacggacaaugaccaaaucagccuauaugcucaagcuucaggaagaaucacagucucuaccaaaagaagccaacaaacuguaaucccgaauaucggaucuagacccaggguaagggauauccccagcagaauaagcaucuauuggacaauaguaaaaccgggagacauacuuuugauuaacagcacagggaaucuaauugcuccucgggguuacuucaaaauacgaagugggaaaagcucaauaaugagaucagaugcacccauuggcaaaugcaauucugaaugcaucacuccaaauggaagcauucccaaugacaaaccauuucaaaauguaaacaggaucacauauggggccugucccagauauguuaagcaaaacacucugaaauuggcaacagggaugcgaaauguaccagagaaacaaacuagaggcauauuuggcgcaaucgcggguuucauagaaaaugguugggagggaaugguggaugguugguacgguuucaggcaucaaaauucugagggaauaggacaagcagcagaucucaaaagcacucaagcagcaaucaaccaaaucaaugggaagcugaauagguugaucgggaaaaccaacgagaaauuccaucagauugaaaaagaauucucagaaguagaagggagaauucaggaccucgagaaauauguugaggacacuaaaguagaucucuggucauacaacgcggagcuucuuguugcccuggagaaccaacauacaauugaucuaacugacucagaaaugaacaaacuguuugaaagaacaaagaagcaacugagggaaaaugcugaggauaugggcaaugguuguuucaaaauauaccacaaaugugacaaugccugcauagggucaaucagaaauggaacuuauaaccaugauguauacagagaugaagcauugaacaaccgguuccagaucaaagguguugagcugaagucaggauacaaagauuggauccuauggauuuccuuugccauaucauguuuuuugcuuuguguugcuuuguugggauucaucaugugggccugccaaaaaggcaacauuaggugcaacauuugcauuuga

SEQ ID NO: 33893 - RNA, 1701 nt, Artificial Sequence
  derived and/or modified CDS sequence (wt) from hemagglutinin__InfluenzaA__ABU92734
augaagacuaucauugcuuugagcuacauucuaugucugguuuucgcucaaaaacuucccggaaaugacaacagcacggcaacgcugugccuugggcaccaugcaguaccaaacggaacgauagugaaaacaaucacgaaugaccaaauugaaguuacuaaugcuacugagcugguucagaguuccucaacagguggaauaugcgacaguccucaucagauccuugauggagaaaacugcacacuaauagaugcucuauugggagacccucagugugauggcuuccaaaauaagaaaugggaccuuuuuguugaacgcagcaaagccuacagcaacuguuacccuuaugaugugccggauuaugccucccuuaggucacuaauugccucauccggcacacuggaguuuaacaaugaaagcuucaauuggacuggagucacucaaaauggaacaagcucugcuugcaaaaggagaucuaauagcaguuucuuuaguagauugaauugguugacccacuuaaaauucaaauacccagcauugaacgugacuaugccaaacaaugaagaauuugacaaauuguacauuugggggguucaccacccggguacagacaaugaccaaaucagccuauaugcucaagcaucaggaagaaucacagucucuaccaaaagaagccaacaaacuguaaucccgaauaucggaucuagacccaggguaagggauauccccagcagaauaagcaucuauuggacaauaguaaaaccgggagacauacuuuugauuaacagcacagggaaucuaauugcuccucgggguuacuucaaaauacgaagugggaaaagcucaauaaugagaucagaugcacccauuggcaaaugcaauucugaaugcaucacuccaaauggaagcauucccaaugacaaaccauuucaaaauguaaacaggaucacauauggggccugucccagauauguuaagcaaaacacucugaaauuggcaacagggaugcgaaauguaccagagaaacaaacuagaggcauauuuggcgcaaucgcggguuucauagaaaaugguugggagggaaugguggaugguugguacgguuucaggcaucaaaauucugagggaauaggacaagcagcagaucucaaaagcacucaagcagcaaucgaccaaaucaaugggaagcugaauagguugaucgggaaaaccaacgagaaauuccaucagauugaaaaagaauucucagaaguagaagggagaauucaggaccucgagaaauauguugaggacacuaaaauagaucucuggucauacaacgcggagcuucuuguugcccuggagaaccaacauacaauugaucuaacugacucagaaaugaacaaacuguuugaaagaacaaagaagcaacugagggaaaaugcugaggauaugggcaaugguuguuucaaaauauaccacaaaugugacaaugccugcauagggucaaucagaaauggaacuuaugaccaugauguauacagagaugaagcauuaaacaaccgguuccaaaucaaagguguugagcugaagucaggauacaaagauuggauccuauggauuuccuuugccauaucauguuuuuugcuuuguguugcuuuguugggguucaucaugugggccugccaaaaaggcaacauuaggugcaacauuugcauuuga

SEQ ID NO: 33894 - RNA, 1701 nt, Artificial Sequence
  derived and/or modified CDS sequence (wt) from hemagglutinin__InfluenzaA__ABU92735
augaagacuaucauugcuuugagcuacauucuaugucugguuuucgcucaaaaacuucccggaaaugacaacagcacggcaacgcugugccuugggcaccaugcaguaccaaacggaacgauagugaaaacaaucacgaaugaccaaauugagguuacuaaugcuacugagcugguucagaguuccucaacagguggaauaugcggcaguccucaucagauccuugauggagaaaacugcacacuaauagaugcucuauugggagacccucagugugauggcuuccaaaauaagaaaugggaccuuuuuguugaacgcagcaaagccuacagcaacuguuacccuuaugaugugccggauuaugccucccuuaggucacuaguugccucauccggcacacuggaguuuaacaaugaaagcuucaauuggacuggagucacucaaaauggaacaagcucugcuugcaaaaggagaucuaauaacaguuucuuuaguagauugaauugguugacccauuuaaaauucaaauacccagcauugaacgugacuaugccaaacaaugaaaaauuugacaaauuguacauuuggggaguucaccacccggguacggacaaugaccaaaucagccuauaugcucaagcaccagcaagaaucacagucucuaccaaaagaagccaacaaacuguaaucccgaauaucggaucuagacccaggguaagggauauccccagcagaauaagcaucuauuggacaauaguaaaaccgggagacauacuuuugauuaacagcacagggaaucuaauugcuccucgggguuacuucaaaauacuaagugggaaaagcucaauaaugagaucagaugcacccauuggcaaaugcaauucugaaugcaucacuccaaauggaagcauucccaaugacaaaccauuucaaaauguaaacaggaucacauauggggccugucccagauauguuaagcaaaacacucugaaauuggcaacaggaaugcgaaauguaccagagaaacaaacuagaggcauauuuggcgcaaucgcggguuucauagaaaaugguugggagggaaugguggaugguugguacgguuucaggcaucaaaauucugagggaauaggacaagcagcagaucucaaaagcacucaagcagcaaucaaccaaaucaaugggaagcugaauagguugaucgggaaaaccaacgagaaauuccaucagauugaaaaagaauucucagaaguagaagggagaauucaggaccucgagaaauauguugaggacacuaaaauagaucucuggucauacaacgcggagcuucuuguugcccuggagaaccaacauacaauugaucuaacugacucagaaaugaacaaacuguuugaaagaacaaagaagcaacugagggaaaaugcugaggauaugggcaaugguuguuucaaaauauaccacaaaugugacaaugccugcauagggucaaucagaaauggaacuuaugaccaugauguauacagagaugaagcauuaaacaaccgguuccagaucaaagguguugagcugaagucaggauacaaagauuggauccuauggauuuccuuugccaugucauguuuuuugcuuuguguugcuuuguugggguucaucaugugggccugccaaaaaggcaacauuaggugcaacauuugcauuuga

SEQ ID NO: 33895 - RNA, 1701 nt, Artificial Sequence; identical to SEQ ID NO: 33840
  derived and/or modified CDS sequence (wt) from hemagglutinin__InfluenzaA__ABU92737

SEQ ID NO: 33896 - RNA, 1701 nt, Artificial Sequence
  derived and/or modified CDS sequence (wt) from hemagglutinin__InfluenzaA__ABU92738
augaagacuaucauugcuuugagcuacauucuaugucugguuuucgcucaaaaacuucccggaaaugacaacagcacggcaacgcugugccuugggcaccaugcaguaccaaacggaacgauagugaaaacaaucacgaacgaccaaauugaaguuacuaaugcuacugaacugguucaaaguuccucaacagguggaauaugcgacaguccucaucagauccuugauggagaaaacugcacacuaauagaugcucuauugggagacccucagugugauggcuuccaaaauaagaaaugggaccuuuuuguugaacgcagcaaagccuacagcaacuguuacccuuaugaugugccggauuaugccucccuuaggucacuaauugccucauccggcacacuggaguuuaacaaugaaagcuucaauuggacuggagucacucaaaauggaacaagcucugcuugcaaaaggagaucuaauaacaguuucuuuaguagauugaauugguugacccacuuaaaauucaaauacccagcauugaacgugacuaugccaaacaaugaaaaauuugacaaauuguacauuugggggguucaccacccggguacggacaaugaccaaaucagccuauaugcucaagcaccaggaagaaucacagucucuaccaaaagaagccaacaaacuguaauuccgaauaucggaucuagaccccgaguaagggauauccccagcagaauaagcaucuauuggacaauaguaaaaccgggagacauacuuuugauuaacagcacagggaaucuaauugcuccucgggguuacuucaaaauacgaagugggaaaagcucgauaaugagaucagaugcacccauuggcaaaugcaauucugaaugcaucacuccaaauggaagcauucccaaugacaaaccauuucaaaauguaaacaggaucacauauggggccugucccagauauguuaagcaaaacacucugaaauuggcaacagggaugcgaaauguaccagagaaacaaacucgaggcauauuuggcgcaaucgcgggguucauagaaaaugguugggagggaaugguggaugguugguacgguuucaggcaucaaaauucugagggaauaggacaagcagcagaucucaaaagcacucaagcagcaaucgaucaaaucaaugggaagcugaauagguugaucgggaaaaccaacgagaaauuccaucagauugaaaaagaauucucagaaguagaagggagaauucaggaccucgagaaauauguugaggacacuaaaauagaucucuggucauacaacgcggagcuucuuguugcccuggagaaccaacauacaauugaccuaacugacucagaaaugaacaaacuguuugaaagaacaaagaagcaacugagggagaaugcugaggauaugggcaaugguuguuucaaaauauaccacaaaugugacaaugccugcauagggucaaucagaaauggaacuuaugaccaugauguauacagagaugaagcauuaaacaaccgguuccagaucaaagguguugagcugaagucaggauacaaagauuggauccuauggauuuccuuugccauaucauguuuuuugcuuuguguuguuuuguugggguucaucaugugggccugccaaaaaggcaacauuaggugcaacauuugcauuuga

SEQ ID NO: 33897 - RNA, 1701 nt, Artificial Sequence
  derived and/or modified CDS sequence (wt) from hemagglutinin__InfluenzaA__ABU92739
augaagacuaucauugcuuugagcuacauucuaugucugguuuucgcucaaaaacuucccggaaaugacaacagcacggcaacgcugugccuugggcaccaugcaguaccaaacggaacgauagugaaaacaaucacgaaugaccaaauugaaguuacuaaugcuacugagcugguucagauuuccucaacaggugaaauaugcgacaguccccaucagauccuugauggagaaaacugcacacuaauagaugcucuauugggagacccucagugugauggcuuccaaaauaagaaaugggaccuuuuuguugaacgcagcaaagccuacagcaacuguuacccuuaugaugugccggauuaugccucccuuaggucacuaguugccucauccggcacacuggaguuuaacaaugaaagcuuugauuggacuggagucacucagaauggaacaagcucugcuugcaaaaggagaucugauaaaaguuucuuuaguagauugaauugguugacccacuuaaaauacaaauacccagcauugaacguaacuaugccaaacaaugaaaaauuugacaaauuguacauuugggggguucaccacccggguacggacagugaccaaaucagccuauaugcucaagcaucaggaagaaucacagucucuaccaaaagaagccaacaaacuguaaucccgaauaucggaucuagacccaggguaagggaugucuccagccgaauaagcaucuauuggacaauaguaaaaccgggagacauacuuuugauuaacagcacagggaaucuaauugcuccucgggguuacuucaaaauacgaagugggaaaagcucaauaaugagaucagaugcacccaucggcaaaugcaauucugaaugcaucacuccaaauggaagcauucccaaugacaaaccauuucagaauguaaacaggaucacauauggggccugucccagguauguuaagcaaaacacucugaaauuggcaacagggaugcgaaauguaccagagaaacaaacuagaggcauauuuggcgcaaucgcggguuucauagaaaaugguugggagggaaugguggacgguugguacgguuucaggcaucaaaauucugagggcacaggacaagcagcagaucucaaaagcacucaagcagcaaucaaccaaaucaaugggaaacugaauagguuaaucgggaaaacaaacgagaaauuccaucagauugaaaaagaauucucggaaguagaaggaagaauucaggaccucgagaaauauguugaggacacuaaaauagaucucuggucauacaacgcggagcuucuuguugcccuggagaaccaacauacaauugaucuaacugacucagaaaugaacaaacuguuugaaagaacaaagaagcaacugagggaaaaugcugaggauaugggcaaugguuguuucaaaauauaccacaaaugugacaaugccugcauagggucaaucagaaauggaacuuaugaccaugauguguacagagaugaagcauuaaacaaccgguuccagaucaaagguguugaguugaagucaggauacaaagauuggauccuauggauuuccuuugccauaucauguuuuuugcuuuguguugcuuuguugggguucaucaugugggccugccaaaaaggcaacauuaggugcaacauuugcauuuga

SEQ ID NO: 33898 - RNA, 1701 nt, Artificial Sequence
  derived and/or modified CDS sequence (wt) from hemagglutinin__InfluenzaA__ABU92740
augaagacuaucauugcuuugagcuacauucuaugucugguuuucgcccaaaaacuucccggaaaugacaacagcacggcaacgcugugccuugggcaccaugcaguaccaaacggaacgauagugaaaacaaucacgaaugaccaaauugaaguuacuaaugcuacugagcugguucagaguuccucaacaggugaaauaugcgacaguccucaucagauccuugauggagaaaacugcacacuaauagauacucuauugggagacccucagugugauggcuuccaaaauaagaaaugggaccuuuuuguugaacgcagcaaagccuacagcaacuguuacccuuaugaugugccggauuaugccucccuuaggucacuaguugccucauccggcacacuggaguuuaacaaugaaagcuucaauuggacuggagucacucaaaauggaacaagcucugcuugcaaaaggagaucuaauaacaguuucuuuaguagauugaauugguugacccacuuaaaauucaaauacccagcauugaacgugacuaugccaaacaaugaaaaauuugacaaauuguacauuugggggguucaccacccggguacggacaaugaccaaaucuuccuguaugcucaagcaucaggaagaaucacagucucuaccaaaagaagccaacaaacuguaaucccgaauaucggaucuagacccagaguaaggaauauccccagcagaauaagcaucuauuggacaauaguaaaaccgggagacauacuuuugauuaacagcacagggaaucuaauugcuccuagggguuacuucaaaauacgaagugggaaaagcucaauaaugagaucagaugcacccauuggcaaaugcaauucugaaugcaucacuccaaauggaagcauucccaaugacaaaccauuucaaaauguaaacaggaucacauauggggccugucccagauauguuaagcaaaacacucugaaauuggcaacagggaugcgaaauguaccagagaaacaaacuagaggcauauuuggcgcaaucgcggguuucauagaaaaugguugggagggaaugguggaugguugguacgguuucaggcaucaaaauucugagggaauaggacaagcagcagaucucaaaagcacucaagcagcaaucaaucaaaucaaugggaagcugaauagguugaucgggaaaaccaacgagaaauuccaucagauugaaaaagaauucucagaaguagaagggagaauucaggaccucgagaaauauguugaggacacuaaaauagaucucuggucauacaacgcggagcuucuuguugcccuggagaaccaacauacaauugaucuaacugacucagaaaugaacaaacuguuugaaagaacaaagaagcaacugagggaaaaugcugaggauaugggcaaugguuguuucaaaauauaccacaaaugugacaaugccugcauaggaucaaucagaaauggaacuuaugaccaugauguuuacagagaugaagcauuaaacaaccgguuccagaucaaaggcguugagcugaagucaggauacaaagauuggauccuauggauuuccuuugccauaucauguuuuuugcuuuguguugcuuuguugggguucaucaugugggccugccaaaaaggcaacauuaggugcaacauuugcauuuga

SEQ ID NO: 33899 - RNA, 1701 nt, Artificial Sequence
  derived and/or modified CDS sequence (wt) from hemagglutinin__InfluenzaA__ABU92741
augaagacuaucauugcuuugagcuacauucuaugucugguuuucgcucaaaaacuucccggaaaugacaacagcacggcaacgcugugccuugggcaccaugcaguaccaaacggaacgauagugaaaacaaucacgaacgaccaaauugaaguuacuaaugcuacugaacugguucaaaguuccucaacagguggaauaugcgacaguccucaucagauccuugauggagaaaacugcacacuaauagaugcucuauugggagacccucagugugauggcuuccaaaauaagaaaugggaccuuuuuguugaacgcagcaaagccuacagcaacuguuacccuuaugaugugccggauuaugccucccuuaggucacuaauugccucauccggcacacuggaguuuaacaaugaaagcuucaauuggacuggagucacucaaaauggaacaagcucugcuugcaaaaggagaucuaauaacaguuucuuuaguagauugaauugguugacccacuuaaaauucaaauacccagcauugaacgugacuaugccaaacaaugaagaauuugacaaauuguacauuugggggguucaccacccggguacggacaaugaccaaaucagccuauaugcucaagcaccaggaagaaucacagucucuaccaaaagaagccaacaaacuguaauuccgaauaucggaucuagaccccgaguaagggauauccccagcagaauaagcaucuauuggacaauaguaaaaccgggagacauacuuuugauuaacagcacagggaaucuaauugcuccucgggguuacuucaaaauacgaagugggaaaagcucgauaaugagaucagaugcacccauuggcaaaugcaauucugaaugcaucacuccaaauggaagcauucccaaugacaaaccauuucaaaauguaaacaggaucacauauggggccugucccagauauguuaagcaaaacacucugaaauuggcaacagggaugcgaaauguaccagagaaacaaacucgaggcauauuuggcgcaaucgcgggguucauagaaaaugguugggagggaaugguggaugguugguacgguuucaggcaucaaaauucugagggaauaggacaagcagcagaucucaaaagcacucaagcagcaaucgaccaaaucaaugggaagcugaauagguugaucgggaaaaccaacgagaaauuccaucagauugaaaaagaauucucagaaguagaagggagaauucaggaccucgagaaauauguugaggacacuaaaauagaucucuggucauacaacgcggagcuucuuguugcccuggagaaccaacauacaauugaucuaacugacucagaaaugaacaaacuguuugaaagaacaaagaagcaacugagggagaaugcugaggauaugggcaaugguuguuucaaaauauaccacaaaugugacaaugccugcauagggucaaucagaaauggaacuuaugaccaugauauauacagagaugaagcauuaaacaaccgguuccagaucaaagguguugagcugaagucaggauacaaagauuggauccuauggauuuccuuugccauaucauguuuuuugcuuuguguuguuuuguugggguucaucaugugggccugccaaaaaggcaacauuaggugcaacauuugcauuuga

SEQ ID NO: 33900 - RNA, 1701 nt, Artificial Sequence
  derived and/or modified CDS sequence (wt) from hemagglutinin__InfluenzaA__ABU92742
augaagacuaucauugcuuugagcuacauucuaugucugguuuucgcucaaaaacuucccggaaaugacaacagcacggcaacgcugugccuugggcaccaugcaguaccaaacggaacgauagugaaaacaaucacgaaugaccaaauugaaguuacuaaugcuacugagcugguucagaguuccucaacagguggaauaugcgacaguccucaucagauccuugauggagaaaacugcacacuaauagaugcucuauugggagacccucagugugauggcuuccaaaauaagaaaugggaccuuuuuguugaacgcagcaaagccuacagcaacuguuacccuuaugaugugccggauuaugccucccuuaggucacuaguugccucauccggcacacuggaguuuaacaaugaaagcuucaauuggacuggagucacucaaaacggaacaagcucugcuugcaaaaggagaucuaauaacaguuucuuuaguagauugaauugguugacccacuuaaaauucaaauacccagcauugaacgugacuaugccaaacaaugaaaaauuugacaaauuguacauuugggggguucaccacccggguacggacaaugaccaaaucuuccuguaugcucaagcaucaggaagaaucacagucucuaccaaaagaagccaacaaacuguaaucccgaauaucggaucuagacccagaguaaggaauauccccagcagaauaagcaucuauuggacaauaguaaaaccaggagacauacuuuugauuaacagcacagggaaucuaauugcuccuagggguuacuucaaaauacgaagugggaaaagcucaauaaugagaucagaugcacccauuggcaaaugcaauucugaaugcaucacuccaaauggaagcauucccaaugacaaaccauuucaaaauguaaacaggaucacauacggggccugucccagauauguuaagcaaaacacucugaaauuggcaacagggaugcgaaauguaccagagaagcaaacuagaggcauauuuggcgcaaucgcggguuucauagaaaaugguugggagggaaugguggaugguugguacgguuucaggcaucaaaauucugagggaauaggacaagcagcagaucucaaaagcacucaagcagcaaucgaucaaaucaaugggaagcugaauagguugaucgggaaaaccaacgagaaauuccaucagauugaaaaagaauucucagaaguagaagggagaauucaggaccucgagaaauauguugaggacacuaaaauagaucucuggucauacaacgcggagcuucuuguugcccuggagaaccaacauacaauugaucuaacugacucagaaaugaacaaacuguuugaaaaaacaaagaagcaacugagggaaaaugcugaggauaugggcaaugguuguuucaaaauauaccacaaaugugacaaugccugcauaggaucaaucagaaauggaacuuaugaccaugauguauacagagaugaagcauuaaacaaccgguuccagaucaagggcguugagcugaagucaggauacaaagauuggauccuauggauuuccuuugccauaucauguuuuuugcuuuguguugcuuuguugggguucaucaugugggccugccaaaaaggcaacauuaggugcaacauuugcauuuga

SEQ ID NO: 33901 - RNA, 1701 nt, Artificial Sequence
  derived and/or modified CDS sequence (wt) from hemagglutinin__InfluenzaA__ABU92743
augaagacuaucauugcuuugagcuacauucuauaucugguuuucgcucaaaaacuucccgaaaaugacaacagcacggcaacgcugugccuugggcaccaugcaguaccaaacggaacgauagugaaaacaaucacgaaugaccaaauugaaguuacuaaugcuacugagcugguucagaguuccucaacagguggaauaugcgacaguccucaucagauccuugauggagaaaacugcacacuaauagaugcucuauugggagacccucagugugauggcuuccaaaauaagaaaugggaccuuuuuguugaacgcagcaaagccuacagcaacuguuacccuuaugaugugccggauuaugccucccuuaggucacuaguugccucauccggcacacuggaguuuaacaaugaaagcuucaauuggacuggagucacucaaaacggaacaagcucugcuugcaaaaggagaucuaauaacaguuucuuuaguagauugaauugguugacccacuuaaaauucaaauacccagcauugaacgugacuaugccaaacaaugaaaaauuugacaaauuguacauuugggggguucaccacccggguacggacaaugaccaaaucuuccuguaugcucaagcaucaggaagaaucacagucucuaccaaaagaagccaacaaacuguaaucccgaauaucggaucuagacccagaguaaggaauauccccagcagaauaagcaucuauuggacaauaguaaaaccgggagacauacuuuugauuaacagcacagggaaucuaauugcuccuagggguuacuucaaaauacgaagugggaaaagcucaauaaugagaucagaugcacccauuggcaaaugcaauucugaaugcaucacuccaaauggaagcauucccaaugacaaaccauuucaaaauguaaacaggaucacauauggggccugucccagauauguuaagcaaaacacucugaaauuggcaacagggaugcgaaauguaccagagaaacaaacuagaggcauauuuggcgcaaucgcggguuucauagaaaaugguugggagggaaugguggaugguugguacgguuucaggcaucaaaauucugagggaauaggacaagcagcagaucucaaaagcacucaagcagcaaucgaucaaaucaaugggaagcugaauagguugaucgggaaaaccaacgagaaauuccaucagauugaaaaagaauucucagaaguagaagggagaauucaggaccucgagaaauauguugaggacacuaaaauagaucucuggucauacaacgcggagcuucuuguugcccuggagaaccaacauacaauugaucuaacugacucagaaaugaacaaacuguuugaaaaaacaaagaagcaacugagggaaaaugcugaggauaugggcaaugguuguuucaaaauauaccacaaaugugacaaugccugcauaggaucaaucagaaauggaacuuaugaccaugauguauacagagaugaagcauuaaacaacagguuccagaucaagggcguugagcugaagucaggauacaaagauuggauccuauggauuuccuuugccauaucauguuuuuugcuuuguguugcuuuguugggguucaucaugugggccugccaaaaaggcaacauuaggugcaacauuugcauuuga

SEQ ID NO: 33902 - RNA, 1701 nt, Artificial Sequence; identical to SEQ ID NO: 33862
  derived and/or modified CDS sequence (wt) from hemagglutinin__InfluenzaA__ABU92744

SEQ ID NO: 33903 - RNA, 1701 nt, Artificial Sequence
  derived and/or modified CDS sequence (wt) from hemagglutinin__InfluenzaA__ABU92745
augaagacuaucauugcuuugagcuacauucuaugucugguuuucgcucaaaaacuucccggaaaugacaacagcacggcaacgcugugccuugggcaccaugcaguaccaaacggaacgauagugaaaacaaucacgaacgaccaaauugaaguuacuaaugcuacugaacugguucaaaguuccucaacagguggaauaugcgacaguccucaucagauccuugauggagaaaacugcacacuaauagaugcucuauugggagacccucagugugauggcuuccaaaauaagaaaugggaccuuuuuguugaacgcagcaaagccuacagcaacuguuacccuuaugaugugccggauuaugccucccuuaggucacuaauugccucauccggcacacuggaguuuaacaaugaaagcuucaauuggacuggagucacucaaaauggaacaagcucugcuugcaaaaggagaucuaauaacaguuucuuuaguagauugaauugguugacccacuuaaaauucaaauacccagcauugaacgugacuaugccaaacaaugaagaauuugacaaauuguacauuugggggguucaccacccggguacggacaaugaccaaaucagccuauaugcucaagcaccaggaagaaucacagucucuaccaaaagaagccaacaaacuguaauuccgaauaucggaucuagaccccgaguaagggauauccccagcagaauaagcaucuauuggacaauaguaaaaccgggagacauacuuuugauuaacagcacagggaaucuaauugcuccucgggguuacuucaaaauacgaauugggaaaagcucgauaaugagaucagaugcacccauuggcaaaugcaauucugaaugcaucacuccaaauggaagcauucccaaugacaaaccauuucaaaauguaaacaggaucacauauggggccugucccagauauguuaagcaaaacacucugaaauuggcaacagggaugcgaaauguaccagagaaacaaacucgaggcauauuuggcgcaaucgcgggguucauagaaaaugguugggagggaaugguggaugguugguacgguuucaggcaucaaaauucugagggaauagggcaagcagcagaucucaaaagcacucaagcagcaaucgaccaaaucaaugggaagcugaauagguugaucgggaaaaccaacgagaaauuccaucagauugaaaaagaauucucagaaguagaagggagaauucaggaccucgagaaauauguugaggacacuaaaauagaucucuggucauacaacgcggagcuucuuguugcccuggagaaccaacauacaauugaucuaacugacucagaaaugaacaaacuguuugaaagaacaaagaagcaacugagggagaaugcugaggauaugggcaaugguuguuucaaaauauaccacaaaugugacaaugccugcauagggucaaucagaaauggaacuuaugaccaugauguauacagagaugaagcauuaaacaaccgguuccagaucaaagguguugagcugaagucaggauacaaagauuggauccuauggauuuccuuugccauaucauguuuuuugcuuuguguuguuuuguugggguucaucaugugggccugccaaaaaggcaacauuaggugcaacauuugcauuuga

SEQ ID NO: 33904 - RNA, 1701 nt, Artificial Sequence
  derived and/or modified CDS sequence (wt) from hemagglutinin__InfluenzaA__ABU92746
augaagacuaucauugcuuugagcuacauucuaugucugguuuucgcucaaaaacuucccggaaaugacaacagcacggcaacgcugugccuugggcaccaugcaguaccaaacggaacgauagugaaaacaaucacgaaugaccaaauugaaguuacuaaugcuacugagcugguucagaguuccucaacagguggaauaugcgacaguccucaucagauccuugauggagaaaacugcacacuaauagaugcucuauugggagacccucagugugauggcuuccaaaauaagaaaugggaccuuuuuguugaacgcagcaaagccuacagcaacuguuacccuuaugaugugccggauuaugccucccuuaggucacuaguugccucauccggcacacuggaguuuaacaaugaaagcuucaauuggacuggagucacucaaaauggaacaagcucugcuugcaaaaggagaucuaauaacaguuucuuuaguagauugaauugguugacccacuuaaaauucaaauacccagcauugaacgugacuaugccaaacaaugaaaaauuugacaaauuguacauuugggggguucaccacccggguacggacaaugaccaaaucuuccuguaugcucaagcaucaggaagaaucacagucucuaccaaaagaagccaacaaacuguaaucccgaauaucggaucuagacccagaguaaggaauauccccagcagaauaagcaucuauuggacaauaguaaaaccgggagacauacuuuugauuaacagcacagggaaucuaauugcuccuagggguuacuucaaaauacgaagugggaaaagcucaauaaugagaucagaugcacccauuggcaaaugcaauucugaaugcaucacuccaaauggaagcauucccaaugacaaaccauuucaaaauguaaacaggaucacauacggggccugucccagauauguuaagcaaaacacucugaaauuggcaacagggaugcgaaauguaccagagaaacaaacuagaggcauauuuggcgcaaucgcggguuucauagaaaaugguugggagggaaugguggaugguugguacgguuucaggcaucaaaauucugagggaauaggacaagcagcagaucucaaaagcacucaagcagcaaucgaucaaaucaaugggaagcugaauagguugaucgggaaaaccaacgagaaauuccaucagauugaaaaagaauucucagaaguagaagggagaauucaggaccucgagaaauauguugaggacacuaaaauagaucucuggucauacaacgcggagcuucuuguugcccuggagaaccaacauacaauugaucuaacugacucagaaaugaacaaacuguuugaaaaaacaaagaagcaacugagggaaaaugcugaagauaugggcaaugguuguuucaaaauauaccacaaaugugacaaugccugcauaggaucaaucagaaauggaacuuaugaccaugauguauacagagaugaagcauuaaacaaccgguuccagaucaagggcguugagcugaagucaggauacaaagauuggauccuauggauuuccuuugccauaucauguuuuuugcuuuguguugcuuuguugggguucaucaugugggccugccaaaaaggcaacauuaggugcaacauuugcauuuga

SEQ ID NO: 33905 - RNA, 1701 nt, Artificial Sequence; identical to SEQ ID NO: 33865
  derived and/or modified CDS sequence (wt) from hemagglutinin__InfluenzaA__ABU92747

SEQ ID NO: 33906 - RNA, 1701 nt, Artificial Sequence
  derived and/or modified CDS sequence (wt) from hemagglutinin__InfluenzaA__ABU92748
augaagacuaucauugcuuugagcuacauucuaugucugguuuucgcucaaaaacuucccggaaaugacaacagcacggcaacgcugugccuugggcaccaugcaguaccaaacggaacgauagugaaaacaaucacgaaugaccaaauugaaguuacuaaugcuacugagcugguucagaguuccucaacaggugaaauaugcgacaguccucaucagauccuugauggagaaaacugcacacuaauagaugcucuauugggagacccucagugugauggcuuccaaaauaagaaaugggaccuuuuuguugaacgcagcaaagccuacagcaacuguuacccuuaugaugugccggauuaugccucccuuaggucacuaguugccucauccggcacacuggaguuuaacaaugaaagcuucaauuggacuggagucacucaaaauggaacaagcucugcuugcaaaaggagaucuaauaacaguuucuuuaguagacugaauugguugacccacucaaaauucaaauacccagcauugaacgugacuaugccaaacaaugaaaaauuugacaaauuguacauuugggggguucaccacccggguacggacaaugaccaaaccuucuuguaugcucaagcaucaggaagaaucacagucucuaccaaaagaagccaacaaacuguaaucccgaauaucggauccagaccuagaguaaggaauauccccagcagaauaagcaucuauuggacaauaguaaaaccgggagacauacuuuugauuaacagcacagggaaucuaauugcuccuagggguuacuucaaaauacgaagugggaaaagcucaauaaugagaucagaugcacccauugguaaaugcaauucugaaugcaucacuccaaauggaagcauucccaaugacaaaccauuucaaaauguaaacagaaucacauauggggccugucccagauauguuaagcaaaacacucugaaauuggcaacagggaugagaaauguaccagagaaacaaacuagaggcauauuuggcgcaaucgcggguuucauagaaaaugguugggagggaaugguggaugguugguacgguuucaggcaucaaaauucugagggaauaggacaagcagcagaucucaaaagcacucaagcagcaaucaaucaaaucaaugggaagcugaauagguugaucgggaaaaccaacgagaaauuccaucagauugaaaaagaauucucagaaguagaagggagaauucaggaccucgagaaauauguugaggacacuaaaauagaucucuggucauacaacgcggagcuucuuguugcccuggagaaccaacauacaauugaucuaacugacucagaaaugaacaaacuguuugaaagaacaaagaagcaacugagggaaaaugcugaggauaugggcaaugguuguuucaaaauauaccacaaaugugacaaugccugcauaggaucaaucagaaauggaacuuaugaccaugauguauacagagaugaagcauuaaacaaccgguuccagaucaaaggcguugagcugaagucaggauacaaagauuggauccuauggauuuccuuugccauaucauguuuuuugcuuuguguuguuuuguugggguucaucaugugggccugccaaaaaggcaacauuaggugcaacauuugcauuuga

SEQ ID NO: 33907 - RNA, 1701 nt, Artificial Sequence; identical to SEQ ID NO: 33865
  derived and/or modified CDS sequence (wt) from hemagglutinin__InfluenzaA__ABU92749

SEQ ID NO: 33908 - RNA, 1701 nt, Artificial Sequence
  derived and/or modified CDS sequence (wt) from hemagglutinin__InfluenzaA__ABU92750
augaagacuaucauugcuuugagcuacauucuaugucugguuuucgcucaaaaacuucccggaaaugacaaccgcacggcaacgcugugccuugggcaccaugcaguaccaaacggaacgauagugaaaacaaucacgaaugaccaaauugaaguuacuaaugcuacugagcugguucagauuuccucaacagguggaauaugcgacaguccucaucagauccuugauggagaaaacugcacacuaauagaugcucuauugggagacccucagugugauggcuuccaaaauaagaaaugggaccuuuuuguugaacgcagcaaagccuacagcaacuguuacccuuaugaugugccggauuaugccucccuuaggucacuaguugccucauccggcacacuggaguuuaacaaugaaagcuucgauuggacuggagucacucagaauggaacaagcucugcuugcaaaaggagaucuaauaaaaguuucuuuaguagauugaauugguugacccacuuaaaauacaaauacccagcauugaacgugacuaugccaaacaaugaaaaauuugacaaauuguacauuugggggguucaccacccggguacggacagugaccaaaucagccuauaugcucaagcaucaggaagaaucacagucucuaccaaaagaagccaacaaacuguaaucccgaauaucggaucuagacccaggguaagggaugucuccagccgaauaagcaucuauuggacaauaguaaaaccgggagacauacuuuugauuaacagcacagggaaucuaauugcuccucgggguuacuucaaaauacgaagugggaaaagcucaauaaugagaucagaugcacccauuggcaaaugcaauucugaaugcaucacuccaaauggaagcauucccaaugacaaaccauuucaaaauguaaacaggaucacauauggggccugucccagauauguuaagcaaaacacucugaaauuggcaacagggaugcgaaauguaccagagaaacaaacuagaggcauauuuggcgcaaucgcggguuucauagaaaaugguugggagggaaugguggacgguugguacgguuucaggcaucaaaauucugagggcacaggacaagcagcagaucucaaaagcacucaagcagcaaucaaccaaaucaaugggaaacugaauagguuaaucgggaaaacaaacgagaaauuccaucagauugaaaaagaauucucggaaguagaaggaagaauucaggaccucgagaaauauguugaggacacuaaaauagaucucuggucauacaacgcggagcuucuuguugcccuggagaaccaacauacaauugaucuaacugacucagaaaugaacaaacuguuugaaagaacaaagaagcaacugagggaaaaugcugaggauaugggcaaugguuguuucaaaauauaccacaaaugugacaaugccugcauagggucaaucagaaauggaacuuaugaccaugauguguacagagaugaagcauuaaacaaccgguuccagaucaaagguguugagcugaagucaggauacaaagauuggauccuauggauuuccuuugccauaucauguuuuuugcuuuguguugcuuuguugggguucaucaugugggccugccagaaaggcaacauuaggugcaacauuugcauuuga

SEQ ID NO: 33909 - RNA, 1701 nt, Artificial Sequence
  derived and/or modified CDS sequence (wt) from hemagglutinin__InfluenzaA__ABU92751
augaagacuaucauugcuuugagcuacauucuaugucugguuuucgcucaaaaacuucccggaaaugacaacagcacggcaacgcugugccuugggcaccaugcaguaccaaacggaacgauagugaaaacaaucacgaaugaccaaauugaaguuacuaaugcuacugagcugguucagaguuccucaacagguggaauaugcgacaguccucaucagauccuugauggagaaaacugcacacuaauagaugcucuauugggagacccucagugugauggcuuccaaaauaagaaaugggaccuuuuuguugaacgcagcaaagccuacagcaacuguuacccuuaugaugugccggauuaugccucccuuaggucacuaguugccucauccggaacacuggaguuuaacaaugaaagcuucaauuggacuggagucacucagaauggaacaagcucugcuugcaaaagaagaucuaauaaaaguuucuuuaguagauugaauugguugacccauuuaaaauacaaauacccagcauugaacgugacuaugccaaacaaugaaaaauuugacaaauuguacauuugggggguucaccacccggguacggacagugaccaaaucagccuauaugcucaagcaucaggaagaaucacagucucuaccaaaagaagccaacaaacuguaaucccgaauaucggaucuagacccaggguaagggaugucuccagcagaauaagcaucuauuggacaauaguaaaaccgggagacauacuuuugauuaacagcacagggaaucuaauugcuccucgggguuacuucaaaauacgaagugggaaaagcucaauaaugagaucagaugcacccauuggcaaaugcaauucugaaugcaucacuccaaauggaagcauucccaaugacaaaccauuucaaaauguaaacaggaucacauauggggccugucccagauauguuaagcaaaacacucugaaauuggcaacagggaugcgaaauguaccagagaaacaaacuagaggcauauuuggcgcaaucgcggguuucauagaaaaugguugggagggaaugguggacgguugguacgguuucaggcaucaaaauucugagggcacaggacaagcagcagaucucaaaagcacucaagcagcaaucaaccaaaucaaugggaaacugaauagguuaaucgggaaaacaaacgagaaauuccaucagauugaaaaagaauucucagaaguagaagggagaauucaggaccucgagaaauauguugaggacacuaaaauagaucucuggucauacaacgcggagcuucuuguugcccuggagaaccaacauacaauugaucuaacugacucagaaaugaacaaacuguuugaaagaacaaagaagcaacugagggaaaaugcugaggauaugggcaaugguuguuucaaaauauaccacaaaugugacaaugccugcauagggucaaucagaaauggaacuuaugaccaugauguauacagagaugaagcauuaaacaaccgguuccagaucaaagguguugagcugaagucaggauacaaagauuggauccuauggauuuccuuugccauaucauguuuuuugcuuuguguugcuuuguugggguucaucaugugggccugccaaaaaggcaacauuaggugcaacauuugcauuuga

SEQ ID NO: 33910 - RNA, 1701 nt, Artificial Sequence
  derived and/or modified CDS sequence (wt) from hemagglutinin__InfluenzaA__ABU92752
augaagacuaucauugcuuugagcuacauucuaugucugguuuucgcucaaaaacuucccggaaaugacaacagcacggcaacgcugugccuugggcaccaugcaguaccaaacggaacgauagugaaaacaaucacgaaugaccaaauugaaguuacuaaugcuacugagcugguucagauuuccucaacaggugaaauaugcgacaguccccaucagauccuugauggagaaaacugcacacuaauagaugcccuauugggagacccucagugugauggcuuccaaaauaagaaaugggaccuuuuuguugaacgcagcaaagccuacagcaacuguuacccuuaugaugugccggauuaugccucccuuaggucacuaguugccucauccggcacacuggaguuuaacaaugaaagcuucgauuggacuggagucacucagaauggaacaagcucugcuugcaaaaggagaucugacaaaaguuucuuuaguagauugaauugguugacccacuuaaaauacaaauacccagcauugaacguaaccaugccaaacaaugaaaaauuugacaaauuguacauuugggggguucaccacccggguacggacagugaccaaaucagccuauaugcucaagcaucaggaagaaucacagucucuaccaaaagaagccaacaaacuguaaucccgaauaucggaucuagacccaggguaagggaugucuccagccgaauaagcaucuauuggacaauaguaaaaccgggagacauacuuuugauuaacagcacagggaaucuaauugcuccucgggguuacuucaaaauacgaagugggaaaagcucaauaaugagaucagaugcacccauuggcaaaugcaauucugaaugcaucacuccaaauggaagcauucccaaugacaaaccauuucaaaauguaaacaggaucacauauggggccugucccagauauguuaagcaaaacacucugaaauuggcaacagggaugcgaaauguaccagagaaacaaacuagaggcauauuuggcgcaaucgcggguuucauagaaaaugguugggagggaaugguggacgguugguacgguuucaggcaucaaaauucugagggcacaggacaagcagcagaucucaaaagcacucaagcagcaaucaaccaaaucaaugggaaacugaauagguuaaucgggaaaacaaacgagaaauuccaucagauugaaaaagaauucucggaaguagaaggaagaauucaggaccucgagaaauauguugaggacacuaaaauagaucucuggucauacaacgcggagcuucuuguugcccuggagaaccaacauacaauugaucuaacugacucagaaaugaacaaacuguuugaaagaacaaagaagcaacugagggaaaaugcugaggauaugggcaaugguuguuucaaaauauaccacaaaugugacaaugccugcauagggucaaucagaaauggaacuuaugaccaugauguguacagagaugaagcauuaaacaaccgguuccagaucaaagguguugagcugaagucaggauacaaagauuggauccuauggauuuccuuugccauaucauguuuuuugcuuuguguugcuuuguugggguucaucaugugggccugccaaaaaggcaacauuaggugcaacauuugcauuuga

SEQ ID NO: 33911 - RNA, 1701 nt, Artificial Sequence
  derived and/or modified CDS sequence (wt) from hemagglutinin__InfluenzaA__ABU92753
augaagacuaucauugcuuugagcuacauucuaugucugguuuucgcucaaaaacuucccggaaaugacaacagcacggcaacgcugugccuugggcaccaugcaguaccaaacggaacgauagugaaaacaaucacgaaugaccaaauugaaguuacuaaugcuacugagcugguucagauuuccucaacagguggaauaugcgacaguccucaucagauccuugauggagaaaacugcacacuaauagaugcucuauugggagacccucagugugauggcuuccaaaauaagaaaugggaccuuuuuguugaacgcagcaaagccuacagcaacuguuacccuuaugaugugccggauuaugccucccuuaggucacuaguugccucauccggcacacuggaguuuaacaaugaaagcuucgauuggacuggagucacucagaauggaacaagcucugcuugcaaaaggagaucuaauaaaagcuucuuuaguagauugaauugguugacccacuuaaaauacaaauacccagcauugaacgugacuaugccaaacaaugaaaaauuugacaaauuguacauuugggggguucaccacccggguacggacagugaccaaaucagccuauaugcucaagcaucaggaagaaucacagucucuaccaaaagaagccaacaaacuguaaucccgaauaucggaucuagacccaggguaagggaugucuccagccgaauaagcaucuauuggacaauaguaaaaccgggagacauacuuuugauuaacagcacagggaaucuaauugcuccucgggguuacuucaaaauacgaagugggaaaagcucaauaaugagaucagaugcacccauuggcaaaugcaauucugaaugcaucacuccaaauggaagcauucccaaugacaaaccauuucaaaauguaaacaggaucacauauggggccugucccagauauguuaagcaaaacacucugaaauuggcaacagggaugcgaaauguaccagagaaacaaacuagaggcauauuuggcgcaaucgcggguuucauagaaaaugguugggagggaaugguggacgguugguacgguuucaggcaucaaaauucugagggcacaggacaagcagcagaucucaaaagcacucaagcagcaaucaaccaaaucaaugggaaacugaauagguuaaucgggaaaacaaacgagaaauuccaucagauugaaaaagaauucucggaaguagaaggaagaauucaggaccucgagaaauauguugaggacacuaaaauagaucucuggucauacaacgcggagcuucuuguugcccuggagaaccaacauacaauugaucuaacugacucagaaaugaacaaacuguuugaaagaacaaagaagcaacugagggaaaaugcugaggauaugggcaaugguuguuucaaaauauaccacaaaugugacaaugccugcauagggucaaucagaaauggaacuuaugaccaugauguguacagagaugaagcauuaaacaaccgguuccagaucaaagguguugagcugaagucaggauacaaagauuggauccuauggauuuccuuugccauaucauguuuuuugcuuuguguugcuuuguugggguucaucaugugggccugccaaaaaggcaacauuaggugcaacauuugcauuuga

SEQ ID NO: 33912 - RNA, 1701 nt, Artificial Sequence; identical to SEQ ID NO: 33774
  derived and/or modified CDS sequence (wt) from hemagglutinin__InfluenzaA__ABU92754

SEQ ID NO: 33913 - RNA, 1701 nt, Artificial Sequence
  derived and/or modified CDS sequence (wt) from hemagglutinin__InfluenzaA__ABU92755
augaagacuaucauugcuuugagcuacauucuaugucugguuuucgcucaaaaacuucccggaaaugacaacggcacggcaacacugugccuugggcaccaugcaguaccaaacggaacgauagugaaaacaaucacgaaugaccaaauugaaguuacuaaugcuacugagcugguucagaguuccucaacagguggaauaugcgacaguccucaucagauccuugauggagaaaacugcacacuaauagaugcucuauugggagacccucagugugauggcuuccaaaauaagaaaugggaccuuuuuguugaacgcagcaaagccuacagcaacuguuacccuuaugaugugccggauuaugccucccuuaggucacuaguugccucauccggcacacuggaguuuaacaaugaaagcuucaauuggacuggagucacucaaaauggaacaagcucugcuugcaaaaggagaucuaauaaaaguuucuuuaguagauugaauugguugacccacuuaaaauucaaauacccagcauugaacgugacuaugccaaacaaugaaaaauuugacaaauuguacauuugggggguucaccacccggguacggacaaugaccaaaucagccuauaugcucaagcaucaggaagaaucacagucucuaccaaaagaagccaacaaacuguaaucccgaauaucggaucuagacccaggguaagggauguccccagcagaauaagcaucuauuggacaauaguaaaaccgggagacauacuuuugauuaacagcacagggaaucuaauugcuccucgggguuacuucaaaauacgaagugggaaaagcucaauaaugagaucagaugcacccauuggcaaaugcaauucugaaugcaucacuccaaauggaagcauucccaaugacaaaccauuucaaaauguaaacaggaucacauauggggccugucccagauauguuaagcaaaacacucugaaauuggcaacagggaugcgaaauguaccagagaaacaaacuagaggcauauuuggcgcaaucgcggguuucauagaaaaugguugggagggaaugguggacgguugguacgguuucaggcaucaaaaugcugagggaacaggacaagcagcagaucucaaaagcacucaagcagcaaucaaccaaaucaaugggaagcugaauagguugaucgggaaaacaaacgagaaauuccaucagauugaaaaagaauucucagaaguagaaggaagaauucaggaccucgagaaauauguugaggacacuaaaauagaucucuggucauacaacgcggagcuucuuguugcccuggagaaccaacauacaauugaucuaacugacucagaaaugaacaaacuguuugaaagaacaaagaagcaacugagggaaaaugcugaggauaugggcaaugguuguuucaaaauauaccacaaaugugacaaugccugcauagggucaaucagaaauggaacuuaugaccauaauguauacagagaugaagcauuaaacaaccgguuccagaucaaagguguugagcugaagucaggauacaaagauuggauccuauggauuuccuuugccauaucauguuuuuugcuuuguguuguuuuguugggguucaucaugugggccugccaaaaaggcaacauuaggugcaacauuugcauuuga

SEQ ID NO: 33914 - RNA, 1701 nt, Artificial Sequence
  derived and/or modified CDS sequence (wt) from hemagglutinin__InfluenzaA__ABU92756
augaagacuaucauugcuuugagcuacauucuaugucugguuuucgcucaaaaacuucccggaaaugacaacagcacggcaacgcugugccuugggcaccaugcaguaccaaacggaacgauagugaaaacaaucacgaaugaccaaauugaaguuacuaaugcuacugagcugguucagauuuccucaacagguggaauaugcgacaguccucaucagauccuugauggagaaaacugcacacuaauagaugcucuauugggagacccucagugugauggcuuccaaaauaagaaaugggaccuuuuuguugaacgcagcaaagcccacagcaacuguuacccuuaugaugugccggauuaugccucccuuaggucacuaguugccucauccggcacacuggaguuuaacaaugaaagcuucgauuggacuggagucacucagaauggaacaagcucugcuugcaaaaggagaucuaauaaaaguuucuuuaguagauugaauugguugacccacuuaaaauacaaauacccagcauugaacgugacuaugccaaacaaugaaaaauuugacaaauuguacauuugggggguucaccacccggguacggacagugaccaaaucagccuauaugcucaagcaucaggaagaaucacagucucuaccaaaagaagccaacaaacuguaaucccgaauaucggaucuagacccaggguaagggaugucuccagccgaauaagcaucuauuggacaauaguaaaaccgggagacauacuuuugauuaacagcacagggaaucuaauugcuccucggggcuacuucaaaauacgaagugggaaaagcucaauaaugagaucagaugcacccauuggcaaaugcaauucugaaugcaucacuccaaauggaagcauucccaaugacaaaccauuucaaaauguaaacaggaucacauauggggccugucccagauauguuaagcaaaacacucugaaauuggcaacagggaugcgaaauguaccagagaaacaaacuagaggcauauuuggcgcaaucgcggguuucauagaaaaugguugggagggaaugguggacgguugguacgguuucaggcaucaaaauucugagggcacaggacaagcagcagaucucaaaagcacucaagcagcaaucaaccaaaucaaugggaaacugaauagguuaaucgggaaaacaaacgagaaauuccaucagauugaaaaagaauucucggaaguagaaggaagaauucaggaccucgagaaauauguugaggacacuaaaauagaucucuggucauacaacgcggagcuucuuguugcccuggagaaccaacauacaauugaucuaacugacucagaaaugaacaaacuguuugaaagaacaaagaagcaacugagggaaaaugcugaggauaugggcaaugguuguuucaaaauauaccacaaaugugacaaugccugcauagggucaaucagaaauggaacuuaugaccaugauguguacagagaugaagcauuaaacaaccgguuccagaucaaagguguugagcugaagucaggauacaaagauuggauccuauggauuuccuuugccauaucauguuuuuugcuuuguguugcuuuguugggguucaucaugugggccugccagaaaggcaacauuaggugcaacauuugcauuuga

SEQ ID NO: 33915 - RNA, 1701 nt, Artificial Sequence
  derived and/or modified CDS sequence (wt) from hemagglutinin__InfluenzaA__ABU92757
augaagacuaucauugcuuugagcuacauucuaugucugguuuucgcucaaaaacuucccggaaaugacaacagcacggcaacgcugugccuugggcaccaugcaguaccaaacggaacgauagugaaaacaaucacgaaugaccaaauugaaguuacuaaugcuacugagcugguucagauuuccucaacaggugaaauaugcgacaguccccaucagauccuugauggagaaaacugcacacuaauagaugcucuauugggagacccucagugugauggcuuccaaaauaagaaaugggaccuuuuuguugaacgcagcaaagccuacagcaacuguuacccuuaugaugugccggauuaugccucccuuaggucacuaguugccucauccggcacacuggaguuuaacaaugaaagcuucgauuggacuggagucacucagaauggaacaagcucugcuugcaaaaggagaucugauaaaaguuucuuuaguagauugaauugguugacccacuuaaaauacaaauacccagcauugaacguaacuaugccaaacaaugaaaaauuugacaaauuguacauuugggggguucaccacccggguacggacagugaccaaaucagccuauaugcucaagcaucaggaagaaucacagucucuaccaaaagaagccaacaaacuguaaucccgaauaucggaucuagacccaggguaagggaugucuccagccgaauaagcaucuauuggacaauaguaaaaccgggagacauacuuuugauuaacagcacagggaaucuaauugcuccucgggguuacuucaaaauacgaagggggaaaagcucaauaaugagaucagaugcacccauuggcaaaugcaauucugaaugcaucacuccaaauggaagcauucccaaugacaaaccauuucaaaauguaaacaggaucacauauggggccugucccagauauguuaagcaaaacacucugaaauuggcaacagggaugcgaaauguaccagagaaacaaacuagaggcauauuuggcgcaaucgcggguuucauagaaaaugguugggagggaaugguggacgguugguacgguuucaggcaucaaaauucugagggcacaggacaagcagcagaucucaaaagcacucaagcagcaaucaaccaaaucaaugggaaacugaauagguuaaucgggaaaacaaacgagaaauuccaucagauugaaaaagaauucucggaaguagaaggaagaauucaggaccucgagaaauauguugaggacacuaaaauagaucucuggucauacaacgcggagcuucuuguugcccuggagaaccaacauacaauugaucuaacugacucagaaaugaacaaacuguuugaaagaacaaagaagcaacugagggaaaaugcugaggauaugggcaaugguuguuucaaaauauaccacaaaugugacaaugccugcauagggucaaucagaaauggaacuuaugaccaugauguguacagagaugaagcauuaaacaaccgguuccagaucaaagguguugagcugaagucaggauacaaagauuggauccuauggauuuccuuugccauaucauguuuuuugcuuuguguugcuuuguugggguucaucaugugggccugccaaaaaggcaacauuaggugcaacauuugcauuuga

SEQ ID NO: 33916 - RNA, 1701 nt, Artificial Sequence; identical to SEQ ID NO: 33774
  derived and/or modified CDS sequence (wt) from hemagglutinin__InfluenzaA__ABU92758

SEQ ID NO: 33917 - RNA, 1701 nt, Artificial Sequence; identical to SEQ ID NO: 33774
  derived and/or modified CDS sequence (wt) from hemagglutinin__InfluenzaA__ABU92759

SEQ ID NO: 33918 - RNA, 1701 nt, Artificial Sequence
  derived and/or modified CDS sequence (wt) from hemagglutinin__InfluenzaA__ABU92760
augaagacuaucauugcuuugagcuacauucuaugucugguuuucgcucaaaaacuucccggaaaugacaacagcacggcaacgcugugccuugggcaccaugcaguaccaaacggaacgauagugaaaacaaucacgaaugaccaaauugaaguuacuaaugcuacugagcugguucagauuuccucaacaggugaaauaugcaacaguccccaucagauccuugauggagaaaacugcacacuaauagaugcucuauugggagacccucagugugauggcuuccaaaauaagaaaugggaccuuuuuguugaacgcagcaaagccuacagcaacuguuacccuuaugaugugccggauuaugccucccuuaggucacuaguugccucauccggcacacuggaguuuaacaaugaaagcuucgauuggacuggagucacucagaauggaacaagcucugcuugcaaaaggagaucugauaaaaguuucuuuaguagauugaauugguugacccacuuaaaauacaaauacccagcauuaaacguaacuaugccaaacaaugaaaaauuugacaaauuguacauuugggggguucaccacccggguacggacagugaccaaaucagccuauaugcucaagcaucaggaagaaucacagucucuaccaaaagaagccaacaaacuguaaucccgaauaucggaucuagacccaggguaagggaugucuccagccgaauaagcaucuauuggacaauaguaaaaccgggagacauacuuuugauuaacagcacagggaaucuaauugcuccucgggguuacuucaaaauacgaagugggaaaagcucaauaaugagaucagaugcacccauuggcaaaugcaauucugaaugcaucacuccaaauggaagcauucccaaugacaaaccauuucaaaauguaaacaggaucacauauggggccugucccagauauguuaagcaaaacacucugaaauuggcaacagggaugcgaaauguaccagagaaacaaacuagaggcauauuuggcgcaaucgcggguuucauagaaaaugguugggagggaaugguggacgguugguacgguuucaggcaucaaaauucugagggcacaggacaagcagcagaucucaaaagcacucaagcagcaaucaaccaaaucaaugggaaacugaauagguuaaucgggaaaacaaacgagaaauuccaucagauugaaaaagaauucucggaaguagaaggaagaauucaggaccucgagaaauauguugaggacacuaaaauagaucucuggucauacaacgcggagcuucuuguugcccuggagaaccaacauacaauugaucuaacugacucagaaaugaacaaacuguuugaaagaacaaagaagcaacugagggaaaaugcugaggauaugggcaaugguuguuucaaaauauaccacaaaugugacaaugccugcauagggucaaucagaaauggaacuuaugaccaugauguguacagagaugaagcauuaaacaaccgguuccagaucaaagguguugagcugaagucaggauacaaagauuggauccuauggauuuccuuugccauaucauguuuuuugcuuuguguugcuuuguugggguucaucaugugggccugccaaaaaggcaacauuaggugcaacauuugcauuuga

SEQ ID NO: 33919 - RNA, 1698 nt, Artificial Sequence
  derived and/or modified CDS sequence (wt) from hemagglutinin__InfluenzaA__ABV29579
augaaaguaaaacuacugguucuguuauguacauuuacagcuacauaugcagacacaauauguauaggcuaccaugccaacaacucgaccgacacuguugacacaguacuugagaagaaugugacagugacacacucugucaaccuacuugaggacagucacaauggaaaacuaugucuacuaaaaggaauagccccacuacaauuggguaauugcagcguugccggauggaucuuaggaaacccagaaugcgaauuacugauuuccaaggaaucaugguccuacauuguagagacaccaaauccugagaauggaacauguuacccaggguauuucgccgacuaugaggagcugagagagcaauugaguucaguaucuucauuugagagguucgaaauauuccccaaagagagcucauggcccaaccacaccguaaccggaguaucagcaucaugcucccauaacgggaaaagcaguuuuuacagaaauuugcuauggcugacggggaagaaugguuuguauccaaaccugagcaaguccuaugcaaacaacaaagagaaagaaguccuuguacugugggguguucaucacccgccuaacauaggggaccaaagggcccucuaucauacagaaaaugcuuaugucucuguagugucuucacauuauagcagaagauucaccccagaaauagccaaaagacccaaggugagagaucaggaaggaagaaucaacuacuacuggacucugcuugaacccggggauacaauaauauuugaggcaaauggaaaucuaauagcgccaagguuugcuuucgcacugaguagaggcuuuggaucaggaaucaucaccucaaaugcaccaauggaugaaugugaugcgaaaugucaaacgccucagggagcuauaaacagcagucuuccuuuccagaauguacacccagucacaauaggagaguguccaaaguaugucaggaguacaaaauuaagaaugguuacaggacuaaggaacaucccauccauucaauccagagguuuguuuggagccauugccgguuucauugaagggggguggacuggaaugguagaugguugguaugguuaucaccaucagaaugagcaaggaucuggguaugcugcagaucaaaaaagcacacaaaaugccauuaacgggauuacaaacaaggugaauucuguaauugagaaaaugaacacucaauucacagcugugggcaaagaauucaacaaauuggaaaaaaggauggaaaacuuaaauaaaaaaguugaugauggguuucuagacauuuggacauauaacgcagaauuguugguucuacuggaaaaugaaaggacuuuggacuuccaugacuccaacgugaagaaucuguaugagaaaguaaaaagccaauuaaagaauaaugccaaagaaauaggaaacggguguuuugaauucuaucacaaguguaacgaugaaugcauggagagugugaaaaauggaacuuaugacuauccaaaauauuccgaagaaucaaaguugaacagggagaaaauugauggagugaaauuggaaucaaugggagucuaucagauuuuggcgaucuacucaacagucgccaguucccugguucuuuuggucucccugggggcaaucagcuucuggauguguuccaaugggucuuugcaguguagaauaugcaucuaa

SEQ ID NO: 33920 - RNA, 1698 nt, Artificial Sequence
  derived and/or modified CDS sequence (wt) from hemagglutinin__InfluenzaA__ABV29612
augaaaguaaaacuacugauucuguuauguacauuuacagcuacauaugcagacacaauauguauaggcuaccaugccaacaacucgaccgacacuguugacacaguacuugagaagaaugugacagugacacacucugucaaccuacuugaggacagucacaauggaaaacuaugucuacuaaaaggaauagccccacuacaauuggguaauugcagcguugccggauggaucuuaggaaacccagaaugcgaauuacugauuuccaaggaaucaugguccuacauuguagagacaccaaauccugagaauggaacauguuacccaggguauuucgccgacuaugaggagcugagagagcaauugaguucaguaucuucauuugagagguucgaaauauuccccaaagagagcucauggcccaaccacaccguaaccggaguaucagcaucaugcucccauaacgggaaaagcaguuuuuacagaaauuugcuauggcugacggggaagaaugguuuguauccaaaccugagcaaguccuaugcaaacaacaaagagaaagaaguccuuguacugugggguguucaucacccgccuaacauaggggaccaaagggcccucuaucauacagaaaaugcuuaugucucuguagugucuucacauuauagcagaagauucaccccagaaguagccaaaagacccaaggugagagaucaggaaggaagaaucaacuacuacuggacucugcuugaacccggggauacaauaauauuugaggcaaauggaaaucuaauagcgccaagguuugcuuucgcacugaguagaggcuuuggaucaggaaucaucaccucaaaugcaccaauggaugaaugugaugcgaaaugucaaacaccucagggagcuauaaacagcagucuuccuuuccagaauguacacccagucacaauaggagaguguccaaaguaugucaggaguacaaaauuaagaaugguuacaggacuaaggaacaucccauccauucaauccagagguuuauuuggagcaauugccgguuucauugaagggggguggacuggaaugguagaugguugguaugguuaucaccaucagaaugagcaaggaucuggguaugcugcagaucaaaaaagcacacaaaaugccauuaacgggauuacaaacaaggugaauucuguaauugagaaaaugaacacucaauucacagcugugggcaaagaauucaacaaauuggaaagaaggauggaaaacuuaaauaaaaaaguugaugauggguuucuagacauuuggacauauaacgcagaauuguugguucuacuggaaaaugaaaggacuuuggacuuccaugacuccaacgugaagaaucuguaugagaaaguaaaaagccaauuaaagaauaaugccaaagaaauaggaaacggguguuuugaauucuaucacaaguguaacgaugaaugcauggagagugugaaaaauggaacuuaugacuauccaaaauauuccgaagaaucaaaguugaacagggagaaaauugauggagugaaauuggaaucaaugggggucuaucagauuuuggcgaucuacucaacagucgccaguucccugguucuuuuggucucccugggggcaaucagcuucuggauguguuccaaugggucuuugcaguguagaauaugcaucuaa

SEQ ID NO: 33921 - RNA, 1698 nt, Artificial Sequence
  derived and/or modified CDS sequence (wt) from hemagglutinin__InfluenzaA__ABV29634
augaaaguaaaacuacuuguucuguuauguacauuuacagcuacauaugcagacacaauauguauaggcuaccaugccaacaacucgaccgacacuguugacacaguacuugagaagaaugugacagugacacacucugucaaccuacuugaggacagucacaauggaaaacuaugucuacuaaaaggaauagccccacuacaauuggguaauugcagcguugccggauggaucuuaggaaacccagaaugcgaauuacugauuuccaaggaaucaugguccuacauuguagaagcaccaaguccugagaauggaacauguuacccaggauauuuugccgacuaugaggagcugagggagcaauugaguucaguaucuucauuugagagguucgaaauauuccccaaagagagcucauggcccaaccacacaguaaccggaguaucagcaucaugcucccauaacgggaaaagcaguuuuuacagaaauuugcuauggcugacggggaagaaugguuuguauccaaaccugagcaaguccuaugcaaacaacaaagagaaagaaguccuuguacugugggguguucaucacccgccuaacauaggggaccaaagggcccucuaucauacagaaaaugcuuaugucucuguagugucuucacauuauagcagaagauucaccccagaaauagccaaaagacccaaggugagagaucaggaaggaagaaucaacuacuacuggacucugcuggaacccggggauacaauaauauuugaggcaaauggaaaucuaauagcgccaagguuugcuuucgcacugaguagaggcuuuggaucaggaaucaucaccucaaaugcaccaaugggugaaugugaugcgaagugucaaacaccucagggagcuauaaacaguagucuuccuuuccagaauguacacccagucacaauaggagaguguccaaaguaugucaggagugcaaaauuaagaaugguuacaggacuaaggaacaucccauccauucaauccagagguuuguuuggagccauugccgguuucauugaagggggguggacuggaaugguagaugguugguaugguuaucaccaucagaaugagcaaggaucuggguaugcugcagaucaaaaaagcacacaaaaugccauuaacgggauuacaaacaaggugaauucuguaauugagaaaaugaacacucaauucacagcugugggcaaagaauucaacaaauuggaaagaaggauggaaaacuuaaauaaaaagguugaugauggguuucuagacauuuggacauauaacgcagaauuguugguucuacuggaaaaugaaaggacuuuggacuuccaugacuccaacgugaagaaucuguaugagaaaguaaaaagccaauuaaagaauaaugccaaagaaauaggaaacggguguuuugaauucuaucacaaguguaacgaugaaugcauggagagugugaaaaauggaacuuaugacuauccaaaauauuccgaagaaucaaaguugaacagggagaaaauugauggagugaaauuggaaucaaugggagucuaucagauucuggcgaucuacucaacagucgccaguucccugguucuuuuggucucccugggggcaaucagcuucuggauguguuccaaugggucuuugcaguguagaauaugcaucuaa

SEQ ID NO: 33922 - RNA, 1698 nt, Artificial Sequence
  derived and/or modified CDS sequence (wt) from hemagglutinin__InfluenzaA__ABV29645
augaaaguaaaacuacugauucuguuauguacauuuacagcuacauaugcagacacaauauguauaggcuaccaugccaacaacucgaccgacacuguugacacaguacuugagaagaaugugacagugacacacucugucaaccuacuugaggacagucacaauggaaaacuaugucuacuaaaaggaauagccccacuacaauuggguaauugcagcguugccggauggaucuuaggaaacccagaaugcgaauuacugauuuccaaggaaucaugguccuacauuguagagacaccaaauccugagaauggaacauguuacccaggguauuucgccgacuaugaggagcugagagagcaauugaguucaguaucuucauuugagagguucgaaauauuccccaaagagagcucauggcccaaccacaccguaaccggaguaucagcaucaugcucccauaacgggaaaagcaguuuuuacagaaauuugcuauggcugacggggaagaaugguuuguauccaaaccugagcaaguccuaugcaaacaacaaagaaaaagaaguccuuguacugugggguguucaucacccgccuaacauaggggaccaaagggcccucuaucauacagaaaaugcuuaugucucuguagugucuucacauuauagcagaagauucaccccagaaauagccaaaagacccaaggugagagaucaggaaggaagaaucaacuacuacuggacucugcuugaacccggggauacaauaauauuugaggcaaauggaaaucuaauagcgccaagguuugcuuucgcacugaguagaggcuuuggaucaggaaucaucaccucaaaugcaccaauggaugaaugugaugcgaaaugucaaacaccucagggagcuauaaacagcagucuuccuuuccagaacguacacccagucacaauaggagaguguccaaaguaugucaggaguacaaaauuaagaaugguuacaggacuaaggaacaucccauccauucaauccagagguuuauuuggagccauugccgguuucauugaagggggguggacuggaaugguagaugguugguaugguuaucaccaucagaaugagcaaggaucuggguaugcugcagaucaaaaaagcacacaaaaugccauuaacgggauuacaaacaaggugaauucuguaauugagaaaaugaacacucaauucacagcugugggcaaagaauucaacaaauuggaaagaaggauggaaaacuuaaauaaaaaaguugaugauggguuucuagacauuuggacauauaacgcagaauuguugguucuacuggaaaaugaaaggacuuuggacuuccaugacuccaacgugaagaaucuguaugagaaaguaaaaagccaauuaaagaauaaugccaaagaaauaggaaacggguguuuugaauucuaucacaaguguaacgaugaaugcauggagagugugaaaaauggaacuuaugacuauccaaaauauuccgaagaaucaaaguugaacagggagaaaauugauggagugaaauuggaaucaaugggagucuaucagauuuuggcgaucuacucaacagucgccaguucccugguucuuuuggucucccugggggcaaucagcuucuggauguguuccaaugggucuuugcaguguagaauaugcaucuaa

SEQ ID NO: 33923 - RNA, 1698 nt, Artificial Sequence
  derived and/or modified CDS sequence (wt) from hemagglutinin__InfluenzaA__ABV29667
augaaaguaaaacuacugauucuguuauguacauuuacagcuacauaugcagacacaauauguauaggcuaccaugccaacaacucgaccgacacuguugacacaguacuugagaagaaugugacagugacacacucugucaaccuacuugaggacagucacaauggaaaacuaugucuacuaaaaggaauagccccacuacaauuggguaauugcagcguugccggauggaucuuaggaaacccagaaugcgaauugcugauuuccaaggaaucaugguccuacauuguagagacaccaaauccugagaauggaacauguuacccaggguauuucgccgacuaugaggagcugagagagcaauugaguucaguaucuucauuugagagauucgaaauauuccccaaagagagcucauggcccaaccacaccguaaccggaguaucagcaucaugcucccauaacgggaaaagcaguuuuuacagaaauuugcuauggcugacggggaagaaugguuuguauccaaaccugagcaaguccuaugcaaacaacaaagagaaagaaguccuuguacugugggguguucaucacccgccuaacauaggggaccaaagggcccucuaucauacagaaaaugcuuaugucucuguagugucuucacauuauagcagaagauucaccccagaaauagccaaaagacccaaggugagagaucaggaaggaagaaucaacuacuacuggacucugcuugaacccggggauacaauaauauuugaggcaaauggaaaucuaauagcgccaagguuugcuuucgcacugaguagaggcuuuggaucaggaaucaucaccucaaaugcaccaauggaugaaugugaugcgaaaugucaaacaccucagggagcuauaaacagcagucuuccuuuccagaauguacacccagucacaauaggagaguguccaaaguaugucaggaguacaaaauuaagaaugguuacaggacuaaggaacaucccauccauucaauccagagguuuauuuggagccauugccgguuucauugaagggggguggacuggaaugguagaugguugguaugguuaucaccaucagaaugagcaaggaucuggguaugcugcagaucaaaaaagcacacaaaaugccauuaacgggauuacaaacaaggugaauucuguaauugagaaaaugaacacucaauucacagcugugggcaaagaauucaacaaauuggaaagaaggauggaaaacuuaaauaaaaaaguugaugauggguuucuagacauuuggacauauaacgcagaauuguugguucuacuggaaaaugaaaggacuuuggacuuccaugacuccaacgugaagaaucuguaugagaaaguaaaaagccaauuaaagaauaaugccaaagaaauaggaaacggguguuuugaauucuaucacaaguguaaugaugaaugcauggagagugugaaaaauggaacuuaugacuauccaaaauauuccgaagaaucaaaguugaacagggagaaaauugauggagugaaauuggaaucaaugggagucuaucagauuuuggcgaucuacucaacagucgccaguucccugguucuuuuggucucccugggggcaaucagcuucuggauguguuccaaugggucuuugcaguguagaauaugcaucuaa

SEQ ID NO: 33924 - RNA, 1698 nt, Artificial Sequence
  derived and/or modified CDS sequence (wt) from hemagglutinin__InfluenzaA__ABV29678
augaaaguaaaacuacugauucuguuauguacauuuacagcuacauaugcagacacaauauguauaggcuaccaugccaacaacucgaccgacacuguugacacaguacuugagaagaaugugacagugacacacucugucaaccuacuugaggacagucacaauggaaaacuaugucuacuaaaaggaauagccccacuacaauuggguaauugcagcguugccggauggaucuuaggaaacccagaaugcgaauuacugauuuccaaggaaucaugguccuacauuguagagacaccaaauccugagaauggaacauguuacccaggguauuucgccgacuaugaggagcugagagagcaauugaguucaguaucuucauuugagagguucgaaauauuccccaaagagagcucauggcccaaccacaccguaaccggaguaucagcaucaugcucccauaacgggaaaagcaguuuuuacagaaauuugcuauggcugacggggaagaaugguuuguauccaaaccugagcaaguccuaugcaaacaacaaagagaaagaaguccuuguacugugggguguucaucacccgccuaacauaggggaccaaagggcccucuaucauacagaaaaugcuuaugucucuguagugucuucacauuauagcagaagauucaccccagaaauagccaaaagacccaaggugagagaucaggaaggaagaaucaacuacuacuggacucugcuugaacccggggauacaauaauauuugaggcaaauggaaaucuaauagcgccaagguuugcuuucgcacugaguagaggcuucggaucaggaaucaucaccucaaaugcaccaguggaugaaugugaugcgaaaugucaaacaccucagggagcuauaaacagcagucuuccuuuccagaauguacacccagucacaauaggagaguguccaaaguaugucaggaguacaaaauuaagaaugguuacaggacuaaggaacaucccauccauucaauccagagguuuauuuggagccauugccgguuucauugaagggggguggacuggaaugguagaugguugguaugguuaucaccaucagaaugagcaaggaucuggguaugcugcagaucaaaaaagcacacaaaaugccauuaacgggauuacaaacaaggugaauucuguaauugagaaaaugaacacucaauucacagcugugggcaaagaauucaacaaauuggaaagaaggauggaaaacuuaaauaaaaaaguugaugauggguuucuagacauuuggacauauaacgcagaauuguugguucuacuggaaaaugaaaggacuuuggacuuccaugacuccaacgugaagaaucuguaugagaaaguaaaaagccaauuaaagaauaaugccaaagaaauaggaaacggguguuuugaauucuaucacaaguguaacgaugaaugcauggagagugugaaaaauggaacuuaugacuauccaaaauauuccgaagaaucaaaguugaacagggagaaaauugauggagugaaauuggaaucaaugggagucuaucagauuuuggcgaucuacucaacagucgccaguucccugguucuuuuggucucccugggggcaaucagcuucuggauguguuccaaugggucuuugcaguguagaauaugcaucuaa

SEQ ID NO: 33925 - RNA, 1698 nt, Artificial Sequence
  derived and/or modified CDS sequence (wt) from hemagglutinin__InfluenzaA__ABV29689
augaaaguaaaacuacugguucuguuauguacauuuacagcuacauaugcagacacaauauguauaggcuaccaugccaacaacucgaccgacacuguugacacaguacuugagaagaaugugacagugacacacucugucaaccuacuugaggacagucacaauggaaaacuaugucuacuaaaaggaauagccccacuacaauuggguaauugcagcguugccggauggaucuuaggaaacccagaaugcgaauuacugauuuccaaggaaucaugguccuacauuguagagacaccaaauccugagaauggaacauguuacccaggguauuucgccgacuaugaggagcugagagagcaauugaguucaguaucuucauuugagagguucgaaauauuccccaaagagagcucauggcccaaccacaccguaaccggaguaucagcaucaugcucccauaacgggaaaagcaguuuuuacagaaauuugcuauggcugacggggaagaaugguuuguauccaaaccugagcaaguccuaugcaaacaacaaagagaaagaaguccuuguacugugggguguucaucacccaccuaacauaggggaccaaagggcccucuaucauacagaaaaugcuuaugucucuguagugucuucacauuauagcagaagauucaccccagaaauagccaaaagacccaaggugagagaucaggaaggaagaaucaacuacuacuggacucugcuugaacccggggauacaauaauauuugaggcaaauggaaaucuaauagcgccaagguuugcuuucgcacugaguagaggcuuuggaucaggaaucaucaccucaaaugcaccaauggaugaaugugaugcgaaaugucaaacaccucagggagcuauaaacagcagucuuccuuuccagaauguacacccagucacaauaggagaguguccaaaguaugucaggaguacaaaauuaagaaugguuacaggacuaaggaacaucccauccauucaauccagagguuuguuuggagccauugccgguuucauugaagggggguggauuggaaugguagaugguugguaugguuaucaccaucagaaugagcaaggaucuggguaugcugcagaucaaaaaagcacacaaaaugccauuaacgggauuacaaacaaggugaauucuguaauugagaaaaugaacacucaauucacagcugugggcaaagaauucaacaaauuggaaagaaggauggaaaacuuaaauaaaaaaguugaugauggguuucuagacauuuggacauauaacgcagaauuguugguucuacuggaaaaugaaaggacuuuggacuuccaugacuccaacgugaagaaucuguaugagaaaguaaaaagccaauuaaagaauaaugccaaagaaauaggaaacggguguuuugaauucuaucacaaguguaacgaugaaugcauggagagugugaaaaauggaacuuaugacuauccaaaauauuccgaagaaucaaaguugaacagggagaaaauugauggagugaaauuggaaucaaugggagucuaucagauuuuggcgaucuacucaacagucgccaguucccugguucuuuuggucucccugggggcaaucagcuucuggauguguuccaaugggucuuugcaguguagaauaugcaucuaa

SEQ ID NO: 33926 - RNA, 1698 nt, Artificial Sequence
  derived and/or modified CDS sequence (wt) from hemagglutinin__InfluenzaA__ABV29700
augaaaguaaaacuacugguucuguuauguacauuuacagcuacauaugcagacacaauauguauaggcuaccaugccaacaacucgaccgacacuguugacacaguacuugagaagaaugugacagugacacacucugucaaccuacuugaggacagucacaauggaaaacuaugucuacuaaaaggaauagccccacuacaauuggguaauugcagcguugccggauggaucuuaggaaacccagaaugcgaauuacugauuuccaaggaaucaugguccuacauuguagagacaccaaauccugagaauggaacauguuacccaggguauuucgccgacuaugaggagcugagagagcaauugaguucaguaucuucauuugagagguucgaaauauuccccaaagagagcucauggcccaaccacaccguaaccggaguaucagcaucaugcucccauaacgggaaaagcaguuuuuacagaaauuugcuauggcugacggggaagaaugguuuguauccaaaccugagcaaguccuaugcaaacaacaaagagaaagaaguccuuguacugugggguguucaucacccgccuaacauaggggaccaaagggcccucuaucauacagaaaaugcuuaugucucuguagugucuucacauuauagcagaagauucaccccagaaauagccaaaagacccaaggugagagaucaggaaggaagaaucaacuacuacuggacucugcuugaacccggggauacaauaauauuugaggcaaauggaaaucuaauagcgccaagguuugcuuucgcacugaguagaggcuuuggaucaggaaucaucaccucaaaugcaccaauggaugaaugugaugcgaaaugucaaacaccucagggagcuauaaacagcagucuuccuuuccagaauguacacccagucacaauaggagaguguccaaaguaugucaggaguacaaaauuaagaaugguuacaggacuaaggaacaucccauccauucaauccagagguuuguuuggagccauugccgguuucauugaagggggguggacuggaaugguagauggaugguaugguuaccaccaucagaaugagcaaggaucuggguaugcugcugaucaaaaaagcacacaaaaugccauuaacgggauuacaaacaaggugaauucuguaauugagaaaaugaacacucaauucacagcugugggcaaagaauucaacaaauuggaaagaaggauggaaaacuuaaauaaaaaaguugaugauggguuucuagacauuuggacauauaacgcagaauuguugguucuacuggaaaaugaaaggacuuuggacuuccaugacuccaacgugaagaaucuguaugagaaaguaaaaagccaauuaaagaauaaugccaaagaaauaggaaacggguguuuugaauucuaucacaaguguaacgaugaaugcauggagagugugaaaaauggaacuuaugacuauccaaaauauuccgaagaaucaaaguugaacagggagaaaauugauggagugaaauuggaaucaaugggagucuaucagauuuuggcgaucuacucaacagucgccaguucccugguucuuuuggucucccugggggcaaucagcuucuggauguguuccaaugggucuuugcaguguagaauaugcaucuaa

SEQ ID NO: 33927 - RNA, 1701 nt, Artificial Sequence
  derived and/or modified CDS sequence (wt) from hemagglutinin__InfluenzaA__ABV29711
augaagacuaucauugcuuugagcuacauucuaugucugguuuucgcucaaaaacuucccggaaaugacaacagcacggcaacgcugugccuugggcaucaugcaguaccaaacggaacgauagugaaaacaaucacgaaugaccaaauugaaguuacuaaugcuacugagcuaguucagaguuccucaacaggugaaauaugcgacaguccucaucagauccuugauggagaaaacugcacacuaauagaugcucuauugggagacccucagugugauggcuuccaaaauaagaaaugggaccuuuuuguugaacgcagcaaagccuacagcaacuguuacccuuaugaugugccggauuaugccucccuuaggucacuaguugccucauccggaacacuggaguuuaacaaugaaagcuucaauuggacuggagucacucaaaacggaacaagcucugcuugcauaaggagaucuaauaacaguuucuuuaguagauugaauugguugacccacuuaaaauucaaauacccagcauugaacgugacuaugccaaacaaugaaaaauuugacaaauuguacauuugggggguucaccacccggguacggacaaugaccaaaucuuccuguaugcucaagcaucaggaagaaucacagucucuaccaaaagaagccaacaaacuguaaucccgaauaucggaucuagacccagaguaaggaauauccccagcagaauaagcaucuauuggacaauaguaaaaccgggagacauacuuuugauuaacagcacagggaaucuaauugcuccuagggguuacuucaaaauacaaagugggaaaagcucaauaaugagaucagaugcacccauuggcaaaugcaauucugaaugcaucacuccaaauggaagcauucccaaugacaaaccauuccaaaauguaaacaggaucacauacggggccugucccagauauguuaagcaaaacacucugaaauuggcaacagggaugcgaaauguaccagagaaacaaacuagaggcauauuuggcgcaaucgcggguuucauagaaaaugguugggagggaaugguggaugguugguacgguuucaggcaucaaaauucugagggaauaggacaagcagcagaucucaaaagcacucaagcagcaaucgaucaaaucaaugggaagcugaauagguugaucgggaaaaccaacgagaaauuccaucagauugaaaaagaauucucagaagucgaagggagaauucaggaccuugagaaauauguugaggacaccaaaauagaucucuggucauacaacgcggagcuucuuguugcccuggagaaccaacauacaauugaucuaacugacucagaaaugaacaaacuguuugaaaaaacaaagaagcaacugagggaaaaugcugaggauaugggcaaugguuguuucaaaauauaccacaaaugugacaaugcaugcauaggaucaaucagaaauggaacuuaugaccacgauguauacagagaugaagcauuaaacaaccgguuccagaucaagggcguugagcugaagucaggauacaaagauuggauccuauggauuuccuuugccauaucauguuuuuugcuuuguguugcuuuguugggguucaucaugugggccugccaaaaaggcaacauuaggugcaacauuugcauuuga

SEQ ID NO: 33928 - RNA, 1701 nt, Artificial Sequence
  derived and/or modified CDS sequence (wt) from hemagglutinin__InfluenzaA__ABV29722
augaagacuaucauugcuuugagcuacauucuaugucugguuuucgcucaaaaacuuccuggaaaugacaacagcacggcaacgcugugccuugggcaccaugcaguaccaaacggaacgauagugaaaacaaucacgaaugaccaaauugaaguuacuaaugcuacugagcugguucagaguuccucaacaggugaaauaugcgacaguccucaucagauccuugauggagaaaacugcacacuaauagaugcucuauugggagacccucagugugauggcuuccaaaauaagaaaugggaccuuuuuguugaacgcagcaaagccuacagcaacuguuacccuuaugaugugccggauuaugccucccuuaggucacuaguugccucauccggcacacuggaguuuaacaaugaaagcuucaauuggacuggagucacucaaaacggaacaagcucugcuugcauaaggagaucuaauaacaguuucuuuaguagauugaauugguugacccacuuaaaauucaaauacccagcauugaacgugacuaugccaaacaaugaaaaauuugacaaauuguacauuugggggguucaccacccggguacggacaaugaccaaaucuuccuguaugcucaagcaucaggaagaaucacagucucuaccaaaagaagccaacaaacuguaaucccgaauaucggaucuagacccagaguaaggaauauccccagcagaauaagcaucuauuggacaauaguaaaaccgggagacauacuuuugauuaacagcacagggaaucuaauugcuccuagggguuacuucaaaauacgaagugggaaaagcucaauaaugagaucagaugcacccauuggcaaaugcaauucugaaugcaucacuccaaauggaagcauucccaaugacaaaccauuccaaaauguaaacaggaucacauacggggccugucccagauauguuaagcaaaacacucugaaauuggcaacagggaugcgaaauguaccagagaaacaaacuagaggcauauuuggcgcaaucgcggguuucauagaaaaugguugggagggaaugguggaugguugguacgguuucaggcaucaaaauucugagggaauaggacaagcagcagaucucaaaagcacucaagcagcaaucgaucaaaucaaugggaagcugaauagguugaucgggaaaaccaacgagaaauuccaucagauugaaaaagaauucuuagaagucgaagggaggauucaggaccuugagaaauauguugaggacaccaaaauagaucucuggucauacaacgcggagcuucuuguugcccuggagaaccaacauacaauugaucuaacugacucagaaaugaacaaacuguuugaaaaaacaaagaagcaacugagggaaaaugcugaggauaugggcaaugguuguuucaaaauauaccacaaaugugacaaugccugcauaggaucaaucagaaauggaacuuaugaccacgauguauacagagaugaagcauuaaacaaccgguuccagaucaagggcguugagcugaagucaggauacaaagauuggauccuauggauuuccuuugccauaucauguuuuuugcuuuguguugcuuuguugggguucaucaugugggccugccaaaaaggcaacauuaggugcaacauuugcauuuga

SEQ ID NO: 33929 - RNA, 1698 nt, Artificial Sequence
  derived and/or modified CDS sequence (wt) from hemagglutinin__InfluenzaA__ABV29733
augaaaguaaaacuacuuguucuguuauguacauuuacagcuacauaugcagacacaauauguauaggcuaccaugccaacaacucgacugacacuguugacacaguacuugagaagaaugugacagugacacacucugucaaccuacuugaggacagucacaauggaaaacuaugucuacuaaaaggaauagccccacuacaauuggguaauugcagcguugccggauggaucuuaggaaacccagaaugcgaauuacugauuuccaaggaaucaugguccuacauuguagaaacaccaaauccugagaauggaacauguuacccaggauauuucgccgacuaugaggagcugagggagcaauugaguucaguaucuucauuugagagguucgaaauauuccccaaagagagcucauggcccaaccacaccguaaccggaguaucagcaucaugcucccauaacggggaaagcaguuuuuacagaaauuuguuauggcugacggggaagaaugguuuguauccaaaccugagcaaguccuaugcaaacaacaaagagaaagaaguccuuguacugugggguguucaucacccgccuaacauaggagaccaaagggcccucuaucauacagaaaaugcuuaugucucuguagugucuucacauuauagcagaagauucaccccagaaauagccaaaagacccaaggugagagaucaggaaggaagaaucaacuacuacuggacucugcuggaacccggggauacaauaauauuugaggcaaauggaaaucuaauagcgccaagguuugcuuucgcacugaguagaggcuuuggaucaggaaucaucaccucaaaugcaccaauggauaaaugugaugcgaagugucaaacaccucagggagcuauaaacagcagucuuccuuuccagaauguacacccagucacaauaggagaguguccaaaguaugucaggaguacaaaauuaagaaugguuacaggacuaaggaacaucccauccauucaauccagagguuuguuuggagccauugccgguuucauugaagggggguggacuggaaugguagaugguugguaugguuaucaccaucagaaugagcaaggaucuggguaugcugcagaucaaaaaagcacacaaaaugccauuaacgggauuacaaacaaggugaauucuguaauugagaaaaugaacacucaauucacagcugugggcaaagaauucaacaaauuggaaagaaggauggaaaauuuaaauaaaaagguugaugauggguuucuagacauuuggacauauaaugcagaauuguugguucuacuggaaaaugaaaggacuuuggacuuccaugacuccaacgugaagaaucuguaugagaaaguaaaaagccaauuaaagaauaaugccaaagaaauaggaaacggguguuuugaauucuaucacaagugugacgaugaaugcauggagagugugaaaaauggaacuuaugacuauccaaaauauuccgaagaaucaaaguugaacagggagaaaauugauggagugaaauuggaaucaaugggagucuaucagauucuggcgaucuacucaacagucgccaguuccuugguucuuuuggucucccugggggcaaucagcuucuggauguguuccaaugggucuuugcaguguagaauaugcaucuaa

SEQ ID NO: 33930 - RNA, 1698 nt, Artificial Sequence
  derived and/or modified CDS sequence (wt) from hemagglutinin__InfluenzaA__ABV29744
augaaaguaaaacuacugauucuguuauguacauuuacagcuacauaugcagacacaauauguauaggcuaccaugccaacaacucgaccgacacuguugacacaguacuugagaagaaugugacagugacacacucugucaaccuacuugaggacagucacaauggaaaacuaugucuacuaaaaggaauagccccacuacaauuggguaauugcagcguugccggauggaucuuaggaaacccagaaugcgaauuacugauuuccaaggaaucaugguccuacauuguagagacaccaaauccugagaauggaacauguuacccaggguauuucgccgacuaugaggagcugagagagcaauugaguucaguaucuucauuugagagguucgaaauauuccccaaagagagcucauggcccaaccacaccguaaccggaguaucagcaucaugcucccauaacgggaaaagcaguuuuuacagaaauuugcuauggcugacggggaagaaugguuuguauccaaaccugagcaaguccuaugcaaacaacaaagagaaagaaguccuuguacugugggguguucaucacccgccuaacauaggggaccaaagggcccucuaucauacagaaaaugcuuaugucucuguagugucuucacauuauagcagaagauucaccccagaaauagccaaaagacccaaggugagagaucaggaaggaagaaucaacuacuacuggacucugcuugaacccggggauacaauaauauuugaggcaaauggaaaucuaauagcgccaagguuugcuuucgcacugaguagaggcuuuggaucaggaaucaucaccucaaaugcaccaauggaugaaugugaugcgaaaugucaaacaccucagggagcuauaaacagcagucuuccuuuccagaauguacacccagucacaauaggagaguguccaaaguaugucaggaguacaaaauuaagaaugguuacaggacuaaggaacaucccauccauucaauccagagguuuauuuggagccauugccgguuucauugaagggggguggacuggaaugguagaugguugguaugguuaucaccaucagaaugagcaaggaucuggguaugcugcagaucaaaaaagcacacaaaaugccauuaacgggauuacaaacaaggugaauucuguaauugagaaaaugaacacucaauucacagcugugggcaaagaauucaacaaauuggaaagaaggauggaaaacuuaaauaaaaaaguugaugauggguuucuagacauuuggacauauaacgcagaauuguugguucuacuggaaaaugaaaggacuuuggacuuccaugacuccaacgugaagaaucuguaugagaaaguaaaaagccaauuaaagaauaaugccaaagaaauaggaaacggguguuuugaauucuaucacaaguguaacgaugaaugcauggagagugugaaaaauggaacuuaugacuauccaaaauauuccgaagaaucaaaguugaacagggagaaaauugauggagugaaauuggaaucaaugggggucuaucagauuuuggcgaucuacucaacagucgccaguucccugguucuuuuggucucccugggggcaaucagcuucuggauguguuccaaugggucuuugcaguguagaauaugcaucuaa

SEQ ID NO: 33931 - RNA, 1698 nt, Artificial Sequence
  derived and/or modified CDS sequence (wt) from hemagglutinin__InfluenzaA__ABV29755
augaaaguaaaacuacuuguucuguuauguacauuuacagcuacauaugcagacacaauauguauaggcuaccaugccaacaacucgaccgacacuguugacacaguacuugagaagaaugugacagugacacacucugucaaccuacuugaggacagucacaauggaaaacuaugucuacuaaaaggaauagccccacuacaauuggguaauugcagcguugccggauggaucuuaggaaacccagaaugcgaauuacugauuuccaaggaaucaugguccuacauuguagaaacaccaaguccugagaauggaacauguuacccaggauauuucgccgacuaugaggagcugagggagcaauugaguucaguaucuucauuugagagguucgaaauauuccccaaagagagcucauggcccaaccacacaguaaccggaguaucagcaucaugcucccauaacgggaaaagcaguuuuuacagaaauuugcuauggcugacggggaagaaugguuuguauccaaaccugagcaaguccuaugcaaacaacaaagagaaagaaguccuuguacugugggguguucaucacccgccuaacauaggggaccaaagggcccucuaucauacagaaaaugcuuaugucucuguagugucuucacauuauagcagaagauucaccccagaaauagccaaaagacccaaggugagagaucaggaaggaagaaucaacuacuacuggacucugcuggaacccggggauacaauaauauuugaggcaaauggaaaucuaauagcgccaagguuugcuuucgcacugaguagaggcuuuggaucaggaaucaucaccucaaaugcaccaauggguaaaugugaugcgaagugucaaacaccucagggagcuauaaacaguagucuuccuuuccagaauguacacccagucacaauaggagaguguccaaaguaugucaggagugcaaaauuaagaaugguuacaggacuaaggaacaucccauccauucaauccagagguuuguuuggagccauugccgguuucauugaagggggguggacuggaaugguagaugguugguaugguuaucaccaucagaaugagcaaggaucuggguaugcugcagaucaaaaaagcacacaaaaugccauuaacgggauuacaaacaaggugaauucuguaauugagaaaaugaacacucaauucacagcugugggcaaagaauucaacaaauuggaaagaaggauggaaaacuuaaauaaaaagguugaugauggguuucuagacauuuggacauauaacgcagaauuguugguucuacuggaaaaugaaaggacuuuggacuuccaugacuccaacgugaagaaucuguaugagaaaguaaaaagccaauuaaagaauaaugccaaagaaauaggaaacggguguuuugaauucuaucacaaguguaacgaugaaugcauggagagugugaaaaauggaacuuaugacuauccaaaauauuccgaagaaucaaaguugaacagggagaaaauugauggagugaaauuggaaucaaugggagucuaucagauucuggcgauuuacucaacagucgccaguucccugguucuuuuggucucccugggggcaaucagcuucuggauguguuccaaugggucuuugcaguguagaauaugcaucuaa

SEQ ID NO: 33932 - RNA, 1698 nt, Artificial Sequence
  derived and/or modified CDS sequence (wt) from hemagglutinin__InfluenzaA__ABV29766
augaaaguaaaacuacugauucuguuauguacauuuacagcuacauaugcagacacaauauguauaggcuaccaugccaacaacucgaccgacacuguugacacaguacuugagaagaaugugacagugacacacucugucaaccuacuugaggacagucacaauggaaaacuaugucuacuaaaaggaauagccccacuacaauuggguaauugcagcguugccggauggaucuuaggaaacccagaaugcgaauuacugauuuccaaggaaucaugguccuacauuguagagacaccaaauccugagaauggaacauguuacccaggguauuucgccgacuaugaggagcugagagagcaauugaguucaguaucuucauuugagagguucgaaauauuccccaaagagagcucauggcccaaccacaccguaaccggaguaucagcaucaugcucccauaacgggaaaagcaguuuuuacagaaauuugcuauggcugacggggaagaaugguuuguauccaaaccugagcaaguccuaugcaaacaacaaagagaaagaaguccuuguacugugggguguucaucacccgccuaacauaggggaccaaagggcccucuaucauacagaaaaugcuuaugucucuguagugucuucacauuauagcagaagauucaccccagaaauagccaaaagacccaaggugagagaucaggaaggaagaaucaacuacuacuggacucugcuugaacccggggauacaauaauauuugaggcaaauggaaaucuaauagcgccaagguuugcuuucgcacugaguagaggcuuuggaucaggaaucaucaccucaaaugcaccaauggaugaaugugaugcgaaaugucaaacaccucagggagcuauaaacagcagucuuccuuuccagaauguacacccagucacaauaggagaguguccaaaguaugucaggaguacaaaauuaagaaugguuacaggacuaaggaacaucccauccauucaauccagagguuuauuuggagccauugccgguuucauugaagggggguggacuggaaugguagaugguugguaugguuaucaccaucagaaugagcaaggaucuggguaugcugcagaucaaaaaagcacacaaaaugccauuaacgggauuacaaacaaggugaauucuguaauugagaaaaugaacacucaauucacagcugugggcaaagaauucaacaaauuggaaagaaggauggaaaacuuaaauaaaaaaguugaugauggguuucuagacauuuggacauauaacgcagaauuguugguucuacuggaaaaugaaaggacuuuggacuuccaugacuccaacgugaagaaucuguaugagaaaguaaaaagccaauuaaagaauaaugccaaagaaauaggaaacggguguuuugaauucuaucacaaguguaacgaugaaugcauggagagugugaaaaauggaacuuaugacuauccaaaauauuccgaagaaucaaaguugaacagggagaaaauugauggagugaaauuggaaucaaugggagucuaucagauuuuggcgaucuacucaacagucgccaguucccugguucuuuuggucucccugggggcaaucagcuucuggauguguuccaaugggucuuugcaguguagaauaugcaucuaa

SEQ ID NO: 33933 - RNA, 1698 nt, Artificial Sequence
  derived and/or modified CDS sequence (wt) from hemagglutinin__InfluenzaA__ABV29777
augaaaguaaaacuacuuguucuguuauguacauuuacagcuacauaugcagacacaauauguauaggcuaccaugccaacaacucgacugacacuguugacacaguacuugagaagaaugugacagugacacacucugucaaccuacuugaggacagucacaauggaaaacuaugucuacuaaaaggaauagccccacuacaauuggguaauugcagcguugccggauggaucuuaggaaacccagaaugcgaauuacugauuuccaaggaaucaugguccuacauuguagaaacaccaaauccugagaauggaacauguuacccaggauauuucgccgacuaugaggagcugagggagcaauugaguucaguaucuucauuugagagguucgaaauauuccccaaagagagcucauggcccaaccacaccguaaccggaguaucagcaucaugcucccauaacggggaaagcaguuuuuacagaaauuuguuauggcugacggggaagaaugguuuguauccaaaccugagcaaguccuaugcaaacaacaaagagaaagaaguccuuguacugugggguguucaucacccgccuaacauaggagaccaaagggcccucuaucauacagaaaaugcuuaugucucuguagugucuucacauuauagcagaagauucaccccagaaauagccaaaagacccaaggugagagaucaggaaggaagaaucaacuacuacuggacucugcuggaacccggggauacaauaauauuugaggcaaauggaaaucuaauagcgccaagguuugcuuucgcacugaguagaggcuuuggaucaggaaucaucaccucaaaugcaccaauggauaaaugugaugcgaagugucaaacaccucagggagcuauaaacagcagucuuccuuuccagaauguacacccagucacaauaggagaguguccaaaguaugucaggaguacaaaauuaagaaugguuacaggacuaaggaacaucccauccauucaauccagagguuuguuuggagccauugccgguuucauugaagggggguggacuggaaugguagaugguugguaugguuaucaccaucagaaugagcaaggaucuggguaugcugcagaucaaaaaagcacacaaaaugccauuaacgggauuacaaacaaggugaauucuguaauugagaaaaugaacacucaauucacagcugugggcaaagaauucaacaaauuggaaagaaggauggaaaauuuaaauaaaaagguugaugauggguuucuagacauuuggacauauaacgcagaauuguugguucuacuggaaaaugaaaggacuuuggacuuccaugacuccaacgugaagaaucuguaugagaaaguaaaaagccaauuaaagaauaaugccaaagaaauaggaaacggguguuuugaauucuaucacaaguguaacgaugaaugcauggagagugugaaaaauggaacuuaugacuauccaaaauauuccgaagaaucaaaguugaacagggagaaaauugauggagugaaauuggaaucaaugggagucuaucagauucuggcgaucuacucaacagucgccaguuccuugguucuuuuggucucccugggggcaaucagcuucuggauguguuccaaugggucuuugcaguguagaauaugcaucuaa

SEQ ID NO: 33934 - RNA, 1698 nt, Artificial Sequence
  derived and/or modified CDS sequence (wt) from hemagglutinin__InfluenzaA__ABV29788
augaaaguaaaacuacugauucuguuauguacauuuacagcuacauaugcagacacaauauguauaggcuaccaugccaacaacucgaccgacacuguugacacaguacuugagaagaaugugacagugacacacucugucaaccuacuugaggacagucacaauggaaaacuaugucuacuaaaaggaauagccccacuacaauuggguaauugcagcguugccggauggaucuuaggaaacccagaaugcgaauuacugauuuccaaggaaucaugguccuacauuguagagacaccaaauccugagaauggaacauguuacccaggguauuucgccgacuaugaggagcugagagagcaauugaguucaguaucuucauuugagagguucgaaauauuccccaaagagagcucauggcccaaccacaccguaaccggaguaucagcaucaugcucccauaacgggaaaagcaguuuuuacagaaauuugcuauggcugacggggaagaaugguuuguauccaaaccugagcaaguccuaugcaaacaacaaagagaaagaaguccuuguacugugggguguucaucacccgccuaacauaggggaccaaagggcccucuaucauacagaaaaugcuuaugucucuguagugucuucacauuauagcagaagauucaccccagaaauagccaaaagacccaaggugagagaucaggaaggaagaaucaacuacuacuggacucugcuugaacccggggauacaauaauauuugaggcaaauggaaaucuaauagcgccaagguuugcuuucgcacugaguagaggcuuuggaucaggaaucaucaccucaaaugcaccaauggaugaaugugaugcgaaaugucaaacaccucagggagcuauaaacagcagucuuccuuuccagaacguacacccagucacaauaggagaguguccaaaguaugucaggaguacaaaauuaagaaugguuacaggacuaaggaacaucccauccauucaauccagagguuuauuuggagccauugccgguuucauugaagggggguggacuggaaugguagaugguugguaugguuaucaccaucagaaugagcaaggaucuggguaugcugcagaucaaaaaagcacacaaaaugccauuaacgggauuacaaacaaggugaauucuguaauugagaaaaugaacacucaauucacagcugugggcaaagaauucaacaaauuggaaagaaggauggaaaacuuaaauaaaaaaguugaugauggguuucuagacauuuggacauauaacgcagaauuguugguucuacuggaaaaugaaaggacuuuggacuuccaugacuccaacgugaagaaucuguaugagaaaguaaaaagccaauuaaagaauaaugccaaagaaauaggaaacggguguuuugaauucuaucacaaguguaacgaugaaugcauggagagugugaaaaauggaacuuaugacuauccaaaauauuccgaagaaucaaaguugaacagggagaaaauugauggagugaaauuggaaucaaugggagucuaucagauuuuggcgaucuacucaacagucgccaguucccugguucuuuuggucucccugggggcaaucagcuucuggauguguuccaaugggucuuugcaguguagaauaugcaucuaa

SEQ ID NO: 33935 - RNA, 1698 nt, Artificial Sequence
  derived and/or modified CDS sequence (wt) from hemagglutinin__InfluenzaA__ABV29799
augaaaguaaaacuacugguucuguuauguacauuuacagcuacauaugcagacacaauauguauaggcuaccaugccaacaacucgaccgacacuguugacacaguacuugagaagaaugugacagugacacacucugucaaccuacuugaggacagucacaauggaaaacuaugucuacuaaaaggaauagccccacuacaauuggguaauugcagcguugccggauggaucuuaggaaacccagaaugcgaauuacugauuuccaaggaaucaugguccuacauuguagagacaccaaauccugagaauggaacauguuacccaggguauuucgccgacuaugaggagcugagagagcaauugaguucaguaucuucauuugagagguucgaaauauuccccaaagagagcucauggcccaaccacaccguaaccggaguaucagcaucaugcucccauaacgggaaaagcaguuuuuacagaaauuugcuauggcugacggggaagaaugguuuguauccaaaccugagcaaguccuaugcaaacaacaaagagaaagaaguccuuguacugugggguguucaucacccgccuaacauaggggaccaaagggcccucuaucauacagaaaaugcuuaugucucuguagugucuucacauuauagcagaagauucaccccagaaauagccaaaagacccaaggugagagaucaggaaggaagaaucaacuacuacuggacucugcuugaacccggggauacaauaauauuugaggcaaauggaaaucuaauagcgccaagguuugcuuucgcacugaguagaggcuuuggaucaggaaucaucaccucaaaugcaccaauggaugaaugugaugcgaaaugucaaacaccucagggagcuauaaacagcagucucccuuuccagaauguacacccagucacaauaggagaguguccaaaguaugucaggaguacaaaauuaagaaugguuacaggacuaaggaacaucccauccauucaauccagaggguuguuuggagccauugccgguuucauugaagggggguggacuggaaugguagauggaugguaugguuaccaccaucagaaugagcaaggaucuggguaugcugcugaucaaaaaagcacacaaaaugccauuaacgggauuacaaacaaggugaauucuguaauugagaaaaugaacacucaauucacagcugugggcaaagaauucaacaaauuggaaagaaggauggaaaacuuaaauaaaaaaguugaugauggguuucuagacauuuggacauauaacgcagaauuguugguucuacuggaaaaugaaaggacuuuggacuuccaugacuccaacgugaagaaucuguaugagaaaguaaaaagccaauuaaagaauaaugccaaagaaauaggaaacggguguuuugaauucuaucacaaguguaacgaugaaugcauggagagugugaaaaauggaacuuaugacuauccaaaauauuccgaagaaucaaaguugaacagggagaaaauugauggagugaaauuggaaucaaugggagucuaucagauuuuggcgaucuacucaacagucgccaguucccugguucuuuuggucucccugggggcaaucagcuucuggauguguuccaaugggucuuugcaguguagaauaugcaucuaa

SEQ ID NO: 33936 - RNA, 1701 nt, Artificial Sequence
  derived and/or modified CDS sequence (wt) from hemagglutinin__InfluenzaA__ABV29821
augaagacuaucauugcuuugagcuacauucuaugucugguuuucgcucaaaaacuuccuggaaaugacaacagcacggcaacgcugugccuugggcaccaugcaguaccaaacggaacgauagugaaaacaaucacgaaugaccaaauugaaguuacuaaugcuacugagcugguucagaguuccucaacaggugaaauaugcgacaguccucaucagauccuugauggagaaaacugcacacuaauagaugcucuauugggagacccucagugugauggcuuccaaaauaagaaaugggaccuuuuuguugaacgcagcaaagccuacagcaacuguuacccuuaugaugugccggauuaugccucccuuaggucacuaguugccucauccggcacacuggaguuuaacaaugaaagcuucaauuggacuggagucacucaaaacggaacaagcucugcuugcauaaggagaucuaauaacaguuucuuuaguagauugaauugguugacccacuuaaaauucaaauacccagcauugaacgugacuaugccaaacaaugaaaaauuugacaaauuguacauuugggggguucaccacccggguacggacaaugaccaagucuuccuguaugcucaagcaucaggaagaaucacagucucuaccaaaagaagccaacaaacuguaaucccgaauaucggaucuagacccagaguaaggaauauccccagcagaauaagcaucuauuggacaauaguaaaaccgggagacauacuuuugauuaacagcacagggaaucuaauugcuccuagggguuacuucaaaauacgaagugggaaaagcucaauaaugagaucagaugcacccauuggcaaaugcaauucugaaugcaucacuccaaauggaagcauucccaaugacaaaccauuccaaaauguaaacaggaucacauacggggccugucccagauauguuaagcaaaacacucugaaauuggcaacagggaugcgaaauguaccagagaaacaaacuagaggcauauuuggcgcaaucgcggguuucauagaaaaugguugggagggaaugguggaugguugguacgguuucaggcaucaaaauucugagggaauaggacaagcagcagaucucaaaagcacucaagcagcaauagaucaaaucaaugggaagcugaauagguugaucgggaaaaccaacgagaaauuccaucagauugaaaaagaauucucagaagucgaagggagaauucaggaccuugagaaauauguugaggacaccaaaauagaucucuggucauacaacgcggagcuucuuguugcccuggagaaccaacauacaauugaucuaacugacucagaaaugaacaaacuguuugaaaaaacaaagaagcaacugagggaaaaugcugaggauaugggcaaugguuguuucaaaauauaccacaaaugugacaaugccugcauaggaucaaucagaaauggaacuuaugaccacgauguauacagagaugaagcauuaaacaaccgguuccagaucaagggcguugagcugaagucaggauacaaagauuggauccuauggauuuccuuugccauaucauguuuuuugcuuuguguugcuuuguugggguucaucaugugggccugccaaaaaggcaacauuaagugcaacauuugcauuuga

SEQ ID NO: 33937 - RNA, 1698 nt, Artificial Sequence
  derived and/or modified CDS sequence (wt) from hemagglutinin__InfluenzaA__ABV29832
augaaaguaaaacuacugguucuguuauguacauuuacagcuacauaugcagacacaauauguauaggcuaccaugccaacaacucgaccgacacuguugacacaguacuugagaagaaugugacagugacacacucugucaaccuacuugaggacagucacaauggaaaacuaugucuacuaaaaggaauagccccacuacaauuggguaauugcagcguugccggauggaucuuaggaaacccagaaugcgaauuacugauuuccaaggaaucaugguccuacauuguagagacaccaaauccugagaauggaacauguuacccaggguauuucgccgacuaugaggagcugagagagcaauugaguucaguaucuucauuugagagguucgaaauauuccccaaagagagcucauggcccaaccacaccguaaccggaguaucagcaucaugcucccauaacgggaaaagcaguuuuuacagaaauuugcuauggcugacggggaagaaugguuuguauccaaaccugagcaaguccuaugcaaacaacaaagagaaagaaguccuuguacugugggguguucaucacccgccuaacauaggggaccaaagggcccucuaucauacagaaaaugcuuaugucucuguagugucuucacauuauagcagaagauucaccccagaaauagccaaaagacccaaggugagagaucaggaaggaagaaucaacuacuacuggacucugcuugaacccggggauacaauaauauuugaggcaaauggaaaucuaauagcgccaagguuugcuuucgcacugaguagaggcuuuggaucaggaaucaucaccucaaaugcaccaauggaugaaugugaugcgaaaugucaaacaccucagggagcuauaaacagcagucuuccuuuccagaauguacacccagucacaauaggagaguguccaaaguaugucaggaguacaaaauuaagaaugguuacaggacuaaggaacaucccauccauucaauccagagguuuguuuggagccauugccgguuucauugaagggggguggacuggaaugguagaugguugguaugguuaucaccaucagaaugagcaaggaucuggguaugcugcagaucaaaaaagcacacaaaaugccauuaacgggauuacaaacaaggugaauucuguaauugagaaaaugaacacucaauucacagcugugggcaaagaauucaacaaauuggaaagaaggauggaaaacuuaaauaaaaaaguugaugauggguuucuagacauuuggacauauaacgcagaauuguugguucuacuggaaaaugaaaggacuuuggacuuccaugacuccaacgugaagaaucuguaugagaaaguaaaaagccaauuaaagaauaaugccaaagaaauaggaaacggguguuuugaauucuaucacaaguguaacgaugaaugcauggagagugugaaaaauggaacuuaugacuauccaaaauauuccgaagaaucaaaguugaacagggagaaaauugauggagugaaauuggaaucaaugggagucuaucagauuuuggcgaucuacucaacagucgccaguucccugguucuuuuggucucccugggggcaaucagcuucuggauguguuccaaugggucuuugcaguguagaauaugcaucuaa

SEQ ID NO: 33938 - RNA, 1698 nt, Artificial Sequence
  derived and/or modified CDS sequence (wt) from hemagglutinin__InfluenzaA__ABV29865
augaaaguaaaacuacugauucuguuauguacauuuacagcuacauaugcagacacaauauguauaggcuaccaugccaacaacucgaccgacacuguugacacaguacuugagaagaaugugacagugacacacucugucaaccuacuugaggacagucacaauggaaaacuaugucuacuaaaaggaauagccccacuacaauuggguaauugcagcguugccggauggaucuuaggaaacccagaaugcgaauugcugauuuccaaggaaucaugguccuacauuguagagacaccaaauccugagaauggaacauguuacccaggguauuucgccgacuaugaggagcugagagagcaauugaguucaguaucuucauuugagagguucgaaauauuccccaaagagagcucauggcccaaccacaccguaaccggaguaucagcaucaugcucccauaacgggaaaagcaguuuuuacagaaauuugcuauggcugacggggaagaaugguuuguauccaaaccugagcaaguccuaugcaaacaacaaagagaaagaaguccuuguacugugggguguucaucacccgccuaacauaggggaccaaagggcccucuaucauacagaaaaugcuuaugucucuguagugucuucacauuauagcagaagauucaccccagaaauagccaaaagacccaaggugagagaucaggaaggaagaaucaacuacuacuggacucugcuugaacccggggauacaauaauauuugaggcaaauggaaaucuaauagcgccaagguuugcuuucgcacugaguagaggcuuuggaucaggaaucaucaccucaaaugcaccaauggaugaaugugaugcgaaaugucaaacaccucagggagcuauaaacagcagucuuccuuuccagaauguacacccagucacaauaggagaguguccaaaguaugucaggaguacaaaauuaagaaugguuacaggacuaaggaacaucccauccauucaauccagagguuuauuuggagccauugccgguuucauugaagggggguggacuggaaugguagaugguugguaugguuaucaccaucagaaugagcaaggaucuggguaugcugcagaucaaaaaagcacacaaaaugccauuaacgggauuacaaacaaggugaauucuguaauugagaaaaugaacacucaauucacagcugugggcaaagaauucaacaaauuggaaagaaggauggaaaacuuaaauaaaaaaguugaugauggguuucuagacauuuggacauauaacgcagaauuguugguucuacuggaaaaugaaaggacuuuggacuuccaugacuccaacgugaagaaucuguaugagaaaguaaaaagccaauuaaagaauaaugccaaagaaauaggaaacggguguuuugaauucuaucacaaguguaacgaugaaugcauggagagugugaaaaauggaacuuaugacuauccaaaauauuccgaagaaucaaaguugaacagggagaaaauugauggagugaaauuggaaucaaugggagucuaucagauuuuggcgaucuacucaacagucgccaguucccugguucuuuuggucucccugggggcaaucagcuucuggauguguuccaaugggucuuugcaguguagaauaugcaucuaa

SEQ ID NO: 33939 - RNA, 1698 nt, Artificial Sequence
  derived and/or modified CDS sequence (wt) from hemagglutinin__InfluenzaA__ABV29876
augaaaguaaaacuacugauuuuguuauguacauuuacagcuacauaugcagacacaauauguauaggcuaccaugccaacaacucgaccgacacuguugacacaguacuugagaagaaugugacagugacacacucugucaaccuacuugaggacagucacaauggaaaacuaugucuacuaaaaggaauagccccacuacaauuggguaauugcagcguugccggauggaucuuaggaaacccagaaugcgaauugcugauuuccaaggaaucaugguccuacauuguagagacaccaaauccugagaauggaacauguuacccaggguauuucgccgacuaugaggagcugagagagcaauugaguucaguaucuucauuugagagguucgaaauauuccccaaagagagcucauggcccaaccacaccguaaccggaguaucagcaucaugcucccauaacgggaaaagcaguuuuuacagaaauuugcuauggcugacggggaagaaugguuuguauccaaaccugagcaaguccuaugcaaacaacaaagagaaagaaguccuuguacugugggguguucaucacccgccuaacauaggggaccaaagggcccucuaucauacagaaaaugcuuaugucucuguagugucuucacauuauagcagaagauucaccccagaaauagccaaaagacccaaggugagagaucaggaaggaagaaucaacuacuacuggacucugcuugaacccggggauacaauaauauuugaggcaaauggaaaucuaauagcgccaagguuugcuuucgcacugaguagaggcuuuggaucaggaaucaucaccucaaaugcaccaauggaugaaugugaugcgaaaugucaaacaccucagggagcuauaaacagcagucuuccuuuccagaauguacacccagucacaauaggagaguguccaaaguaugucaggaguacaaaauuaagaaugguuacaggacuaaggaacaucccauccauucaauccagagguuuauuuggagccauugccgguuucauugaagggggguggacuggaaugguagaugguugguaugguuaucaccaucagaaugagcaaggaucuggguaugcugcagaucaaaaaagcacacaaaaugccauuaacgggauuacaaacaaggugaauucuguaauugagaaaaugaacacucaauucacagcugugggcaaagaauucaacaaauuggaaagaaggauggaaaacuuaaauaaaaaaguugaugauggguuucuagacauuuggacauauaacgcagaauuguugguucuacuggaaaaugaaaggacuuuggacuuccaugacuccaacgugaagaaucuguaugagaaaguaaaaagccaauuaaagaauaaugccaaagaaauaggaaacggguguuuugaauucuaucacaaguguaacgaugaaugcauggagagugugaaaaauggaacuuaugacuauccaaaauauuccgaagaaucaaaguugaacagggagaaaauugauggagugaaauuggaaucaaugggagucuaucagauuuuggcgaucuacucaacagucgccaguucccugguucuuuuggucucccugggggcaaucagcuucuggauguguuccaaugggucuuugcaguguagaauaugcaucuaa

SEQ ID NO: 33940 - RNA, 1701 nt, Artificial Sequence
  derived and/or modified CDS sequence (wt) from hemagglutinin__InfluenzaA__ABV29898
augaagacuaucauugcuuugagcuacauucuaugucugguuuucgcucaaaaacuucccggaaaugacaacagcacggcaacgcugugccuugggcaccaugcaguaccaaacggaacgauagugaaaacaaucacgaaugaccaaauugaaguuacuaaugcuacugagcugguucagaguuccucaacaggugaaauaugcgacaguccucaucagauccuugauggagaaaacugcacacuaauagaugcucuauugggagacccucagugugauggcuuccaaaauaagaaaugggaccuuuuuguugaacgcagcaaagccuacagcaacuguuacccuuaugaugugccggauuaugccucccuuaggucacuaguugccucauccggcacacuggaguuuaacaaugaaagcuucaauuggacuggagucacucaaaacggaacaagcucugcuugcauaaggagaucuaauaacaguuucuuuaguagauugaauugguugacccacuuaaaauucaaauacccagcauugaacgugacuaugccaaacaaugaaaaauuugacaaauuguacauuugggggguucaccacccggguacggacaaugaccaaaucuuccuguaugcucaagcaucaggaagaaucacagucucuaccaaaagaagccaacaaacuguaaucccgaauaucggaucuagacccagaguaaggaauauccccagcagaauaagcaucuauuggacaauaguaaaaccgggagacauacuuuugauuaacagcacagggaaucuaauugcuccuagggguuacuucaaaauacgaagugggaaaagcucaauaaugagaucagaugcacccauuggcaaaugcaauucugaaugcaucacuccaaauggaagcauucccaaugacaaaccauuccaaaauguaaacaggaucacauacggggccugucccagauauguuaagcaaaacacucugaaauuggcaacagggaugcgaaauguaccagagaaacaaacuagaggcauauuuggcgcaaucgcggguuucauagaaaaugguugggagggaaugguggaugguugguacgguuucaggcaucaaaauucugagggaauaggacaagcagcagaucucaaaagcacucaagcagcaaucgaucaaaucaaugggaagcugaauagguugaucgggaaaaccaacgagaaauuccaucagauugaaaaagaauucucagaagucgaagggagaauucaggaccuugagaaauauguugaggacaccaaaauagaucucuggucauacaacgcagagcuucuuguugcccuggagaaccaacauacaauugaucuaacugacucagaaaugaacaaacuguuugaaaaaacaaagaagcaacugagggaaaaugcugaggauaugggcaaugguuguuucaaaauauaccacaaaugugacaaugccugcauaggaucaaucagaaauggaacuuaugaccacgauguauacagagaugaagcauuaaacaaccgguuccagaucaagggcguugagcugaagucaggauacaaagauuggauccuauggauuuccuuugccauaucauguuuuuugcuuuguguugcuuuguugggguucaucaugugggccugccaaaaaggcaacauuaggugcaacauuugcauuuga

SEQ ID NO: 33941 - RNA, 1701 nt, Artificial Sequence
  derived and/or modified CDS sequence (wt) from hemagglutinin__InfluenzaA__ABV29909
augaagacuaucauugcuuugagcuacauucuaugucugguuuucgcucaaaaacuuccuggaaaugacaacagcacggcaacgcugugccuugggcaucaugcaguaccaaacggaacgauagugaaaacaaucacgagugaccaaauugaaguuacuaaugcuacugagcugguucagaauuccucaauagguggaaucugcaacaguccucaucagauccuugauggagaaaacugcacacuaauagaugcucuauugggagacccucagugugauggcuuccaaaauaagaaaugggaccuuuuuguugaacgcagcaaagccuacagcaacuguuacccuuaugaugugccggauuaugccucccuuaggucacuaauugccucauccggcacacuggaguuuaacaaugaaagcuucaauuggacuggagucacucaaaauggaacaagcucugcuugcaaaaggagaucuaauaacaguuucuuuaguagauugaauugguugacccacuuaaaauucaaauacccagcauugaacgugacuaugccaaacaaugaagaauuugacaaauuguacauuugggggguucaccacccggguacggacaaugaccaaaucagccuauaugcucaagcaccaggaagaaucacagucucuaccaaaagaagccaacaaacuguaaucccgaauaucggaucuagaccccgaguaagggauauccccagcagaauaagcaucuauuggacaauaguaaaaccgggagacauacuuuugauuaacagcacagggaaucuaauugcuccucgggguuacuucaaaauacgaagugggaaaagcucaauaaugagaucagaugcacccauugacaaaugcaauucugaaugcaucacuccaaauggaagcauucccaaugacaaaccauuccaaaauguaaacaggaucacauauggggccugucccagauauguuaagcaaaacacucugaaauuggcaacagggaugcgaaauguaccagagaaacaaacuagaggcauauuuggcgcaaucgcggguuucauagaaaauggcugggagggaaugguggaugguugguacgguuucaggcaucaaaauucugagggaauaggacaagcagcagaucucaaaagcacucaagcagcaaucgaccaaaucaaugggaagcugaauagguugaucgggaaaaccaacgagaaauuccaucagauugaaaaagaauucucagaaguagaagggagaauucaggaccucgagaaauauguugaggacacuaaaauagaucucuggucauacaacgcggagcuucuuguugcccuggagaaccaacauacaauugaccuaacugacucagaaaugaacaaauuguuugaaagaacaaaaaagcaacugagggaaaaugcugaggauaugggcaaugguuguuucaaaauauaccacaaaugugacaaugccugcauagggucaaucagaaauggaacuuaugaccaugauguauacagagaugaagcauuaaacaaccgguuccagaucaaagguguugagcugaagucaggauacaaagauuggauccuauggauuuccuuugccauaucauguuuuuugcuuuguguugcuuuguugggguucaucaugugggccugccaaaaaggcaacauuaggugcaacauuugcauuuga

SEQ ID NO: 33942 - RNA, 1698 nt, Artificial Sequence
  derived and/or modified CDS sequence (wt) from hemagglutinin__InfluenzaA__ABV29920
augaaaguaaaacuacuuguucuguuauguacauuuacagcuacauaugcagacacaauauguauaggcuaccaugccaacaacucgaccgacacuguugacacaguacuugagaagaaugugacagugacacacucugucaaccuacuugaggacagucacaauggaaaacuaugucuacuaaaaggaauagccccacuacaauuggguaauugcagcguugccggauggaucuuaggaaacccagaaugcgaauuacugauuuccaaggaaucaugguccuacauuguagaaacaccaaauccugagaauggaacauguuacccaggauauuucgccgacuaugaggagcugagggagcaauugaguucaguaucuucauuugagagguuugaaauauuccccaaagagagcucauggcccaaccacaccguaaccggaguaucagcaucaugcucccauaacgggaaaagcaguuuuuacagaaauuugcuauggcugacggggaagaaugguuuguauccaaaccugagcaaguccuaugcaaacaacaaagagaaagaaguccuuguacugugggguguucaucacccgccuaacauaggggaccaaagggcccucuaucauacagaaaaugcuuaugucucuguagugucuucacauuauagcagaagauucaccccagaaauagccaaaagacccaaggugagagaucaggaaggaagaaucaacuacuacuggacucugcuggaacccggggauacaauaauauuugaggcaaauggaaaucuaauagcgccaagguuugcuuucgcacugaguagaggcuuuggaucaggaaucaucaccucaaaugcaccaaugggugaaugugaugcgaagugucaaacaccucagggagcuauaaacaguagucuuccuuuccagaauguacauccagucacaauaggagaguguccaaaguaugucaggagugcaaaauuaagaaugguuacaggacuaaggaacaucccauccauucaauccagagguuuguuuggagccauugccgguuucauugaagggggguggacuggaaugguagaugguugguaugguuaucaccaucagaaugagcaaggaucuggguaugcugcagaucaaaaaagcacacaaaaugccauuaacgggauuacaaacaaggugaauucuguaauugagaaaaugaacacucaauucacagcugugggcaaagaauucaacaaauuggaaagaaggauggaaaacuuaaauaaaaagguugaugauggguuucuagacauuuggacauauaacgcagaauuguugguucuacuggaaaaugaaaggacuuuggacuuccaugacuccaacgugaagaaucuguaugagaaaguaaaaagccaauuaaagaauaaugccaaagaaauaggaaacggguguuuugaauucuaucacaaguguaacgaugaaugcauggagagugugaaaaauggaacuuaugacuauccaaaauauuccgaagaaucaaaguugaacagggagaaaauugauggagugaaauuggaaucaaugggagucuaucagauucuggcgaucuacucaacagucgccaguucccugguucuuuuggucucccugggggcaaucagcuucuggauguguuccaaugggucuuugcaguguagaauaugcaucuaa

SEQ ID NO: 33943 - RNA, 1698 nt, Artificial Sequence
  derived and/or modified CDS sequence (wt) from hemagglutinin__InfluenzaA__ABV29942
augaaaguaaaacuacuuguucuguuauguacauuuacagcuacauaugcagacacaauauguauaggcuaccaugccaacaacucgacugacacuguugacacaguacuugagaagaaugugacagugacacacucugucaaccuacuugaggacagucacaauggaaaacuaugucuacuaaaaggaauagccccacuacaauuggguaauugcagcguugccggauggaucuuaggaaacccagaaugcgaauuacugauuuccaaggaaucaugguccuacauuguagaaacaccaaauccugagaauggaacauguuacccaggauauuucgccgacuaugaggagcugagggagcaauugaguucaguaucuucauuugagagguucgaaauauuccccaaagagagcucauggcccaaccacaccguaaccggaguaucagcaucaugcucccauaacggggaaagcaguuuuuacagaaauuuguuauggcugacggggaagaaugguuuguauccaaaccugagcaaguccuaugcaaacaacaaagagaaagaaguccuuguacugugggguguucaucacccgccuaacauaggagaccaaagggcccucuaucauacagaaaaugcuuaugucucuguagugucuucacauuauagcagaagauucaccccagaaauagccaaaagacccaaggugagagaucaggaaggaagaaucaacuacuacuggacucugcuggaacccggggauacaauaauauuugaggcaaauggaaaucuaauagcgccaagguuugcuuucgcacugaguagaggcuuuggaucaggaaucaucaccucaaaugcaccaauggauaaaugugaugcgaagugccaaacaccucagggagcuauaaacagcagucuuccuuuccagaauguacacccagucacaauaggagaguguccaaaguaugucaggaguacaaaauuaagaaugguuacaggacuaaggaacaucccauccauucaauccagagguuuguuuggagccauugccgguuucauugaagggggguggacuggaaugguagaugguugguaugguuaucaccaucagaaugagcaaggaucuggguaugcugcagaucaaaaaagcacacaaaaugccauuaacgggauuacaaacaaggugaauucuguaauugagaaaaugaacacucaauucacagcugugggcaaagaauucaacaaauuggaaagaaggauggaaaauuuaaauaaaaagguugaugauggguuucuagacauuuggacauauaaugcagaauuguugguucuacuggaaaaugaaaggacuuuggacuuccaugacuccaacgugaagaaucuguaugagaaaguaaaaagccaauuaaagaauaaugccaaagaaauaggaaacggguguuuugaauucuaucacaaguguaacgaugaaugcauggagagugugaaaaauggaacuuaugacuauccaaaauauuccgaagaaucaaaguugaacagggagaaaauugauggagugaaauuggaaucaaugggagucuaucagauucuggcgaucuacucaacagucgccaguuccuugguucuuuuggucucccugggggcaaucagcuucuggauguguuccaaugggucuuugcaguguagaauaugcaucuaa

SEQ ID NO: 33944 - RNA, 1698 nt, Artificial Sequence
  derived and/or modified CDS sequence (wt) from hemagglutinin__InfluenzaA__ABV29953
augaaaguaaaacuacugguucuguuauguacauuuacagcuacauaugcagacacaauauguauaggcuaccaugccaacaacucgaccgacacuguugacacaguacuugagaagaaugugacagugacacacucugucaaccuacuugaggacagucacaauggaaaacuaugucuacuaaaaggaauagccccacuacaauuggguaauugcagcguugccggauggaucuuaggaaacccagaaugcgaauuacugauuuccaaggaaucaugguccuacauuguagagacaccaaauccugagaauggaacauguuacccaggguauuucgccgacuaugaggagcugagagagcaauugaguucaguaucuucauuugagagguucgaaauauuccccaaagagagcucauggcccaaccacaccguaaccggaguaucagcaucaugcucccauaacgggaaaagcaguuuuuacagaaauuugcuauggcugacggggaagaaugguuuguauccaaaccugagcaaguccuaugcaaacaacaaagagaaagaaguccuuguacugugggguguucaucacccgccuaacauaggggaccaaagggcccucuaucauacagaaaaugcuuaugucucuguagugucuucacauuauagcagaagauucaccccagaaauagccaaaagacccaaggugagagaucaggaaggaagaaucaacuacuacuggacucugcuugaacccggggauacaauaauauuugaggcaaauggaaaucuaauagcgccaagguuugcuuucgcacugaguagaggcuuuggaucaggaaucaucaccucaaaugcaccaauggaugaaugugaugcgaaaugucaaacaccucagggagcuauaaacagcagucuuccuuuccagaauguacacccagucacaauaggagaguguccaaaguaugucaggaguacaaaauuaagaaugguuacaggacuaaggaacaucccauccauucaauccagagguuuguuuggagccauugccgguuucauugaagggggguggacuggaaugguagaugguugguaugguuaucaccaucagaaugagcaaggaucuggguaugcugcagaucaaaaaagcacacaaaaugccauuaacgggauuacaaacaagguaaauucuguaauugagaaaaugaacacucaauucacagcugugggcaaagaauucaacaaauuggaaagaaggauggaaaacuuaaauaaaaaaguugaugauggguuucuagacauuuggacauauaacgcagaauuguugguucuacuggaaaaugaaaggacuuuggacuuccaugacuccaacgugaagaaucuguaugagaaaguaaaaagccaauuaaagaauaaugccaaagaaauaggaaacggguguuuugaauucuaucacaaguguaacgaugaaugcauggagagugugaaaaauggaacuuaugacuauccaaaauauuccgaagaaucaaaguugaacagggagaaaauugauggagugaaauuggaaucaaugggagucuaucagauuuuggcgaucuacucaacagucgccaguucccugguucuuuuggucucccugggggcaaucagcuucuggauguguuccaaugggucuuugcaguguagaauaugcaucuaa

SEQ ID NO: 33945 - RNA, 1698 nt, Artificial Sequence
  derived and/or modified CDS sequence (wt) from hemagglutinin__InfluenzaA__ABV29964
augaaaguaaaacuacugguucuguuauguacauuuacagcuacauaugcagacacaauauguauaggcuaccaugccaacaacucgaccgacacuguugacacaguacuugagaagaaugugacagugacacacucugucaaccuacuugaggacagucacaauggaaaacuaugucuacuaaaaggaauagccccacuacaauuggguaauugcagcguugccggauggaucuuaggaaacccagaaugcgaauuacugauuuccaaggaaucaugguccuacauuguagagacaccaaauccugagaauggaacauguuacccaggguauuucgccgacuaugaggagcugagagagcaauugaguucaguaucuucauuugagagguucgaaauauuccccaaagagagcucauggcccaaccacaccguaaccggaguaucagcaucaugcucccauaacgggaaaagcaguuuuuacagaaauuugcuauggcugacggggaagaaugguuuguauccaaaccugagcaaguccuaugcaaacaacaaagagaaagaaguccuuguacugugggguguucaucacccgccuaacauaggggaccaaagggcccucuaucauacagaaaaugcuuaugucucuguagugucuucacauuauagcagaagauucaccccagaaauagccaaaagacccaaggugagagaucaggaaggaagaaucaacuacuacuggacucugcuugaacccggggauacaauaauauuugaggcaaauggaaaucuaauagcgccaagguuugcuuucgcacugaguagaggcuuuggaucaggaaucaucaccucaaaugcaccaauggaugaaugugaugcgaaaugucaaacaccucagggagcuauaaacagcagucuuccuuuccagaauguacacccagucacaauaggagaguguccaaaguaugucaggaguacaaaauuaagaaugguuacaggacuaaggaacaucccauccauucaauccagagguuuguuuggagccauugccgguuucauugaagggggguggacuggaaugguagaugguugguaugguuaucaccaucagaaugagcaaggaucuggguaugcugcagaucaaaaaagcacacaaaaugccauuaacgggauuacaaacaaggugaauucuguaauugagaaaaugaacacucaauucacagcugugggcaaagaauucaacaaauuggaaagaaggauggaaaacuuaaauaaaaaaguugaugauggguuucuagacauuuggacauauaacgcugaauuguugguucuacuggaaaaugaaaggacuuuggacuuccaugacuccaacgugaagaaucuguaugagaaaguaaaaagccaauuaaagaauaaugccaaagaaauaggaaacggguguuuugaauucuaucacaaguguaacgaugaaugcauggagagugugaaaaauggaacuuaugacuauccaaaauauuccgaagaaucaaaguugaacagggagaaaauugauggagugaaauuggaaucaaugggagucuaucagauuuuggcgaucuacucaacagucgccaguucccugguucuuuuggucucccugggggcaaucagcuucuggauguguuccaaugggucuuugcaguguagaauaugcaucuaa

SEQ ID NO: 33946 - RNA, 1698 nt, Artificial Sequence
  derived and/or modified CDS sequence (wt) from hemagglutinin__InfluenzaA__ABV29986
augaaaguaaaacuacugauucuguuauguacauuuacagcuacauaugcagacacaauauguauaggcuaccaugccaacaacucgaccgacacuguugacacaguacuugagaagaaugugacagugacacacucugucaaccuacuugaggacagucacaauggaaaacuaugucuacuaaaaggaauagccccacuacaauuggguaauugcagcguugccggauggauuuuaggaaacccagaaugcgaauugcugauuuccaaggaaucaugguccuacauuguagagacaccaaauccugagaauggaacauguuacccaggguauuucgccgacuaugaggagcugagagagcaauugaguucaguaucuucauuugagagguucgaaauauuccccaaagagagcucauggcccaaccacaccguaaccggaguaucagcaucaugcucccauaacgggaaaagcaguuuuuacagaaauuugcuauggcugacggggaagaaugguuuguauccaaaccugagcaaguccuaugcaaacaacaaagagaaagaaguccuuguacugugggguguucaucacccgccuaacauaggggaccaaagggcccucuaucauacagaaaaugcuuaugucucuguagugucuucacauuauagcagaagauucaccccagaaauagccaaaagacccaaggugagagaucaggaaggaagaaucaacuacuacuggacucugcuugaacccggggauacaauaauauuugaggcaaauggaaaucuaauagcaccaagguuugcuuucgcacugaguagaggcuuuggaucaggaaucaucaccucaaaugcaccaauggaugaaugugaugcgaaaugucaaacaccucagggagcuauaaacagcagucuuccuuuccagaauguacacccagucacaauaggagaguguccaaaguaugucaggaguacaaaauuaagaaugguuacaggacuaaggaacaucccauccauucaauccagagguuuauuuggagccauugccgguuucauugaagggggguggacuggaaugguagaugguugguaugguuaucaccaucagaaugagcaaggaucuggguaugcugcagaucaaaaaagcacacaaaaugccauuaacgggauuacaaacaaggugaauucuguaauugagaaaaugaacacucaauucacagcugugggcaaagaauucaacaaauuggaaagaaggauggaaaacuuaaauaaaaaaguugaugauggguuucuagacauuuggacauauaacgcagaauuguugguucuacuggaaaaugaaaggacuuuggacuuccaugacuccaacgugaagaaucuguaugagaaaguaaaaagccaauuaaagaauaaugccaaagaaauaggaaacggguguuuugaauucuaucacaaguguaacgaugaaugcauggagagugugaaaaauggaacuuaugacuauccaaaauauuccgaagaaucaaaguugaacagggagaaaauugauggagugaaauuggaaucaaugggagucuaucagauuuuggcgaucuacucaacagucgccaguucccugguucuuuuggucucccugggggcaaucagcuucuggauguguuccaaugggucuuugcaguguagaauaugcaucuaa

SEQ ID NO: 33947 - RNA, 1698 nt, Artificial Sequence
  derived and/or modified CDS sequence (wt) from hemagglutinin__InfluenzaA__ABV29997
augaaaguaaaacuacugguucuguuauguacauuuacagcuacauaugcagacacaauauguauaggcuaccaugccaacaacucgaccgacacuguugacacaguacuugagaagaaugugacagugacacacucugucaaccuacuugaggacagucacaauggaaaacuaugucuacuaaaaggaauagccccacuacaauuggguaauugcagcguugccggauggaucuuaggaaacccagaaugcgaauuacugauuuccaaggaaucaugguccuacauuguagagacaccaaauccugagaauggaacauguuacccaggguauuucgccgacuaugaggagcugagagagcaauugaguucaguaucuucauuugagagguucgaaauauuccccaaagagagcucauggcccaaccacaccguaaccggaguaucagcaucaugcucccauaacgggaaaagcaguuuuuacagaaauuugcuauggcugacggggaagaaugguuuguauccaaaccugagcaaguccuaugcaaacaacaaagagaaagaaguccuuguacugugggggguucaucacccgccuaacauaggggaccaaagggcccucuaucauacagaaaaugcuuaugucucuguagugucuucacauuauagcagaagauucaccccagaaauagccaaaagacccaaggugagagaucaggaaggaagaaucaacuacuacuggacucugcuugaacccggggauacaauaauauuugaggcaaauggaaaucuaauagcgccaagguuugcuuucgcacugaguagaggcuuuggaucaggaaucaucaccucaaaugcaccaauggaugaaugugaugcgaaaugucaaacaccucagggagcuauaaacagcagucuuccuuuccagaauguacacccagucacaauaggagaguguccaaaguaugucaggaguacaaaauuaagaaugguuacaggacuaaggaacaucccauccauucaauccagagguuuguuuggagccauugccgguuucauugaagggggguggacuggaaugguagauggaugguaugguuaccaccaucagaaugagcaaggaucuggguaugcugcugaucaaaaaagcacacaaaaugccauuaacgggauuacaaacaaggugaauucuguaauugagaaaaugaacacucaauucacagcugugggcaaagaauucaacaaauuggaaagaaggauggaaaacuuaaauaaaaaaguugaugauggguuucuagacauuuggacauauaacgcagaauuguugguucuacuggaaaaugaaaggacuuuggacuuccaugacuccaacgugaagaaucuguaugagaaaguaaaaagccaauuaaagaauaaugccaaagaaauaggaaacggguguuuugaauucuaucacaaguguaacgaugaaugcauggagagugugaaaaauggaacuuaugacuauccaaaauauuccgaagaaucaaaguugaacagggagaaaauugauggagugaaauuggaaucaaugggagucuaucagauuuuggcgaucuacucaacagucgccaguucccugguucuuuuggucucccugggggcaaucagcuucuggauguguuccaaugggucuuugcaguguagaauaugcaucuaa

SEQ ID NO: 33948 - RNA, 1698 nt, Artificial Sequence
  derived and/or modified CDS sequence (wt) from hemagglutinin__InfluenzaA__ABV30008
augaaaguaaaacuacugauucuguuauguacauuuacagcuacauaugcagacacaauauguauaggcuaccaugccaacaacucgaccgacacuguugacacaguacuugagaagaaugugacagugacacacucugucaaccuacuugaggacagucacaauggaaaacuaugucuacuaaaaggaauagccccacuacaauuggguaauugcagcguugccggauggaucuuaggaaacccagaaugcgaauuacugauuuccaaggaaucaugguccuacauuguagagacaccaaauccugagaauggaacauguuacccaggguauuucgccgacuaugaggagcugagagagcaauugaguucaguaucuucauuugagagguucgaaauauuccccaaagagagcucauggcccaaccacaccguaaccggaguaucagcaucaugcucccauaacgggaaaagcaguuuuuacagaaauuugcuauggcugacggggaagaaugguuuguauccaaaccugagcaaguccuaugcaaacaacaaagagaaagaaguccuuguacugugggguguucaucacccgccuaacauaggggaccaaagggcccucuaucauacagaaaaugcuuaugucucuguagugucuucacauuauagcagaagauucaccccagaaauagccaaaagacccaaggugagagaucaggaaggaagaaucaacuacuacuggacucugcuugaacccggggauacaauaauauuugaggcaaauggaaaucuaauagcgccaagguuugcuuucgcacugaguagaggcuuuggaucaggaaucaucaccucaaaugcaccaauggaugaaugugaugcgaaaugucaaacaccucagggagcuauaaacagcagucuuccuuuccagaacguacacccagucacaauaggagaguguccaaaguaugucaggaguacaaaauuaagaaugguuacaggacuaaggaacaucccauccauucaauccagagguuuauuuggagccauugccgguuucauugaagggggguggacuggaaugguagaugguugguaugguuaucaccaucagaaugagcaaggaucuggguaugcugcagaucaaaaaagcacacaaaaugccauuaacgggauuacaaacaaggugaauucuguaauugaaaaaaugaacacucaauucacagcugugggcaaagaauucaacaaauuggaaagaaggauggaaaacuuaaauaaaaaaguugaugauggguuucuagacauuuggacauauaacgcagaauuguugguucuacuggaaaaugaaaggacuuuggacuuccaugacuccaacgugaagaaucuguaugagaaaguaaaaagccaauuaaagaauaaugccaaagaaauaggaaacggguguuuugaauucuaucacaaguguaacgaugaaugcauggagagugugaaaaauggaacuuaugacuauccaaaauauuccgaagaaucaaaguugaacagggagaaaauugauggagugaaauuggaaucaaugggagucuaucagauuuuggcgaucuacucaacagucgccaguucccugguucuuuuggucucccugggggcaaucagcuucuggauguguuccaaugggucuuugcaguguagaauaugcaucuaa

SEQ ID NO: 33949 - RNA, 1698 nt, Artificial Sequence
  derived and/or modified CDS sequence (wt) from hemagglutinin__InfluenzaA__ABV30019
augaaaguaaaacuacugguucuguuauguacauuuacagcuacauaugcagacacaauauguauaggcuaccaugccaacaacucgaccgacacuguugacacaguacuugagaagaaugugacagugacacacucugucaaccuacuugaggacagucacaauggaaaacuaugucuacuaaaaggaauagccccacuacaauuggguaauugcagcguugccggauggaucuuaggaaacccagaaugcgaauuacugauuuccaaggaaucaugguccuacauuguggagacaccaaauccugagaauggaacauguuacccaggguauuucgccgacuaugaggagcugagagagcaauugaguucaguaucuucauuugagagguucgaaauauuccccaaagagagcucauggcccaaccacaccguaaccggaguaucagcaucaugcucccauaacgggaaaagcaguuuuuacagaaauuugcuauggcugacggggaagaaugguuuguauccaaaccugagcaaguccuaugcaaacaacaaagagaaagaaguccuuguacugugggguguucaucacccgccuaacauaggggaccaaagggcccucuaucauacagaaaaugcuuaugucucuguagugucuucacauuauagcagaagauucaccccagaaauagccaaaagacccaaggugagagaucaggaaggaagaaucaacuacuacuggacucugcuugaacccggggauacaauaauauuugaggcaaauggaaaucuaauagcgccaagguuugcuuucgcacugaguagaggcuuuggaucaggaaucaucaccucaaaugcaccaauggaugaaugugaugcgaaaugucaaacaccucagggagcuauaaacagcagucuuccuuuccagaauguacacccagucacaauaggagaguguccaaaguaugucaggaguacaaaauuaagaaugguuacaggacuaaggaacaucccauccauucaauccagagguuuguuuggagccauugccgguuucauugaagggggguggacuggaaugguagaugguugguaugguuaucaccaucagaaugagcaaggaucuggguaugcugcagaucaaaaaagcacacaaaaugccauuaacgggauuacaaacaaggugaauucuguaauugagaaaaugaacacucaauucacagcugugggcaaagaauucaacaaauuggaaagaaggauggaaaacuuaaauaaaaaaguugaugauggguuucuagacauuuggacauauaacgcagaauuguugguucuacuggaaaaugaaaggacuuuggacuuccaugacuccaacgugaagaaucuguaugagaaaguaaaaagccaauuaaagaauaaugccaaagaaauaggaaacggguguuuugaauucuaucacaaguguaacgaugaaugcauggagagugugaaaaauggaacuuaugacuauccaaaauauuccgaagaaucaaaguugaacagggagaaaauugauggagugaaauuggaaucaaugggagucuaucagauuuuggcgaucuacucaacagucgccaguucccugguucuuuuggucucccugggggcaaucagcuucuggauguguuccaaugggucuuugcaguguagaauaugcaucuaa

SEQ ID NO: 33950 - RNA, 1698 nt, Artificial Sequence
  derived and/or modified CDS sequence (wt) from hemagglutinin__InfluenzaA__ABV30030
augaaaguaaaacuacugguucuguuauguacauuuacagcuacauaugcagacacaauauguauaggcuaccaugccaacaacucgaccgacacuguugacacaguacuugagaaaaaugugacagugacacacucugucaaccuacuugaggacagucacaauggaaaacuaugucuacuaaaaggaauagccccacuacaauuggguaauugcagcguugccggauggaucuuaggaaacccagaaugcgaauuacugauuuccaaggaaucaugguccuacauuguagagacaccaaauccugagaauggaacauguuacccaggguauuucgccgacuaugaggagcugagagagcaauugaguucaguaucuucauuugagagguucgaaauauuccccaaagagagcucauggcccaaccacaccguaaccggaguaucagcaucaugcucccauaacgggaaaagcaguuuuuacagaaauuugcuauggcugacggggaagaaugguuuguauccaaaccugagcaaguccuaugcaaacaacaaagagaaagaaguccuuguacugugggguguucaucacccgccuaacauaggggaccaaagggcccucuaucauacagaaaaugcuuaugucucuguagugucuucacauuauagcagaagauucaccccagaaauagccaaaagacccaaggugagagaucaggaaggaagaaucaacuacuacuggacucugcuugaacccggggauacaauaauauuugaggcaaauggaaaucuaauagcgccaagguuugcuuucgcacugaguagaggcuuuggaucaggaaucaucaccucaaaugcaccaauggaugaaugugaugcgaaaugucaaacaccucagggagcuauaaacagcagucuuccuuuccagaauguacacccagucacaauaggagaguguccaaaguaugucaggaguacaaaauuaagaaugguuacaggacuaaggaacaucccauccauucaauccagagguuuguuuggagccauugccgguuucauugaagggggguggacuggaaugguagauggaugguaugguuaccaccaucagaaugagcaaggaucuggguaugcugcugaucaaaaaagcacacaaaaugccauuaacgggauuacaaacaaggugaauucuguaauugagaaaaugaacacucaauucacagcugugggcaaagaauucaacaaauuggaaagaaggauggaaaacuuaaauaaaaaaguugaugauggguuucuagacauuuggacauauaacgcagaauuguugguucuacuggaaaaugaaaggacuuuggacuuccaugauuccaacgugaagaaucuguaugagaaaguaaaaagccaauuaaagaauaaugccaaagaaauaggaaacggguguuuugaauucuaucacaaguguaacgaugaaugcauggagagugugaaaaauggaacuuaugacuauccaaaauauuccgaagaaucaaaguugaacagggagaaaauugauggagugaaauuggaaucaaugggagucuaucagauuuuggcgaucuacucaacagucgccaguucccugguucuuuuggucucccugggggcaaucagcuucuggauguguuccaaugggucuuugcaguguagaauaugcaucuaa

SEQ ID NO: 33951 - RNA, 1698 nt, Artificial Sequence
  derived and/or modified CDS sequence (wt) from hemagglutinin__InfluenzaA__ABV30041
augaaaguaaaacuacuuguucuguuauguacauuuacagcuacauaugcagacacaauauguauaggcuaccaugccaacaacucgaccgacacuguugacacaguacuugagaagaaugugacagugacacacucugucaaccuacuugaggacagccacaauggaaaacuaugucuacuaaaaggaacagccccacuacaauuggguaauugcagcguugccggauggaucuuaggaaacccagaaugcgaauuacugauuucuaaggaaucaugguccuacauuguagaaacaccaaauccugagaauggaacauguuacccaggauauuucgccgacuaugaggagcugagggagcaauugaguucaguaucuucauuugagagguucgaaauauuccccaaagagagcucauggcccaaccacaccguaaccggaguaucagcaucaugcucccauaacgggaaaagcaguuuuuacagaaauuugcuauggcugacggggaagaaugguuuguauccaaaccugagcaaguccuaugcaaacaacaaagagaaagaaguccuuguacugugggguguucaucacccgccuaacauaggggaccaaagggcccucuaucauacagaaaaugcuuaugucucuguagugucuucacauuauagcagaagauucaccccagaaauagccaaaagacccaaggugagagaucaggaaggaagaaucaacuacuacuggacucugcuggaacccggggauacaauaauauuugaggcaaauggaaaucuaauagcgccaagguuugcuuucgcacugaguagaggcuuuggaucaggaaucaucaccucaaaugcaccaaugggugaaugugaugcgaagugucaaacaccucagggagcuauaaacaguagucuuccuuuccagaauguacacccagucacaauaggagaguguccaaaguaugucaggagugcaaaauuaagaaugguuacagggcuaaggaacaucccauccauucaauccagagguuuguuuggagccauugccgguuucauugaagggggguggacuggaaugguagaugguugguaugguuaucaccaucagaaugagcaaggaucuggguaugcugcagaucaaaaaagcacacaaaaugccauuaacgggauuacaaacaaggugaauucuguaauugagaaaaugaacacucaauucacagcugugggcaaagaauucaacaaauuggaaagaaggauggaaaacuuaaauaaaaagguugaugauggguuucuagacauuuggacauauaacgcagaauuguugguucuacuggaaaaugaaaggacuuuggacuuccaugacuccaacgugaagaaucuguaugagaaagugaaaaaccaauuaaagaauaaugccaaagaaauaggaaacggguguuuugaauucuaucacaaguguaacgaugaaugcauggagagugugaaaaauggaacuuaugacuauccaaaauauuccgaagaaucaaaguugaacagggagaaaauugauggagugaaauuggaaucaaugggagucuaucagauucuggcgaucuacucaacagucgccaguucccugguucuuuugaucucccugggggcaaucagcuucuggauguguuccaaugggucuuuacaguguagaauaugcaucuaa

SEQ ID NO: 33952 - RNA, 1701 nt, Artificial Sequence
  derived and/or modified CDS sequence (wt) from hemagglutinin__InfluenzaA__ABV30063
augaagacuaucauugcuuugagcuacauucuaugucugguuuucgcucaaaaacuuccuggaaaugacaacagcacggcaacgcugugccuugggcaccaugcaguaccaaacggaacgauagugaaaacaaucacgaaugaccaaauugaaguuacuaaugcuacugagcugguucagaguuccucaacaggugaaauaugcgacaguccucaucagauccuugauggagaaaacugcacacuaauagaugcucuauugggagacccucagugugauggcuuccaaaauaagaaaugggaccuuuuuguugaacgcagcaaagccuacagcaacuguuacccuuaugaugugccggauuaugccucccuuaggucacuaguugccucauccggcacacuggaguuuaacaaugaaagcuucaauuggacuggagucacucaaaacggaacaagcucugcuugcauaaggagaucuaauaacaguuucuucaguagauugaauugguugacccacuuaaaauucaaauacccagcauugaacgugacuaugccaaacaaugaaaaauuugacaaauuguacauuugggggguucaccacccggguacggacaaugaccaaaucuuccuguaugcucaagcaucaggaagaaucacagucucuaccaaaagaagccaacaaacuguaauaccgaauaucggaucuagacccagaguaaggaauauccccagcagaauaagcaucuauuggacaauaguaaaaccgggagacauacuuuugauuaacagcacagggaaucuaauugcuccuagggguuacuucaaaauacgaagugggaaaagcucaauaaugagaucagaugcacccauuggcaaaugcaauucugaaugcaucacuccaaauggaagcauucccaaugacaaaccauuccaaaauguaaacaggaucacauacggggccugucccagauauguuaagcaaaacacucugaaauuggcaacagggaugcgaaauguaccagagaaacaaacuagaggcauauuuggcgcaaucgcggguuucauagaaaaugguugggagggaaugguggaugguugguacgguuucaggcaucaaaauucugagggaauaggacaagcagcagaucucaaaagcacucaagcagcaaucgaucaaaucaaugggaagcugaauagguugaucgggaaaaccaacgagaaauuccaucagauugaaaaagaauucucagaagucgaagggaggauucaggaccuugagaaauauguugaggacaccaaaauagaucucuggucauacaacgcggagcuucuuguugcccuggagaaccaacauacaauugaucuaacugacucagaaaugaacaaacuguuugaaaaaacaaagaagcaacugagggaaaaugcugaggauaugggcaaugguuguuucaaaauauaccacaaaugugacaaugccugcauaggaucaaucagaaauggaacuuaugaccacgauguauacagagaugaagcauuaaacaaccgguuccagaucaagggcguugagcugaagucaggauacaaagauuggauccuauggauuuccuuugccauaucauguuuuuugcuuuguguugcuuuguugggguucaucaugugggccugccaaaaaggcaacauuaggugcaacauuugcauuuga

SEQ ID NO: 33953 - RNA, 1701 nt, Artificial Sequence
  derived and/or modified CDS sequence (wt) from hemagglutinin__InfluenzaA__ABV30074
augaagacuaucauugcuuugagcuacauucuaugucugguuuucgcucaaaaacuuccuggaaaugacaacagcacggcaacgcugugccuugggcaccaugcaguaccaaacggaacgauagugaaaacaaucacgaaugaccaaauugaaguuacuaaugcuacugagcugguucagaguuccucaacaggugaaauaugcgacaguccucaucagauccuugauggagaaaacugcacacuaauagaugcucuauugggagacccucagugugauggcuuccaaaauaagaaaugggaccuuuuuguugaacgcagcaaagccuacagcaacuguuacccuuaugaugugccggauuaugccucccuuaggucacuaguugccucauccggcacacuggaguuuaacaaugaaagcuucaauuggacuggagucacucaaaacggaacaagcucugcuugcauaaggagaucuaauaacaguuucuuuaguagauugaauugguugacccacuuaaaauucaaauacccagcauugaacgugacuaugccaaacaaugaaaaauuugacaaauuguacauuugggggguucaccacccggguacggacaaugaccaaaucuuccuguaugcucaagcaucaggaagaaucacagucucuaccaaaagaagccaacaaacuguaaucccgaauaucggaucuagacccagaguaaggaauauccccagcagaauaagcaucuauuggacaauaguaaaaccgggagacauacuuuugauuaacagcacagggaaucuaauugcuccuagggguuacuucaaaauacgaagugggaaaagcucaauaaugagaucagaugcacccauuggcaaaugcaauucugaaugcaucacuccaaauggaagcauucccaaugacaaaccauuccaaaauguaaacaggaucacauacggggccugucccagauauguuaagcaaaacacucugaaauuggcaacagggaugcgaaauguaccagagaaacaaacuagaggcauauuuggcgcaaucgcggguuucauagaaaaugguugggagggaaugguggaugguugguacgguuucaggcaucaaaauucugagggaauaggacaagcagcagaucucaaaagcacucaagcagcaaucgaucaaaucaaugggaagcugaauagguugaucgggaaaaccaacgagaaauuccaucagauugaaaaagaauucucagaagucgaagggaggauucaggaccuugagaaauauguugaggacaccaaaauagaucucuggucauacaacgcggagcuucuuguugcccuggagaaccaacauacaauugaucuaacugacucagaaaugaacaaacuguuugaaaaaacaaagaagcaacugagggaaaaugcugaggauaugggcaaugguuguuucaaaauauaccacaaaugugacaaugccugcauaggaucaaucagaaauggaacuuaugaccacgauguauacagagaugaagcauuaaacaaccgguuccagaucaagggcguugagcugaagucaggauacaaagauuggauccuauggauuuccuuugccauaucauguuuuuugcuuuguguugcuuuguugggguucaucaugugggccugccaaaaaggcaacauuaggugcaacauuugcauuuga

SEQ ID NO: 33954 - RNA, 1698 nt, Artificial Sequence; identical to SEQ ID NO: 33947
  derived and/or modified CDS sequence (wt) from hemagglutinin__InfluenzaA__ABV30085

SEQ ID NO: 33955 - RNA, 1698 nt, Artificial Sequence; identical to SEQ ID NO: 33947
  derived and/or modified CDS sequence (wt) from hemagglutinin__InfluenzaA__ABV30096

SEQ ID NO: 33956 - RNA, 1698 nt, Artificial Sequence; identical to SEQ ID NO: 33938
  derived and/or modified CDS sequence (wt) from hemagglutinin__InfluenzaA__ABV30107

SEQ ID NO: 33957 - RNA, 1698 nt, Artificial Sequence
  derived and/or modified CDS sequence (wt) from hemagglutinin__InfluenzaA__ABV30129
augaaaguaaaacuacugguucuguuauguacauuuacagcuacauaugcagacacaauauguauaggcuaccaugccaacaacucgaccgacacuguugacacaguacuugagaagaaugugacagugacacacucugucaaccuacuugaggacagucacaauggaaaacuaugucuacuaaaaggaauagccccacuacaauuggguaauugcagcguugccggauggaucuuaggaaacccagaaugcgaauuacugauuuccaaggaaucaugguccuacauuguagagacaccaaauccugagaauggaacauguuacccagggaauuucgccgacuaugaggagcugagagagcaauugaguucaguaucuucauuugagagguucgaaauauuccccaaagagagcucauggcccaaccacaccguaaccggaguaucagcaucaugcucccauaacgggaaaagcaguuuuuacagaaauuugcuauggcugacggggaagaaugguuuguauccaaaccugagcaaguccuaugcaaacaacaaagagaaagaaguccuuguacugugggguguucaucacccgccuaacauaggggaccaaagggcccucuaucauacagaaaaugcuuaugucucuguagugucuucacauuauagcagaagauucaccccagaaauagccaaaagacccaaggugagagaucaggaaggaagaaucaacuacuacuggacucugcuugaacccggggauacaauaauauuugaggcaaauggaaaucuaauagcgccaagguuugcuuucgcacugaguagaggcuuuggaucaggaaucaucaccucaaaugcaccaauggaugaaugugaugcgaaaugucaaacaccucagggagcuauaaacagcagccuuccuuuccagaauguacacccagucacaauaggagaguguccaaaguaugucaggagugcaaaauuaagaaugguuacagggcuaaggaacaucccauccauucaauccagagguuuguuuggagccauugccgguuucauugaagggggguggacuggaaugguagaugguugguaugguuaucaccaucagaaugagcaaggaucuggguaugcugcagaucaaaaaagcacacaaaaugccauuaacgggauuacaaacaaggugaauucuguaauugagaaaaugaacacucaauucacagcugugggcaaagaauucaacaaauuggaaagaaggauggaaaacuuaaauaaaaaaguugaugauggguuucuagacauuuggacauauaacgcagaauuguugguucuacuggaaaaugaaaggacuuuggacuuccaugacuccaacgugaagaaucuguaugagaaaguaaaaagccaauuaaagaauaaugccaaagaaauaggaaacggguguuuugaauucuaucacaaauguaacgaugaaugcauggagagugugaaaaauggaacuuaugacuauccaaaauauuccgaagaaucaaaguugaacagggagaaaauugauggagugaaauuggaaucaaugggagucuaucagauuuuggcgaucuacucaacagucgccaguucccugguucuuuuggucucccugggggcaaucagcuucuggauguguuccaaugggucuuugcaguguagaauaugcaucuaa

SEQ ID NO: 33958 - RNA, 1698 nt, Artificial Sequence
  derived and/or modified CDS sequence (wt) from hemagglutinin__InfluenzaA__ABV30140
augaaagugaaacuacugguucuguuauguacauuuacagcuacauaugcagacacaauauguauaggcuaccaugccaacaacucgaccgacacuguugacacaguacuugagaagaaugugacagugacacacucugucaaccuacuugaggaccgucacaauggaaaacuaugucuacuaaaaggaauagccccacuaaaauuggguaauugcagcguugccggauggaucuuaggaaacccagaaugcgaauuacugauuuccaaggaaucaugguccuacauuguagaaacaccaaauccugagaauggaacauguuacccaggguauuucgccgacuaugaggagcugagggagcaauugaguucaguaucuucauuugagagguucgaaauauuccccaaagagagcucauggcccaaucacaccguaaccggaguaucagcaucaugcucccauaacgggaaaagcaguuuuuacagaaauuugcuauggcugacgggaaagaaugguuuguacccaaaccugagcagauccuaugcaaacaacaaagagaaagaaguccuuguacugugggguguucaucacccgccuaacauaggggaccaaagggcccucuaucauacagaaaaugcuuaugucucuguagugucuucacauuauagcagaagauucaccccagaaauagccaaaagacccaaggugagagaucaggaaggaagaaucaauuacuacuggacucuacuggaacccggggauacaauaauauuugaggcaaaugggaaucuaauagcgccaagguuugcuuucgcacugaguagaggcuuuggaucaggaaucaucaccucaaaugcaccaauggaugaaugugaugcgaagugucaaacaccucagggagcuauaaacagcagucuuccuuuccagaauguacacccagucacaauaggagaguguccaaaguaugucaggagugcaaaauuaagaaugguuacaggacuaaggaacaucccauccauucaauccagagguuuguuuggagccauugccgguuucauugaagggggguggacuggaaugguagaugguugguaugguuaucaccaccagaaugagcaaggaucuggguaugcugcagaucaaaaaagcacacaaaaugccauuaacgggauuacaaacaaggugaauucugugauugagaaaaugaacacucaauucacagcugugggcaaagaauucaacaaauuggaaagaagaauggaaaacuuaaauaaaaaaguugaugauggguuucuagacauuuggacguauaacgcagaauuguugguucuacuggaaaaugaaaggacuuuggacuuccaugacuccaacgugaagaaucuguaugagaaaguaaaaagccaauuaaagaauaaugccaaagaaauaggaaacggguguuuugaauucuaucacaaguguaacgaugaaugcauggagagugugaaaaauggaacuuaugacuauccaaaauauuccgaagaaucaaaguuaaacagggagaaaauugauggagugaaauuggaaucaaugggagucuaucagauucuggcgaucuacucaacagucgccaguucccugguucuuuuggucucccugggggcaaucagcuucuggauguguuccaaugggucuuugcaguguagaauaugcaucuaa

SEQ ID NO: 33959 - RNA, 1698 nt, Artificial Sequence
  derived and/or modified CDS sequence (wt) from hemagglutinin__InfluenzaA__ABV30151
augaaaguaaaacuacuuguucuguuauguacauuuacagcuacauaugcagacacaauauguauaggcuaccaugccaacaacucgaccgacacuguugacacaguacuugagaagaaugugacagugacacacucugucaaccuacuugaggacagucacaauggaaaacuaugucuacuaaaaggaauagccccacuacaauuggguaauugcagcguugccggauggaucuuaggaaacccagaaugcgaauuacugauuuccaaggaaucaugguccuacauuguagaaacaccaaauccugagaauggaacauguuacccaggguauuucgccgacuaugaggagcugagggagcaauugaguucaguaucuucauuugagagguucgaaauauuccccaaagagagcucauggcccaaccacaccguaaccggaguaucagcaucaugcucccauagugggaaaagcaguuuuuacagaaauuugcuauggcugacggggaagaaugguuuguauccaaaccugagcaaguccuaugcaaacaacaaagagaaagaaguccuuguacugugggguguucaucacccgccuaacauaggggaccaaagggcccucuaucauacagaaaaugcuuaugucucuguagugucuucacauuauagcagaagauucaccccagaaauagccaaaagacccaaggugagagaucaggaaggaagaaucaacuacuacuggacucugcuggaacccggggauacaauaauauuugaggcaaauggaaaucuaauagcgccaagguuugcuuucgcacugaguagaggcuuuggaucaggaaucaucaccucaaaugcaccaaugggugaaugugaugcgaagugucaaacaccucagggagcuauaaacaguagucuuccuuuccagaauguacauccagucacaauaggggaguguccaaaguaugucaggagugcaaaauuaagaaugguuacaggacuaaggaacaucccauccauucaaucccgagguuuguuuggagccauugccgguuucauugaagggggguggacuggaaugguagaugguugguaugguuaucaccaucagaaugagcaaggaucuggguaugcugcagaucaaaaaagcacacaaaaugccauuaacgggauuacaaacaaggugaauucuguaauugagaaaaugaacacucaauucacagcugugggcaaagaauucaacaaauuggaaagaaggauggaaaacuuaaauaaaaagguugaugauggguuucuagacauuuggacauauaacgcagaauuguugguucuacuggaaaaugaaaggacuuuggacuuccaugacuccaacgugaagaaucuguaugagaaaguaaaaagccaauuaaagaauaaugccaaagaaauaggaaacggguguuuugaauucuaucacaaguguaacgaugaaugcauggagagugugaaaaauggaacuuaugacuauccaaaauauuccgaagaaucaaaguugaacagggagaaaauugauggagugaaauuggaaucaaugggagucuaucagauucuggcgaucuacucaacagucgccaguucccugguucuuuuggucucccugggggcaaucagcuucuggauguguuccaaugggucuuugcaguguagaauaugcaucuaa

SEQ ID NO: 33960 - RNA, 1698 nt, Artificial Sequence
  derived and/or modified CDS sequence (wt) from hemagglutinin__InfluenzaA__ABV30162
augaaaguaaaacuacugguucuguuauguacauuuacagcuacauaugcagacacaauauguauaggcuaccaugccaacaacucgaccgacacuguugacacaguacuugagaagaaugugacagugacacacucugucaaccuacuugaggacagucacaauggaaaacuaugucuacuaaaaggaauagccccacuacaauuggguaauugcagcguugccggauggaucuuaggaaacccagaaugcgaauuacugauuuccagggaaucaugguccuacauuguagagacaccaaauccugagaauggaacauguuacccaggguauuucgccgacuaugaggagcugagagagcaauugaguucaguaucuucauuugagagguucgaaauauuccccaaagagagcucauggcccaaccacaccguaaccggaguaucagcaucaugcucccauaacgggaaaagcaguuuuuacagaaauuugcuauggcugacggggaagaaugguuuguauccaaaccugagcaaguccuaugcaaacaacaaagagaaagaaguccuuguacugugggguguucaucacccgccuaacauaggggaccaaagggcccucuaucauacagaaaaugcuuauguaucuguagugucuucacauuauagcagaagauucaccccagaaauagccaaaagacccaaggugagagaucaggaaggaagaaucaacuacuacuggacucugcuugaacccggggauacaauaauauuugaggcaaauggaaaucuaauagcgccaagguuugcuuucgcacugaguagaggcuuuggaucaggaaucaucaccucaaaugcaccaauggaugaaugugaugcgaaaugucaaacaccucagggagcuauaaacagcagucuuccuuuccagaauguacacccagucacaauaggagaguguccaaaguaugucaggaguacaaaauuaagaaugguuacaggacuaaggaacaucccauccauucaauccagagguuuguuuggagccauugccgguuucauugaagggggguggacuggaaugguagaugguugguaugguuaucaccaucagaaugagcaaggaucuggguaugcugcagaucaaaaaagcacacaaaaugccauuaacgggauuacaaacaaggugaauucuguaauugagaaaaugaacacucaauucacagcugugggcaaagaauucaacaaauuggaaagaaggauggaaaacuuaaauaaaaaaguugaugauggguuucuagacauuuggacauauaacgcagaauuguugguucuacuggaaaaugaaaggacuuuggacuuccaugacuccaacgugaagaaucuguaugagaaaguaaaaagccaauuaaagaauaaugccaaagaaauaggaaacggguguuuugaauucuaucacaaguguaacgaugaaugcauggagagugugaaaaauggaacuuaugacuauccaaaauauuccgaagaaucaaaguugaacagggagaaaauugauggagugaaauuggaaucaaugggagucuaucagauuuuggcgaucuacucaacagucgccaguucccugguucuuuuggucucccugggggcaaucagcuucuggauguguuccaaugggucuuugcaguguagaauaugcaucuaa

SEQ ID NO: 33961 - RNA, 1698 nt, Artificial Sequence; identical to SEQ ID NO: 33945
  derived and/or modified CDS sequence (wt) from hemagglutinin__InfluenzaA__ABV30173

SEQ ID NO: 33962 - RNA, 1698 nt, Artificial Sequence
  derived and/or modified CDS sequence (wt) from hemagglutinin__InfluenzaA__ABV30184
augaaaguaaaacuacugguucuguuauguacauuuacagcuacauaugcagacacaauauguauaggcuaccaugccaacaacucgaccgacacuguugacacaguacuugagaagaaugugacagugacacacucugucaaccuacuugaggacagucacaauggaaaacuaugucuacuaaaaggaauagccccacuacaauuggguaauugcagcguugccggauggaucuuaggaaacccagaaugcgaauuacugauuuccaaggaaucaugguccuacauuguagagacaccaaauccugagaauggaacauguuacccaggguauuucgccgacuaugaggagcugagagagcaauugaguucaguaucuucauuugagagguucgaaauauuccccaaagagagcucauggcccaaccacaccguaaccggaguaucagcaucaugcucccauaacgggaaaagcaguuuuuacagaaauuugcuguggcugacggggaagaaugguuuguauccaaaccugagcaaguccuaugcaaacaacaaagagaaagaaguccuuguacugugggguguucaucacccgccuaacauaggggaccaaagggcccucuaucauacagaaaaugcuuaugucucuguagugucuucacauuauagcagaagauucaccccagaaauagccaaaagacccaaggugagagaucaggaaggaagaaucaacuacuacuggacucugcuugaacccggggauacaauaauauuugaggcaaauggaaaucuaauagcgccaagguuugcuuucgcacugaguagaggcuuuggaucaggaaucaucaccucaaaugcaccaauggaugaaugugaugcgaaaugucaaacaccucagggagcuauaaacagcagucuuccuuuccagaauguacacccagucacaauaggagaguguccaaaguaugucaggaguacaaaauuaagaaugguuacaggacuaaggaacaucccauccauucaauccagagguuuguuuggagccauugccgguuucauugaagggggguggacuggaaugguagauggaugguaugguuaccaccaucagaaugagcaaggaucuggguaugcugcugaucaaaaaagcacacaaaaugccauuaacgggauuacaaacaaggugaauucuguaauugagaaaaugaacacucaauucacagcugugggcaaagaauucaacaaauuggaaagaaggauggaaaacuuaaauaaaaaaguugaugauggguuucuagacauuuggacauauaacgcagaauuguugguucuacuggaaaaugaaaggacuuuggacuuccaugacuccaacgugaagaaucuguaugagaaaguaaaaagccaauuaaagaauaaugccaaagaaauaggaaacggguguuuugaauucuaucacaaguguaaugaugaaugcauggagagugugaaaaauggaacuuaugacuauccaaaauauuccgaagaaucaaaguugaacagggagaaaauugauggagugaaauuggaaucaaugggagucuaucagauuuuggcgaucuacucaacagucgccaguucccugguucuuuuggucucccugggggcaaucagcuucuggauguguuccaaugggucuuugcaguguagaauaugcaucuaa

SEQ ID NO: 33963 - RNA, 1701 nt, Artificial Sequence
  derived and/or modified CDS sequence (wt) from hemagglutinin__InfluenzaA__ABV30217
augaagacuaucauugcuuugagcuacauucuaugucugguuuucgcucaaaaacuuccuggaaaugacaacagcacggcaacgcugugccuugggcaccaugcaguaccaaacggaacgauagugaaaacaaucacgaaugaccaaauugaaguuacuaaugcuacugagcugguucagaguuccucaacaggugaaauaugcgacaguccucaucagauccuugauggagaaaacugcacacuaauagaugcucuauugggagacccucagugugauggcuuccaaaauaagaaaugggaccuuuuuguugaacgcagcaaagccuacagcaacuguuacccuuaugaugugccggauuaugccucccuuaggucacuaguugccucauccggcacacuggaguuuaacaaugaaagcuucaauuggacuggagucacucaaaacggaacaagcucugcuugcauaaggagaucuaauaacaguuucuuuaguagauugaauugguugacccacuuaaaauucaaauacccagcauugaacgugacuaugccaaacaaugaaaaauuugacaaauuguacauuugggggguucaccacccggguacggacaaugaccaaaucuuccuguaugcucaagcaucaggaagaaucacagucucuaccaaaagaagccaacaaacuguaaucccgaauaucggaucuagacccagaguaaggaauauccccagcagaauaagcaucuauuggacaauaguaaaaccgggagacauacuuuugauuaacagcacagggaaucuaauugcuccuagggguuacuucaaaauacgaagugggaaaagcucaauaaugagaucagaugcacccauugguaaaugcaauucugaaugcaucacuccaaauggaagcauucccaaugacaaaccauuccaaaauguaaacaggaucacauacggggccugucccagauauguuaagcaaaacacucugaaauuggcaacagggaugcgaaauguaccagagaaacaaacuagaggcauauuuggcgcaaucgcggguuucauagaaaaugguugggagggaaugguggaugguugguacgguuucaggcaucaaaauucugagggaauaggacaagcagcagaucucaaaagcacucaagcagcaaucgaucaaaucaaugggaagcugaauagguugaucgggaaaaccaacgagaaauuccaucagauugaaaaagaauucucagaagucgaagggaggauucaggaccuugagaaauauguugaggacaccaaaauagaucucuggucauacaacgcggagcuucuuguugcccuggagaaccaacauacaauugaucuaacugacucagaaaugaacaaacuguuugaaaaaacaaagaagcaacugagggaaaaugcugaggauaugggcaaugguuguuucaaaauauaccacaaaugugacaaugccugcauaggaucaaucagaaauggaacuuaugaccacgauguauacagagaugaagcauuaaacaaccgguuccagaucaagggcguugagcugaagucaggauacaaagauuggauccuauggauuuccuuugccauaucauguuuuuugcuuuguguugcuuuguugggguucaucaugugggccugccaaaaaggcaacauuaggugcaacauuugcauuuga

SEQ ID NO: 33964 - RNA, 1701 nt, Artificial Sequence
  derived and/or modified CDS sequence (wt) from hemagglutinin__InfluenzaA__ABV30228
augaagacuaucauugcuuugagcuacauucuaugucugguuuucgcucaaaaacuuccuggaaaugacaacagcacggcaacgcugugccuugggcaccaugcaguaccaaacggaacgauagugaaaacaaucacgaaugaccaaauugaaguuacuaaugcuacugagcugguucagaguuccucaacaggugaaauaugcgacaguccucaucagauccuugauggagaaaacugcacacuaauagaugcucuauugggagacccucagugugauggcuuccaaaauaagaaaugggaccuuuuuguugaacgcagcaaagccuacagcaacuguuacccuuaugaugugccggauuaugccucccuuaggucacuaguugccucauccggcacacuggaguuuaacaaugaaagcuucaauuggacuggagucacucaaaacggaacaagcucugcuugcauaaggagaucuaauaacaguuucuuuaguagauugaauugguugacccacuuaaaauucaaauacccagcauugaacgugacuaugccaaacaaugaaaaauuugacaaauuguacauuugggggguucaccacccggguacggacaaugaccaaaucuuccuguaugcucaagcaucaggaagaaucacagucucuaccaaaagaagccaacaaacuguaaucccgaauaucggaucuagacccagaguaaggaauauccccagcagaauaagcaucuauuggacaauaguaaaaccgggagacauacuuuugauuaacagcacagggaaucuaauugcuccuagggguuacuucaaaauacgaagugggaaaagcucaauaaugagaucagaugcacccauuggcaaaugcaauucugaaugcaucacuccaaauggaagcauucccaaugacaaaccauuccaaaauguaaacaggaucacauacggggccugucccagauauguuaagcaaaacacucugaaauuggcaacagggaugcgaaauguaccagagaaacaaacuagaggcauauuuggcgcaaucgcggguuucauagaaaaugguugggagggaaugguggaugguugguacgguuucaggcaucaaaauucugagggaauaggacaagcagcagaucucaaaagcacucaagcagcaaucgaccaaaucaaugggaagcugaauagguugaucgggaaaaccaacgagaaauuccaucagauugaaaaagaauucucagaagucgaagggaggauucaggaccuugagaaauauguugaggacaccaaaauagaucucuggucauacaacgcggagcuucuuguugcccuggagaaccaacauacaauugaucuaacugacucagaaaugaacaaacuguuugaaaaaacaaagaagcaacugagggaaaaugcugaggauaugggcaaugguuguuucaaaauauaccacaaaugugacaaugccugcauaggaucaaucagaaauggaacuuaugaccacgauguauacagagaugaagcauuaaacaaccgguuccagaucaagggcguugagcugaagucaggauacaaagauuggauccuauggauuuccuuugccauaucauguuuuuugcuuuguguugcuuuguugggguucaucaugugggccugccaaaaaggcaacauuaggugcaacauuugcauuuga

SEQ ID NO: 33965 - RNA, 1701 nt, Artificial Sequence
  derived and/or modified CDS sequence (wt) from hemagglutinin__InfluenzaA__ABV30261
augaagacuaucauugcuuugagcuacauucuaugucugguuuucgcucaaaaacuucccggaauugacaacagcacggcaacgcugugccuugggcaccaugcaguaccaaacggaacgauagugaaaacaaucacgaaugaccaaguugaaguuacuaaugcuacugagcugguucagaguuccucaacagguggaauaugcgacaguccucaucagauccuugauggagaaaacugcacacuaauagaugcucuauugggagacccucagugugauggcuuccaaaauaagaaaugggaccuuuuuguugaacgcagcaaagccuacagcaacuguuacccuuaugaugugccggauuaugccucccuuaggucacuaguugccucauccggcacacuggaguuuaacaaugaaagcuucaauugggcuggagucacucaaaauggaacaagcucugcuugcaaaaggggaucuaauaacaguuucuuuaguagauugaauugguugacccacucaaaauucaaauacccagcauugaacgugacuaugccaaacaaugaagaauuugacaaauuguacauuugggggguucaccacccggguacggacaaugaccaaaucuuccuguaugcucaagcaucaggaagaaucacagucucuaccaaaagaagccaacaaacuguaaucccgaauaucggaucuagacccagaguaaggaauauccccagcagaauaagcaucuauuggacaauaguaaaaccgggagacauacuuuugauuaacagcacagggaaucuaauugcuccuagggguuacuucaaaauacgaagugggaaaagcucaauaaugagaucagaugcacccauuggcaaaugcaauucugaaugcaucacuccaaauggaagcauucccaaugacaaaccauuucaaaauguaaacaggaucacauauggggccugucccagguauguuaagcaaaacacucugaaauuggcaacagggaugcgaaauguaccagagaaacaaacuagaggcauauuuggcgcaaucgcggguuucauagaaaaugguugggagggaaugguggaugguugguacgguuucaggcaucaaaauucugagggaaugggacaagcagcagaucucaaaagcacucaagcagcaaucgaucaaaucaaugggaagcugaauagguugaucgggaaaaccaacgagaaauuccaccagauugaaaaagaauucucagaaguagaagggagaauucaggaccucgagaaauauguugaggacacuaaaauagaucucuggucauacaacgcggagcuucuuguugcccuggagaaccaacauacaauugaucuaacugacucagaaaugaacaaacuguuugaaaagacaaagaagcaacugagggaaaaugcugaggauaugggcaaugguuguuucaaaauauaccacaaaugugacaaugccugcauaggaucaaucagaaauggaacuuaugaccaugauguauacagagcugaagcauuaaacaaccgguuucagaucaagggcguugagcugaagucaggauacaaagauuggauccuauggauuuccuuugccauaucauguuuuuugcuuuguguugcuuuguugggguucaucaugugggccugccaaaaaggcaacauuaggugcaacauuugcauuuga

SEQ ID NO: 33966 - RNA, 1701 nt, Artificial Sequence
  derived and/or modified CDS sequence (wt) from hemagglutinin__InfluenzaA__ABV30272
augaagacuaucauugcuuugagcuacauucuaugucugguuuucgcucaaaaacuuccuggaaaugacaacagcacggcaacgcugugccuugggcaccaugcaguaccaaacggaacgauagugaaaacaaucacgaaugaccaaauugaaguuacuaaugcuacugagcugguucagaguuccucaacaggugaaauaugcgacaguccucaucagauccuugauggagaaaacugcacacuaauagaugcucuauugggagacccucagugugauggcuuccaaaauaagaaaugggaccuuuuuguugaacgcagcaaagccuacagcaacuguuacccuuaugaugugccggauuaugccucccuuaggucacuaguugccucauccggcacacuggaguuuaacaaugaaagcuucaauuggacuggagucacucaaaacggaacaagcucugcuugcauaaggagaucuaauaacaguuucuuuaguaaauugaauugguugacccacuuaaaauucaaauacccagcauugaacgugacuaugccaaacaaugaaaaauuugacaaauuguacauuugggggguucaccacccggguacggacaaugaccaaaucuuccuguaugcucaagcaucaggaagaaucacagucucuaccaaaagaagccaacaaacuguaaucccgaauaucggaucuagacccagaguaaggaauauccccagcagaauaagcaucuauuggacaauaguaaaaccgggagacauacuuuugauuaacagcacagggaaucuaauugcuccuagggguuacuucaaaauacgaagugggaaaagcucaauaaugagaucagaugcacccauuggcaaaugcaauucugaaugcaucacuccaaauggaagcauucccaaugacaaaccauuccaaaauguaaacaggaucacauacggggccugucccagauauguuaagcaaaacacucugaaauuggcaacagggaugcgaaauguaccagagaaacaaacuagaggcauauuuggcgcaaucgcggguuucauagaaaaugguugggagggaaugguggaugguugguacgguuucaggcaucaaaauucugagggaauaggacaagcagcagaucucaaaagcacucaagcagcaaucgaucaaaucaaugggaagcugaauagguugaucgggaaaaccaacgagaaauuccaucagauugaaaaagaauucucagaagucgaagggaggauucaggaccuugagaaauauguugaggacaccaaaauagaucucuggucauacaacgcggagcuucuuguugcccuggagaaccaacauacaauugaucuaacugacucagaaaugaacaaacuguuugaaaaaacaaagaagcaacugagggaaaaugcugaggauaugggcaaugguuguuucaaaauauaccacaaaugugacaaugccugcauaggaucaaucagaaauggaacuuaugaccacgauguauacagagaugaagcauuaaacaaccgguuccagaucaagggcguugagcugaagucaggauacaaagauuggauccuauggauuuccuuugccauaucauguuuuuugcuuuguguugcuuuguugggguucaucaugugggccugccaaaaaggcaacauuaggugcaacauuugcauuuga

SEQ ID NO: 33967 - RNA, 1698 nt, Artificial Sequence
  derived and/or modified CDS sequence (wt) from hemagglutinin__InfluenzaA__ABV30283
augaaaguaaaacuacugguucuguuauguacauuuacagcuacauaugcagacacaauauguauaggcuaccaugccaacaacucgaccgacacuguugacacaguacuugagaagaaugugacagugacacacucugucaaccuacuugaggacagucacaauggaaaacuaugucuacuaaaaggaauagccccacuacaauuggguaauugcagcguugccggauggaucuuaggaaacccagaaugcgaauuacugauuuccaaggaaucaugguccuacauuguagagacaccaaauccugagaauggaacauguuacccagggaauuucgccgacuaugaggaguugagagagcaauugaguucaguaucuucauuugagagguucgaaauauuccccaaagagagcucauggcccaaccacaccguaaccggaguaucagcaucaugcucccauaacgggaaaagcaguuuuuacagaaauuugcuauggcugacggggaagaaugguuuguauccaaaccugagcaaguccuaugcaaacaacaaagagaaagaaguccuuguacugugggguguucaucacccgccuaacauaggggaccaaagggcccucuaucauacagaaaaugcuuaugucucuguagugucuucacauuauagcagaagauucaccccagaaauagccaaaagacccaaggugagagaucaggaaggaagaaucaacuacuacuggacucugcuugaacccggggauacaauaauauuugaggcaaauggaaaucuaauagcgccaagguuugcuuucgcacugaguagaggcuuuggaucaggaaucaucaccucaaaugcaccaauggaugaaugugaugcgaaaugucaaacaccucagggagcuauaaacagcagccuuccuuuccagaauguacacccagucacaauaggagaguguccaaaguaugucaggagugcaaaauuaagaaugguuacagggcuaaggaacaucccauccauucaauccagagguuuguuuggagccauugccgguuucauugaagggggguggacuggaaugguagaugguugguaugguuaucaccaucagaaugagcaaggaucuggguaugcugcagaucaaaaaagcacacaaaaugccauugacgggauuacaaacaaggugaauucuguaauugagaaaaugaacacucaauucacagcugugggcaaagaauucaacaaauuggaaagaaggauggaaaacuuaaauaaaaaaguugaugauggguuucuagacauuuggacauauaacgcagaauuguugguucuacuggaaaaugaaaggacuuuggacuuccaugacuccaacgugaagaaucuguaugagaaaguaaaaagccaauuaaagaauaaugccaaagaaauaggaaacggguguuuugaauucuaucacaaauguaacgaugaaugcauggagagugugaaaaauggaacuuaugacuauccaaaauauuccgaagaaucaaaguugaacagggagaaaauugauggaguaaaauuggaaucaaugggagucuaucagauuuuggcgaucuacucaacagucgccaguucccugguucuuuuggucucccugggggcaaucagcuucuggauguguuccaaugggucuuugcaguguagaauaugcaucuaa

SEQ ID NO: 33968 - RNA, 1698 nt, Artificial Sequence
  derived and/or modified CDS sequence (wt) from hemagglutinin__InfluenzaA__ABV30294
augaaagugaaacuacugguucuguuauguacauuuacagcuacauaugcagacacaauauguauaggcuaccaugccaacaacucgaccgacacuguugacacaguacuugagaagaaugugacagugacacacucugucaaccuacuugaggaccgucacaauggaaaacuaugucuacuaaaaggaauagccccacuacaauuggguaauugcagcguugccggauggaucuuaggaaacccagaaugcgaauuacugauuuccaaggaaucaugguccuacauuguagaaacaccaaauccugagaauggaacauguuacccaggguauuucgccgacuaugaggagcugagggagcaauugaguucaguaucuucauuugagagguucgaaauauuccccaaagagagcucauggcccaaucacaccguaaccggaguaucagcaucaugcucccauaacgggaaaagcaguuuuuacagaaauuugcuauggcugacgggaaagaaugguuuguacccaaaccugagcagauccuaugcaaacaacaaagagaaagaaguccuuguacugugggguguucaucacccgccuaacauaggggaccaaagggcccucuaucauacagaaaaugcuuaugucucuguagugucuucacauuauagcagaagauucaccccagaaauagccaaaagacccaaggugagagaucaggagggaagaaucaauuacuacuggacucuacuggaacccggggauacaauaauauuugaggcaaaugggaaucuaauagcgccaagguuugcuuucgcacugaguagaggcuuuggaucaggaaucaucaccucaaaugcaccaauggaugaaugugaugcgaagugucaaacaccucagggagcuauaaacagcagucuuccuuuccagaauguacacccagucacaauaggagaguguccaaaguaugucaggagugcaaaauuaagaaugguuacaggacuaaggaacaucccauccauucaauccagagguuuguuuggagccauugccgguuucauugaagggggguggacuggaaugguagaugguugguaugguuaucaccaccagaaugagcaaggaucuggguaugcugcagaucaaaaaagcacacaaaaugccauuaacgggauuacaaacaaggugaauucugugauugagaaaaugaacacucaauucacagcugugggcaaagaauucaacaaauuggaaagaagaauggaaaacuuaaauaaaaaaguugaugauggguuucuagacauuuggacguauaacgcagaauuguugguucuacuggaaaaugaaaggacuuuggacuuccaugacuccaacgugaagaaucuguaugagaaaguaaaaagccaauuaaagaauaaugccaaagaaauaggaaacggguguuuugaauucuaucacaaguguaacgaugaaugcauggagagugugaaaaauggaacuuaugacuauccaaaauauuccgaagaaucaaaguuaaacagggagaaaauugauggagugaaauuggaaucaaugggagucuaucagauucuggcgaucuacucaacagucgccaguucccugguucuuuuggucucccugggggcaaucagcuucuggauguguuccaaugggucuuugcaguguagaauaugcaucuaa

SEQ ID NO: 33969 - RNA, 1698 nt, Artificial Sequence
  derived and/or modified CDS sequence (wt) from hemagglutinin__InfluenzaA__ABV30305
augaaaguaaaacuacugguucuguuauguacauuuacagcuacauaugcagacacaauauguauaggcuaccaugccaacaacucgaccgacacuguugacacaguacuugagaagaaugugacagugacacacucugucaaccuacuugaggacagucacaauggaaaacuaugucuacuaaaaggaauagccccacuacaauuggguaauugcagcguugccggauggaucuuaggaaacccagaaugcgaauuacugauuuccaaggaaucaugguccuacauuguagagacaccaaauccugagaauggaacauguuacccaggguauuucgccgacuaugaggagcugagagagcaauugaguucaguaucuucauuugagagguucgaaauauuccccaaagagagcucauggcccaaccacaccguaaccggaggaucagcaucaugcucccauaacgggaaaagcaguuuuuacagaaauuugcuauggcugacggggaagaaugguuuguauccaaaccugagcaaguccuaugcaaacaacaaagagaaagaaguccuuguacugugggguguucaucacccgccuaacauaggggaccaaagggcccucuaucauacagaaaaugcuuaugucucuguagugucuucacauuauagcagaagauucaccccagaaauagccaaaagacccaaggugagagaucaggaaggaagaaucaacuacuacuggacucugcuugaacccggggauacaauaauauuugaggcaaauggaaaucuaauagcgccaagguuugcuuucgcacugaguagaggcuuuggaucaggaaucaucaccucaaaugcaccaauggaugaaugugaugcgaaaugucaaacaccucagggagcuauaaacagcagucuuccuuuccagaauguacacccagucacaauaggagaguguccaaaguaugucaggaguacaaaauuaagaaugguuacaggacuaaggaacaucccauccauucaauccagagguuuguuuggagccauugccgguuucauugaagggggguggacuggaaugguagauggaugguaugguuaccaccaucagaaugagcaaggaucuggguaugcugcugaucaaaaaagcacacaaaaugccauuaacgggauuacaaacaaggugaauucuguaauugagaaaaugaacacucaauucacagcugugggcaaagaauucaacaaauuggaaagaaggauggaaaacuuaaauaaaaaaguugaugauggguuucuagacauuuggacauauaacgcagaauuguugguucuacuggaaaaugaaaggacuuuggacuuccaugacuccaacgugaagaaucuguaugagaaaguaaaaagccaauuaaagaauaaugccaaagaaauaggaaacggguguuuugaauucuaucacaaguguaacaaugaaugcauggagagugugaaaaauggaacuuaugacuauccaaaauauuccgaagaaucaaaguugaacagggagaaaauugauggagugaaauuggaaucaaugggagucuaucagauuuuggcgaucuacucaacagucgccaguucccugguucuuuuggucucccugggggcaaucagcuucuggauguguuccaaugggucuuugcaguguagaauaugcaucuaa

SEQ ID NO: 33970 - RNA, 1698 nt, Artificial Sequence; identical to SEQ ID NO: 33938
  derived and/or modified CDS sequence (wt) from hemagglutinin__InfluenzaA__ABV30316

SEQ ID NO: 33971 - RNA, 1698 nt, Artificial Sequence
  derived and/or modified CDS sequence (wt) from hemagglutinin__InfluenzaA__ABV30327
augaaagugaaacuacugguucuguuauguacauuuacagcuacauaugcagacacaauauguauaggcuaccaugccaacaacucgaccgacacuguugacacaguacuugagaagaaugugacagugacacacucugucaaccuacuugaggaccgucacaauggaaaacuaugucuacuaaaaggaauagccccacuacaauuggguaauugcagcguugccggauggaucuuaggaaacccagaaugcgaauuacugauuuccaaggaaucaugguccuacauuguagaaacaccaaauccugagaauggaacauguuacccaggguauuucgccgacuaugaggagcugagggagcaauugaguucaguaucuucauuugagagguucgaaauauuccccaaagagagcucauggcccaaucacaccguaaccggaguaucagcaucaugcucccauaacgggaaaagcaguuuuuacagaaauuugcuauggcugacgggaaagaaugguuuguacccaaaccugagcagauccuaugcaaacaacaaagagaaagaaguccuuguacugugggguguucaucacccgccuaacauaggggaccaaagggcccucuaucauacagaaaaugcuuaugucucuguagugucuucacauuauagcagaagauucaccccagaaauagccaaaagacccaaggugagagaucaggaaggaagaaucaauuacuacuggacucuacuggaacccggggauacaauaauauuugaggcaaaugggaaucuaauagcgccaagguuugcuuucgcacugaguagaggcuuuggaucaggaaucaucaccucaaaugcaccaauggaugaaugugaugcgaagugucaaacaccucagggagcuauaaacagcagucuuccuuuccagaauguacacccagucacaauaggagaguguccaaaguaugucaggagugcaaaauuaagaaugguuacaggacuaaggaacaucccauccauucaauccagagguuuguuuggagccauugccgguuucauugaagggggguggacuggaaugguagaugguugguaugguuaucaccaccagaaugagcaaggaucuggguaugcugcagaucaaaaaagcacacaaaaugccauuaacgggauuacaaacaaggugaauucugugauugagaaaaugaacacucaauucacagcugugggcaaagaauucaacaaauuggaaagaagaauggaaaacuuaaauaaaaaaguugaugauggguuucuagacauuuggacguauaacgcagaauuguugguucuacuggaaaaugaaaggacuuuggacuuccaugacuccaacgugaagaaucuguaugagaaaguaaaaagccaauuaaagaauaaugccaaagaaauaggaaacggguguuuugaauucuaucacaaguguaacgaugaaugcauggagagugugaaaaauggaacuuaugacuauccaaaauauuccgaagaaucaaaguuaaacagggagaaaauugauggagugaaauuggaaucaaugggagucuaucagauucuggcgaucuacucaacagucgccaguucccugguucuuuuggucucccugggggcaaucagcuucuggauguguuccaaugggucuuugcaguguagaauaugcaucuaa

SEQ ID NO: 33972 - RNA, 1698 nt, Artificial Sequence
  derived and/or modified CDS sequence (wt) from hemagglutinin__InfluenzaA__ABV30338
augaaaguaaaacuacugauucuguuauguacauuuacagcuacauaugcagacacaauauguauaggcuaccaugccaacaacucgaccgacacuguugacacaguacuugagaagaaugugacagugacacacucugucaaccuacuugaggacagucacaauggaaaacuaugucuacuaaaaggaauagccccacuacaauuggguaauugcagcguugccggauggaucuuaggaaacccagaaugcgaauuacugauuuccaaggaaucaugguccuacauuguagagacaccaaauccugagaauggaacauguuacccaggguauuucgccgacuaugaggagcugagagagcaauugaguucaguaucuucauuugagagguucgaaauauuccccaaagagagcucauggcccaaccacaccguaaccggaguaucagcaucaugcucccauaacgggaaaagcaguuuuuacagaaauuugcuauggcugacggggaagaaugguuuguauccaaacuugagcaaguccuaugcaaacaacaaagagaaagaaguccuuguacugugggguguucaucacccgccuaacauaggggaccaaagggcccucuaucauacagaaaaugcuuaugucucuguagugucuucacauuauagcagaagauucaccccagaaauagccaaaagacccaaggugagagaucaggaaggaagaaucaacuacuacuggacucugcuugaacccggggauacaauaauauuugaggcaaauggaaaucuaauagcgccaagguuugcuuucgcacugaguagaggcuuuggaucaggaaucaucaccucaaaugcaccaauggaugaaugugaugcgaaaugucaaacaccucagggagcuauaaacagcagucuuccuuuccagaauguacacccagucacaauaggagaguguccaaaguaugucaggaguacaaaauuaagaaugguuacaggacuaaggaacaucccauccauucaauccagagguuuauuuggagccauugccgguuucauugaagggggguggacuggaaugguagaugguugguaugguuaucaccaucagaaugagcaaggaucuggguaugcugcagaucaaaaaagcacacaaaaugccauuaacgggauuacaaacaaggugaauucuguaauugagaaaaugaacacucaauucacagcugugggcaaagaauucaacaaauuggaaagaaggauggaaaacuuaaauaaaaaaguugaugauggguuucuagacauuuggacauauaacgcagaauuguugguucuacuggaaaaugaaaggacuuuggacuuccaugacuccaacgugaagaaucuguaugagaaaguaaaaagccaauuaaagaauaaugccaaagaaauaggaaacggguguuuugaauucuaucacaaguguaacgaugaaugcauggagagugugaaaaauggaacuuaugacuauccaaaauauuccgaagaaucaaaguugaacagggagaaaauugauggagugaaauuggaaucaaugggagucuaucagauuuuggcgaucuacucaacagucgccaguucccugguucuuuuggucucccugggggcaaucagcuucuggauguguuccaaugggucuuugcaguguagaauaugcaucuaa

SEQ ID NO: 33973 - RNA, 1698 nt, Artificial Sequence
  derived and/or modified CDS sequence (wt) from hemagglutinin__InfluenzaA__ABV30349
augaaaguaaaacuacugguucuguuauguacauuuacagcuacauaugcagacacaauauguauaggcuaccaugccaacaacucgaccgacacuguugacacaguacuugagaagaaugugacagugacacacucugucaaccuacuugaggacagucacaauggaaaacuaugucuacuaaaaggaauagccccacuacaauuggguaauugcagcguugccggauggaucuuaggaaacccagaaugcgaauuacugauuuccaaggaaucaugguccuacauuguagagacaccaaauccugagaauggaacauguuacccaggguauuucgccgacuaugaggagcugagagagcaauugaguucaguaucuucauuugagagguucgaaauauuccccaaagagagcucauggcccaaccacaccguaaccggaguaucagcaucaugcucccauaacgggaaaagcaguuuuuacagaaauuugcuauggcugacggggaagaaugguuuguauccaaaccugagcaaguccuaugcaaacaacaaagagaaagaaguccuuguacugugggguguucaucacccgccuaacauaggggaccaaagggcccucuaucauacagaaaaugcuuaugucucuguagugucuucacauuauagcagaagauucaccccagaaauagccaaaagacccaaggugagagaucaggaaggaagaaucaacuacuacuggacucugcuugaacccggggauacaauaauauuugaggcaaauggaaaucuaauagcgccaagguuugcuuucgcacugaguagaggcuuuggaucaggaaucaucaccucaaaugcaccaauggaugaaugugaugcgaaaugucaaacaccucagggagcuauaaacagcagucuuccuuuccagaauguacacccagucacaauaggagaguguccaaaguaugucaggaguacaaaauuaagaaugguuacaggacuaaggaacaucccauccauucaauccagagguuuguuuggagccauugccgguuucauugaagggggguggacuggaaugguagaugguugguaugguuaucaccaucagaaugagcaaggaucuggguaugcugcugaucaaaaaagcacacaaaaugccauuaacgggauuacaaacaaggugaauucuguaauugagaaaaugaacacucaauucacagcugugggcaaagaauucaacaaauuggaaagaaggauggaaaacuuaaauaaaaaaguugaugauggguuucuagacauuuggacauauaacgcagaauuguugguucuacuggaaaaugaaaggacuuuggacuuccaugacuccaacgugaagaaucuguaugagaaaguaaaaagccaauuaaagaauaaugccaaagaaauaggaaacggguguuuugaauucuaucacaaguguaacgaugaaugcauggagagugugaaaaauggaacuuaugacuauccaaaauauuccgaagaaucaaaguugaacagggagaaaauugauggagugaaauuggaaucaaugggagucuaucagauuuuggcgaucuacucaacagucgccaguucccugguucuuuuggucucccugggggcaaucagcuucuggauguguuccaaugggucuuugcaguguagaauaugcaucuaa

SEQ ID NO: 33974 - RNA, 1698 nt, Artificial Sequence
  derived and/or modified CDS sequence (wt) from hemagglutinin__InfluenzaA__ABV30360
augaaaguaaaacuacugguucuguuauguacauuuacagcuacauaugcagacacaauauguauaggcuaccaugccaacaacucgaccgacacuguugacacaguacuugagaagaaugugacagugacacacucugucaaccuacuugaggacagucacaauggaaaacuaugucuacuaaaaggaauagccccacuacaauuggguaauugcagcguugccggauggaucuuaggaaacccagaaugcgaauuacugauuuccaaggaaucaugguccuacauuguagagacaccaaauccugagaauggaacauguuacccagggaauuucgccgacuaugaggaguugagagagcaauugaguucaguaucuucauuugagagguucgaaauauuccccaaagagagcucauggcccaaccacaccguaaccggaguaucagcaucaugcucccauaacgggaaaagcaguuuuuacagaaauuugcuauggcugacggggaagaaugguuuguauccaaaccugagcaaguccuaugcaaacaacaaagagaaagaaguccuuguacugugggguguucaucacccgccuaacauaggggaccaaagggcccucuaucauacagaaaaugcuuaugucucuguagugucuucacauuauagcagaagauucaccccagaaauagccaaaagacccaaggugagagaucaggaaggaagaaucaacuacuacuggacucugcuugaacccggggauacaauaauauuugaggcaaauggaaaucuaauagcgccaagguuugcuuucgcacugaguagaggcuuuggaucaggaaucaucaccucaaaugcaccaauggaugaaugugaugcgaaaugucaaacaccucagggagcuauaaacagcagccuuccuuuccagaauguacacccagucacaauaggagaguguccaaaguaugucaggagugcaaaauuaagaaugguuacagggcuaaggaacaucccauccauucaauccagagguuuguuuggagccauugccgguuucauugaagggggguggacuggaaugguagaugguugguaugguuaucaccaucagaaugagcaaggaucuggguaugcugcagaucaaaaaagcacacaaaaugccauugacgggauuacaaacaaggugaauucuguaauugagaaaaugaacacucaauucacagcugugggcaaagaauucaacaaauuggaaagaaggauggaaaacuuaaauaaaaaaguugaugauggguuucuagacauuuggacauauaacgcagaauuguugguucuacuggaaaaugaaaggacuuuggacuuccaugacuccaacgugaagaaucuguaugagaaaguaaaaagccaauuaaagaauaaugccaaagaaauaggaaacggguguuuugaauucuaucacaaauguaacgaugaaugcauggagagugugaaaaauggaacuuaugacuauccaaaauauuccgaagaaucaaaguugaacagggagaaaauugauggaauaaaauuggaaucaaugggagucuaucagauuuuggcgaucuacucaacagucgccaguucccugguucuuuuggucucccugggggcaaucagcuucuggauguguuccaaugggucuuugcaguguagaauaugcaucuaa

SEQ ID NO: 33975 - RNA, 1698 nt, Artificial Sequence; identical to SEQ ID NO: 33926
  derived and/or modified CDS sequence (wt) from hemagglutinin__InfluenzaA__ABV30371

SEQ ID NO: 33976 - RNA, 1701 nt, Artificial Sequence
  derived and/or modified CDS sequence (wt) from hemagglutinin__InfluenzaA__ABV30382
augaagacuaucauugcuuugagcuacauucuaugucugguuuucgcucaaaaacuucccggaauugacaacagcacggcaacgcugugccuugggcaccaugcaguaccaaacggaacgauagugaaaacaaucacgaaugaccaaauugaaguuacuaaugcuacugagcugguucagaguuccucaacagguggaauaugcgacaguccucaucagauccuugauggagaaaacugcacacuaauagaugcucuauugggagacccucagugugauggcuuccaaaauaagaaaugggaccuuuuuguugaacgcagcaaagccuacagcaacuguuacccuuaugaugugccggauuaugccucccuuaggucacuaguugccucauccggcacacuggaguuuaacaaugaaagcuucaauuggacuggagucacucaaaauggaacaagcucugcuugcaaaaggggaucuaauaacaguuucuuuaguagauugaauugguugacccacucaaaauucaaauacccagcauugaacgugacuaugccaaacaaugaagaauuugacaaauuguacauuugggggguucaccacccggguacggacaaugaccaaaucuuccuguaugcucaagcaucaggaagaaucacagucucuaccaaaagaagccaacaaacuguaaucccgaauaucggaucuagacccagaguaaggaauauccccagcagaauaagcaucuauuggacaauaguaaaaccgggagacauacuuuugauuaacagcacagggaaucuaauugcuccuagggguuacuucaaaauacgaagugggaaaagcucaauaaugagaucagaugcacccauuggcaaaugcaauucugaaugcaucacuccaaauggaagcauucccaaugacaaaccauuucaaaauguaaacaggaucacauacggggccugucccagauauguuaagcaaaacacucugaaauuggcaacagggaugcgaaauguaccagagaaacaaacuagaggcauauuuggcgcaaucgcggguuucauagaaaaugguugggagggaaugguggaugguugguacgguuucaggcaucaaaauucugagggaauaggacaagcagcagaucucaaaagcacucaagcagcaaucgaucaaaucaaugggaagcugaauagauugaucgggaaaaccaacgagaaauuccaccagauugaaaaagaauucucagaaguagaagggagaauucaggaccucgagaaauauguugaggacacuaaaauagaucucuggucauacaacgcggagcuucuuguugcccuggagaaccaacauacaauugaucuaacugacucagaaaugaacaaacuguuugaaaagacaaagaagcaacugagggaaaaugcugaggauaugggcaaugguuguuucaaaauauaccacaaaugugacaaugccugcauaggaucaaucagaaauggaacuuaugaccaugauguauacagagaugaagcauuaaacaaucgguuucagaucaagggcguugagcugaagucaggauacaaagauuggauccuauggauuuccuuugccauaucauguuuuuugcuuuguguugcuuuguugggguucaucaugugggccugccaaaaaggcaacauuaggugcaacauuugcauuuga

SEQ ID NO: 33977 - RNA, 1701 nt, Artificial Sequence
  derived and/or modified CDS sequence (wt) from hemagglutinin__InfluenzaA__ABV30393
augaagacuaucauugcuuugagcuacauucuaugucugguuuucgcucaaaaacuucccggaaaugacaacagcacggcaacgcugugccuugggcaccaugcaguaccaaacggaacgauagugaaaacaaucacgaaugaccaaauugaaguuacuaaugcuacugagcugguucagaguuccucaacagguggaauaugcgacaguccccaucagauccuugauggagaaaacugcacucuaauagaugcucuauugggagacccucagugugauggcuuccaaaauaagaaaugggaccuuuuuguugaacgcagcaaagccuacagcaacuguuacccuuaugaugugccggauuaugccucccuuaggucacuaguugccucauccggcacacuggaguuuaacaaugaaagcuucaauuggacuggagucacucaaaauggaacaagcucugcuugcaaaaggagaucuaauaacaguuucuuuaguagauugaauugguugacccacuuaaaauucaaauacccagcauugaacgugacuaugccaaacaaugaaaaauuugacaaauuguacauuugggggguucaccacccggguacggacaaugaccaaaucuuccuguaugcucaagcaucaggaagaaucacagucucuaccaaaagaagccaacaaacuguaaucccgaauaucggaucuagacccaggguaaggaauauccccagcagaauaagcaucuauuggacaauaguaaaaccgggagacauacuuuugauuaacagcacagggaaucuaauugcuccuagggguuacuucaaaauacgaagugggaaaagcucaauaaugagaucagaugcacccauuggcaaaugcaauucugaaugcaucacuccaaauggaagcauucccaaugacaaaccauuucaaaauguaaacaggaucacauauggggccugucccagauauguuaagcaaaacacucugaaauuggcaacagggaugcgaaauguaccagagaaacaaacuagaggcauauuuggcgcaaucgcggguuucauagaaaaugguugggagggaaugguggaugguugguacgguuucaggcaucaaaauucugagggaauaggacaagcagcagaucucaaaagcacucaagcagcaaucaaucaaaucaaugggaagcugaauagguugaucgggaaaaccaacgagaaauuccaucagauugaaaaggaauucucagaaguagaagggagaauucaggaccucgagaaauauguugaggacacuaaaauagaucucuggucauacaacgcggagcuucuuguugcccuggagaaccaacauacaauugaucuaacugacucagaaaugaacaaacuguuugaaagaacaaagaagcaacugagggaaaaugcugaggauaugggcaaugguuguuucaaaauauaccacaaaugugacaaugccugcauaggaucaaucagaaauggaacuuaugaccaugauguauacagagaugaagcauuaaacaaccgguuccagaucaaaggcguugagcugaagucaggauacaaagauuggauccuauggauuuccuuugccauaucauguuuuuugcuuuguguugcuuuguugggguucaucaugugggccugccaaaaaggcaacauuaggugcaacauuugcauuuga

SEQ ID NO: 33978 - RNA, 1701 nt, Artificial Sequence
  derived and/or modified CDS sequence (wt) from hemagglutinin__InfluenzaA__ABV30404
augaagacuaucauugcuuugagcuacauucuaugucugguuuucgcucaaaaacuuccuggaaaugacaacagcacggcaacgcugugccuugggcaccaugcaguaccaaacggaacgauagugaaaacaaucacgaaugaccaaauugaaguuacuaaugcuacugagcugguucagaguuccucaacaggugaaauaugcgacaguccucaucagauccuugauggagaaaacugcacacuaauagaugcucuauugggagacccucagugugauggcuuccaaaauaagaaaugggaccuuuuuguugaacgcagcaaagccuacagcaaauguuacccuuaugaugugccggauuaugccucccuuaggucacuaguugccucauccggcacacuggaguuuaacaaugaaagcuucaauuggacuggagucacucaaaacggaacaagcucugcuugcauaaggagaucuaauaacaguuucuuuaguagauugaauugguugacccacuuaaaauucaaauauccagcauugaacgugacuaugccaaacaaugaaaaauuugacaaauuguacauuugggggguucaccacccggguacggacaaugaccaaaucuuccuguaugcucaagcaucaggaagaaucacagucucuaccaaaagaagccaacaaacuguaaucccgaauaucggaucuagacccagaguaaggaauauccccagcagaauaagcaucuauuggacaauaguaaaaccgggagacauacuuuugauuaacagcacagggaaucuaauugcuccuagggguuacuucaaaauacgaagugggaaaagcucaauaaugagaucagaugcacccauuggcaaaugcaauucugaaugcaucacuccaaauggaagcauucccaaugacaaaccauuccaaaauguaaacaggaucacauacggggccugucccagauauguuaagcaaaacacucugaaauuggcaacagggaugcgaaauguaccagagaaacaaacuagaggcauauuuggcgcaaucgcggguuucauagaaaaugguugggagggaaugguggaugguugguacgguuucaggcaucaaaauucugagggaauaggacaagcagcagaucucaaaagcacucaagcagcaaucgaucaaaucaaugggaagcugaauagguugaucgggaaaaccaacgagaaauuccaucagauugaaaaagaauucucagaagucgaagggagaauucaggaccuugagaaauauguugaggacaccaaaauagaucucuggucauacaacgcggaucuucuuguugcccuggagaaccaacauacaauugaucuaacugacucagaaaugaacaaacuguuugaaaaaacaaagaagcaacugagggaaaaugcugaggauaugggcaaugguuguuucaaaauauaccacaaaugugacaaugccugcauaggaucaaucagaaauggaacuuaugaccacgauguauacagagaugaagcauuaaacaaccgguuccagaucaagggcguugagcugaagucaggauacaaagauuggauccuauggauuuccuuugccauaucauguuuuuugcuuuguguugcuuuguugggguucaucaugugggccugccaaaaaggcaacauuaggugcaacauuugcauuuga

SEQ ID NO: 33979 - RNA, 1701 nt, Artificial Sequence
  derived and/or modified CDS sequence (wt) from hemagglutinin__InfluenzaA__ABV30415
augaagacuaucauugcuuugagcuacauucuaugucugguuuucgcucaaaaacuucccggaauugacaacagcacggcaacgcugugccuugggcaccaugcaguaccaaacggaacgauagugaaaacaaucacgaaugaccaaauugaaguuacuaaugcuacugagcugguucagaguuccucaacagguggaauaugcgacaguccucaucagauccuugauggagaaaacugcacacuaauagaugcucuauugggagacccucagugugauggcuuccaaaauaagaaaugggaccuuuuuguugaacgcagcaaagccuacagcaacuguuacccuuaugaugugccggauuaugccucccuuaggucacuaguugccucauccggcacacuggaguuuaacaaugaaagcuucaauugggcuggagucacucaaaauggaacaagcucugcuugcaaaaggggaucuaauaacaguuucuuuaguagauugaauugguugacccacucaaaauucaaauacccagcauugaacgugacuaugccaaacaaugaagaauuugacaaauuguacauuuggggaguucaccacccggguacggacaaugaccaaaucuuccuguaugcucaagcaucaggaagaaucacagucucuaccaaaagaagccaacaaacuguaaucccgaauaucggaucuagacccagaguaaggaauauccccagcagaauaagcaucuauuggacaauaguaaaaccgggagacauacuuuugauuaacagcacagggaaucuaauugcuccuagggguuacuucaaaauacgaagugggaaaagcucaauaaugagaucagaugcacccauuggcaaaugcaauucugaaugcaucacuccaaauggaagcauucccaaugacaaaccauuucaaaauguaaacaggaucacauacggggccugucccagauauguuaagcaaaacacucugaaauuggcaacagggaugcgaaauguaccagagaaacaaacuagaggcauauuuggugcaaucgcggguuucauagaaaaugguugggagggaaugguggaugguugguacgguuucaggcaucaaaauucugagggaauaggacaagcagcagaucucaaaagcacucaagcagcaaucgaucaaaucaaugggaagcugaauagguugaucgggaaaaccaacgagaaauuccaccaaauugaaaaagaauucucagaaguagaagggagaauucaggaccucgagaaauauguugaggacacuaaaauagaucucuggucauacaacgcggagcuucuuguugcccuggagaaccaacauacaauugaucuaacugacucagaaaugaacaaacuguuugaaaagacaaagaagcaacugagggaaaaugcugaggauaugggcaaugguuguuucaaaauauaccacaaaugugacaaugccugcauaggaucaaucagaaauggaacuuaugaccaugauguauacagagaugaagcauuaaacaaccgguuucagaucaagagcguugagcugaagucaggauacaaagauuggauccuauggauuuccuuugccauaucauguuuuuugcuuuguguugcuuuguugggguucaucaugugggccugccaaaaaggcaacauuaggugcaacauuugcauuuga

SEQ ID NO: 33980 - RNA, 1701 nt, Artificial Sequence
  derived and/or modified CDS sequence (wt) from hemagglutinin__InfluenzaA__ABV30426
augaagacuaucauugcuuugagcuacauucuaugucugguuuucgcccaaaaacuucccggaaaugacaacagcacggcaacgcugugccuugggcaccaugcaguaccaaacggaacgauagugaaaacaaucacgaaugaccaaauugaaguuacuaaugcuacugagcugguucagaguuccucaacaggugaaauaugcgacaguccucaucagauccuugauggagaaaacugcacacuaauagaugcucuauugggagacccucagugugauggcuuccaaaauaagaaaugggaccuuuuuguugaacgcagcaaagccuacagcaacuguuacccuuaugaugugccggauuaugccucccuuaggucacuaguugccucauccggcacacuggaguuuaacaaugaaagcuucaauuggacuggagucacucaaaacggaacaagcucugcuugcauaaggagaucuaauaacaguuucuuuaguagauugaauugguugacccacuuaaaauucaaauacccagcauugaacgugacuaugccaaacaaugaaaaauuugacaaauuguacauuugggggguucaccacccggguacggacaaugaccaaaucuuccuguaugcucaagcaucaggaagaaucacagucucuaccaaaagaagccaacaaacuguaaucccgaauaucggaucuagacccagaguaaggaauauccccagcagaauaagcauuuauuggacaauaguaaaaccgggagacauacuuuugauuaacagcacagggaaucuaauugcuccuagggguuacuucaaaauacgaagugggaaaagcucaauaaugagaucagaugcacccauuggcaaaugcaauucugaaugcauaacuccaaauggaagcauucccaaugacaaaccauuccaaaauguaaacaggaucacauacggggccugucccagauauguuaagcaaaacacucugaaauuggcaacagggaugcgaaauguaccagagaaacaaacuagaggcauauuuggcgcaaucgcggguuucauagaaaaugguugggagggaaugguggaugguugguacgguuucaggcaucaaaauucugagggaauaggacaagcagcagaucucaaaagcacucaagcagcaaucgaucaaaucaaugggaagcugaauagguugaucgggaaaaccaacgagaaauuccaucagauugaaaaagaauucucagaagucgaagggagaauucaggaccuugagaaauauguugaggacaccaaaauagaucucuggucauacaacgcggagcuucuuguugcccuggagaaccaacauacaauugaucuaacugacucagaaaugaacaaacuguuugaaaaaacaaagaagcaacugagggaaaaugcugaggauaugggcaaugguuguuucaaaauauaccacaaaugugacaaugccugcauaggaucaaucagaaauggaacuuaugaccacgauguauacagagaugaagcauuaaacaaccgguuccagaucaagggcguugagcugaagucaggauacaaagauuggauccuauggauuuccuuugccauaucauguuuuuugcuuuguguugcuuuguugggguucaucaugugggccugccaaaaaggcaacauuaggugcaacauuugcauuuga

SEQ ID NO: 33981 - RNA, 1701 nt, Artificial Sequence
  derived and/or modified CDS sequence (wt) from hemagglutinin__InfluenzaA__ABV30437
augaagacuaucauugcuuugagcuacauucuaugucugguuuucgcccaaaaacuucccggaaaugacaacagcacggcaacgcugugccuugggcaccaugcaguaccaaacggaacgauagugaaaacaaucacgaaugaccaaauugaaguuacuaaugcuacugagcugguucagaguuccucaacaggugaaauaugcgacaguccucaucagauccuugauggagaaaacugcacacuaauagaugcucuauugggagacccucagugugauggcuuccaaaauaagaaaugggaccuuuuuguugaacgcagcaaagccuacagcaacuguuacccuuaugaugugccggauuaugccucccuuaggucacuaguugccucauccggcacacuggaguuuaacaaugaaagcuucaauuggacuggagucacucaaaacggaacaagcucugcuugcauaaggagaucuaaucacaguuucuuuaguagauugaauugguugacccacuuaaaauucaaauacccagcauugaacgugacuaugccaaacaaugaaaaauuugacaaauuguacauuugggggguucaccacccggguacggacaaugaccaaaucuuccuguaugcucaagcaucaggaagaaucacagucucuaccaaaagaagccaacaaacuguaaucccgaauaucggaucuagacccagaguaaggaauauccccagcagaauaagcauuuauuggacaauaguaaaaccgggagacauacuuuugauuaacagcacagggaaucuaauugcuccuagggguuacuucaaaauacgaagugggaaaagcucaauaaugagaucagaugcacccauuggcaaaugcaauucugaaugcauaacuccaaauggaagcauucccaaugacaaaccauuccaaaauguaaacaggaucacauacggggccugucccagauauguuaagcaaaacacucugaaauuggcaacagggaugcgaaauguaccagagaaacaaacuagaggcauauuuggcgcaaucgcggguuucauagaaaaugguugggagggaaugguggaugguugguacgguuucaggcaucaaaauucugagggaauaggacaagcagcagaucucaaaagcacucaagcagcaaucgaucaaaucaaugggaagcugaauagguugaucgggaaaaccaacgagaaauuccaucagauugaaaaagaauucucagaagucgaagggagaauucaggaccuugagaaauauguugaggacaccaaaauagaucucuggucauacaacgcggagcuucuuguugcccuggagaaccaacauacaauugaucuaacugacucagaaaugaacaaacuguuugaaaaaacaaagaagcaacugagggaaaaugcugaggauaugggcaaugguuguuucaaaauauaccacaaaugugacaaugccugcauaggaucaaucagaaauggaacuuaugaccacgauguauacagagaugaagcauuaaacaaccgguuccagaucaagggcguugagcugaagucaggauacaaagauuggauccuauggauuuccuuugccauaucauguuuuuugcuuuguguugcuuuguugggguucaucaugugggccugccaaaaaggcaacauuaggugcaacauuugcauuuga

SEQ ID NO: 33982 - RNA, 1701 nt, Artificial Sequence; identical to SEQ ID NO: 33980
  derived and/or modified CDS sequence (wt) from hemagglutinin__InfluenzaA__ABV30448

SEQ ID NO: 33983 - RNA, 1698 nt, Artificial Sequence
  derived and/or modified CDS sequence (wt) from hemagglutinin__InfluenzaA__ABV30459
augaaaguaaaacuacugauucuguuauguacauuuacagcuacauaugcagacacaauauguauaggcuaccaugccaacaacucgaccgacacuguugacacaguacuugagaagaaugugacagugacacacucugucaaccuacuugaggacagucacaauggaaaacuaugucuacuaaaaggaauagccccacuacaauuggguaauugcagcguugccggauggaucuuaggaaacccagaaugugaauuacugauuuccaaggaaucaugguccuacauuguagaggcaccaaauccugagaauggaacauguuacccaggguauuucgccgacuaugaggagcugagagagcaauugaguucaguaucuucauuugagagguucgaaauauuccccaaagagagcucauggcccaaccacaccguaaccggaguaucagcaucaugcucccauaacgggaaaagcaguuuuuacagaaauuugcuguggcugacggggaagaaugguuuguauccaaaccugagcaaguccuaugcaaacaacaaagagaaagaaguccuuguacugugggguguucaucacccgccuaacauaggggaccaaagggcccucuaucauacagaaaaugcuuaugucucuguagugucuucacauuauagcagaagauucaccccagaaauagccaaaagacccaaggugagagaucaggaaggaagaaucaacuacuacuggacucugcuugaacccggggauacaauaauauuugaggcaaauggaaaucuaauagcgccaagguuugcuuucgcacugaguagaggcuuuggaucaggaaucaucaccucaaaugcaccaauggaugaaugugaugcgaaaugucaaacaccucagggagcuauaaacagcagucuuccuuuccagaauguacacccagucacaauaggagaguguccaaaguaugucaggaguacaaaauuaagaaugguuacaggacuaaggaacaucccauccauucaauccagagguuuauuuggagccauugccgguuucauugaagggggguggacuggaaugguagaugguugguaugguuaucaccaucagaaugagcaaggaucuggguaugcugcagaucaaaaaagcacacaaaaugccauuaacgggauuacaaacaaggugaauucuguaauugagaaaaugaacacucaauucacagcugugggcaaagaauucaacaaauuggaaagaaggauggaaaacuuaaauaaaaaaguugaugauggguuucuagacauuuggacauauaacgcagaauuguugguucuacuggaaaaugaaaggacuuuggacuuccaugacuccaacgugaagaaucuguaugagaaaguaaaaagccaauuaaagaauaaugccaaagaaauaggaaacggguguuuugaauucuaucacaaguguaacgaugaaugcauggagagugugaaaaauggaacuuaugacuauccaaaauauuccgaagaaucaaaguugaacagggagaaaauugauggagugaaauuggaaucaaugggagucuaucagauuuuggcgaucuacucaacagucgccaguucccugguucuuuuggucucccugggggcaaucagcuucuggauguguuccaaugggucuuugcaguguagaauaugcaucuaa

SEQ ID NO: 33984 - RNA, 1701 nt, Artificial Sequence; identical to SEQ ID NO: 33980
  derived and/or modified CDS sequence (wt) from hemagglutinin__InfluenzaA__ABV30470

SEQ ID NO: 33985 - RNA, 1698 nt, Artificial Sequence; identical to SEQ ID NO: 33938
  derived and/or modified CDS sequence (wt) from hemagglutinin__InfluenzaA__ABV30492

SEQ ID NO: 33986 - RNA, 1698 nt, Artificial Sequence
  derived and/or modified CDS sequence (wt) from hemagglutinin__InfluenzaA__ABV30503
augaaaguaaaacuacugauucuguuauguacauuuacagcuacauaugcagacacaauauguauaggcuaccaugccaacaacucgaccgacacuguugacacaguacuugagaagaaugugacagugacacacucugucaaccuacuugaggacagucacaauggaaaacuaugucuacuaaaaggaauagccccacuacaauuggguaauugcagcguugccggauggaucuuaggaaacccagaaugcgaauugcugauuuccaaggaaucaugguccuacauuguagagacaccaaauccugagaauggaacauguuacccaggguauuucgccgacuaugaggagcugagagagcaauugaguucaguaucuucauuugagagguucgaaauauuccccaaagagagcucauggcccaaccacaccauaaccggaguaucagcaucaugcucccauaacgggaaaagcaguuuuuacagaaauuugcuauggcugacggggaagaaugguuuguauccaaaccugagcaaguccuaugcaaacaacaaagagaaagaaguccuuguacugugggguguucaucacccgccuaacauaggggaccaaagggcccucuaucauacagaaaaugcuuaugucucuguagugucuucacauuauagcagaagauucaccccagaaauagccaaaagacccaaggugagagaucaggaaggaagaaucaacuacuacuggacucugcuugaacccggggauacaauaauauuugaggcaaauggaaaucuaauagcaccaagguuugcuuucgcacugaguagaggcuuuggaucaggaaucaucaccucaaaugcaccaauggaugaaugugaugcgaaaugucaaacaccucagggagcuauaaacagcagucuuccuuuccagaauguacacccagucacaauaggagaguguccaaaguaugucaggaguacaaaauuaagaaugguuacaggacuaaggaacaucccauccauucaauccagagguuuauuuggagccauugccgguuucauugaagggggguggacuggaaugguagaugguugguaugguuaucaccaucagaaugagcaaggaucuggguaugcugcagaucaaaaaagcacccaaaaugccauuaacgggauuacaaacaaggugaauucuguaauugagaaaaugaacacucaauucacagcugugggcaaagaauucaacaaauuggaaagaaggauggaaaacuuaaauaaaaaaguugaugauggguuucuagacauuuggacauauaacgcagaauuguugguucuacuggaaaaugaaaggacuuuggacuuccaugacuccaacgugaagaaucuguaugagaaaguaaaaagccaauuaaagaauaaugccaaagaaauaggaaacggguguuuugaauucuaucacaaguguaacgaugaaugcauggagagugugaaaaauggaacuuaugacuauccaaaauauuccgaagaaucaaaguugaacagggagaaaauugauggagugaaauuggaaucaaugggagucuaucagauuuuggcgaucuacucaacagucgccaguucccugguucuuuuggucucccugggggcaaucagcuucuggauguguuccaaugggucuuugcaguguagaauaugcaucuaa

SEQ ID NO: 33987 - RNA, 1701 nt, Artificial Sequence; identical to SEQ ID NO: 33953
  derived and/or modified CDS sequence (wt) from hemagglutinin__InfluenzaA__ABV30514

SEQ ID NO: 33988 - RNA, 1698 nt, Artificial Sequence
  derived and/or modified CDS sequence (wt) from hemagglutinin__InfluenzaA__ABV30525
augaaaguaaaacuacuuguucuguuauguacauuuacagcuacauaugcagacacaauauguauaggcuaccaugccaacaacucgaccgacacuguugacacaguacuugagaagaaugugacagugacacacucugucaaccuacuugaggacagucacaauggaaaacuaugucuacuaaaaggaauagccccacuacaauuggguaauugcagcguugccggauggaucuuaggaaacccagaaugcgaauuacugauuuccaaggaaucaugguccuacauuguagaaacaccaaauccugagaauggaacauguuacccaggguauuucgccgacuaugaggagcugagggagcaauugaguucaguaucuucauuugagagguucgaaauauuccccaaagagagcucauggcccaaccacaccguaaccggaguaucagcaucaugcucccauagugggaaaagcaguuuuuacagaaauuugcuauggcugacggggaagaaugguuuguauccaaaccugagcaaguccuaugcaaacaacaaagagaaagaaguccuuguacugugggguguucaucacccgccuaacauaggggaccaaagggcccucuaucauacagaaaaugcuuaugucucuguagugucuucacauuauagcagaagauucaccccagaaauagccaaaagacccaaggugagagaucaggaaggaagaaucaacuacuacuggacucugcuggaacccggggauacaauaauauuugaggcaaauggaaaucuaauagcgccaagguuugcuuucgcacugaguagaggcuuuggaucaggaaucaucaccucaaauacaccaaugggugaaugugaugcgaagugucaaacaccucagggagcuauaaacaguagucuuccuuuccagaauguacauccagucacaauaggggaguguccaaaguaugucaggagugcaaaauuaagaaugguuacaggacuaaggaacaucccauccauucaaucccgagguuuguuuggagccauugccgguuucauugaagggggguggacuggaaugguagaugguugguaugguuaucaccaucagaaugagcaaggaucuggguaugcugcagaucaaaaaagcacacaaaaugccauuaacgggauuacaaacaaggugaauucuguaauugagaaaaugaacacucaauucacagcugugggcaaagaauucaacaaauuggaaagaaggauggaaaacuuaaauaaaaagguugaugauggguuucuagacauuuggacauauaacgcagaauuguugguucuacuggaaaaugaaaggacuuuggacuuccaugacuccaacgugaagaaucuguaugagaaaguaaaaagccaauuaaagaauaaugccaaagaaauaggaaacggguguuuugaauucuaucacaaguguaacgaugaaugcauggagagugugaaaaauggaacuuaugacuauccaaaauauuccgaagaaucaaaguugaacagggagaaaauugauggagugaaauuggaaucaaugggagucuaucagauucuggcgaucuacucaacagucgccaguucccugguucuuuuggucucccugggggcaaucagcuucuggauguguuccaaugggucuuugcaguguagaauaugcaucuaa

SEQ ID NO: 33989 - RNA, 1698 nt, Artificial Sequence; identical to SEQ ID NO: 33937
  derived and/or modified CDS sequence (wt) from hemagglutinin__InfluenzaA__ABV30536

SEQ ID NO: 33990 - RNA, 1698 nt, Artificial Sequence
  derived and/or modified CDS sequence (wt) from hemagglutinin__InfluenzaA__ABV30547
augaaaguaaaacuacuuguucuguuauguacauuuacagcuacauaugcagacacaauauguauaggcuaccaugccaacaacucgacugacacuguugacacaguacuugagaagaaugugacagugacacacucugucaaccuacuugaggacagucacaauggaaaacuaugucuacuaaaaggaauagccccacuacaauuggguaauugcagcguugccggauggaucuuagggaacccagaaugcgaauuacugauuuccaaggaaucaugguccuacauuguagaaacaccaaauccugagaauggaacauguuacccaggguauuucgccgacuaugaggagcugagggagcaauugaguucaguaucuucauuugagagguucgaaauauuccccaaagagagcucauggcccaaccacaccguaaccggaguaucagcaucaugcucccauaacggggaaagcaguuuuuacagaaauuuguuauggcugacggggaagaaugguuuguauccaaaccugagcaaguccuaugcaaacaacaaagagaaagaaguccuuguacugugggguguucaucacccgccuaacauaggagaccaaagggcccucuaucauacagaaaaugccuaugucucuguagugucuucacauuauagcagaagauucaccccagaaauagccaaaagacccaaggugagagaucaggaaggaagaaucaacuacuacuggacucugcuggaacccggggauacaauaauauuugaggcaaauggaaaucuaauagcgccaagguuugcuuucgcacugaguagaggcuuuggaucaggaaucaucaccucaaaugcaccaauggauaaaugugaugcgaagugucaaacaccucagggagcuauaaacagcagucuuccuuuccagaauguacacccagucacaauaggagaguguccaaaguaugucaggaguacaaaauuaagaaugguuacaggacuaaggaacaucccauccauucaauccagagguuuguuuggagccauugccgguuucauugaagggggguggacuggaaugguagaugguugguaugguuaucaccaucagaaugagcaaggaucuggguaugcugcagaucaaaaaagcacacaaaaugccauuaacgggauuacaaacaaggugaauucuguaauugagaaaaugaacacucaauucacagcugugggcaaagaauucaacaaauuggaaagaaggauggaaaauuuaaauaaaaagguugaugauggguuucuagacauuuggacauauaacgcagaauuguugguucuacuggaaaaugaaaggacuuuggacuuccaugacuccaacgugaagaaucuguaugagaaaguaaaaagccaauuaaagaauaaugccaaagaaauaggaaacggguguuuugaauucuaucacaaguguaacgaugaaugcauggagagugugaaaaauggaacuuaugacuauccaaaauauuccgaagaaucaaaguugaacagggagaaaauugauggagugaaauuggaaucaaugggagucuaucagauucuggcgaucuacucaacagucgccaguuccuugguucuuuuggucucccugggggcaaucagcuucuggauguguuccaaugggucuuugcaguguagaauaugcaucuaa

SEQ ID NO: 33991 - RNA, 1698 nt, Artificial Sequence
  derived and/or modified CDS sequence (wt) from hemagglutinin__InfluenzaA__ABV30558
augaaaguaaaacuacugguucuguuauguacauuuacagcuacauaugcagacacaauauguauaggcuaccaugccaacaacucgaccgacacuguugacacaguacuugagaagaaugugacagugacacacucugucaaccuacuugaggacagucacaauggaaaacuaugucuacuaaaaggaauagccccacuacaauuggguaauugcagcguugccggauggaucuuaggaaacccagaaugcgaauuacugauuuccaaggaaucaugguccuacauuguagagacaccaaauccugagaauggaacauguuacccaggguauuucgccgacuaugaggagcugagagagcaauugaguucaguaucuucauuugagagguucgaaauauuccccaaagagagcucauggcccaaccacaccguaaccggaguaucagcaucaugcucccauaacgggaaaagcaguuuuuacagaaauuugcuauggcugacggggaagaaugguuuguauccaaaccugagcaaguccuaugcaaacaacaaagagaaagaaguccuuguacugugggguguucaucacccgccuaacauaggggaccaaagggcccucuaucauacagaaaaugcuuaugucucuguagugucuucacauuauagcagaagauucaccccagaaauagccaaaagacccaaggugagagaucaggaaggaagaaucaacuacuacuggacucugcuugaacccggggauacaauaauauuugaggcaaauggaaaucuaauagcgccaagguuugcuuucgcacugaguagaggcuuuggaucaggaaucaucaccucaaaugcaccaauggaugaaugugaugcgaaaugucaaacaccucagggagcuauaaacagcagucuuccuuuccagaauguacacccagucacaauaggagaguguccaaaguaugucaggaguacaaaauuaagaaugguuacaggacuaaggaacaucccauccauucaauccagagguuuguuuggagccauugccgguuucauugaagggggguggacuggaaugguagaugguugguaugguuaucaccaucaaaaugagcaaggaucuggguaugcugcagaucaaaaaagcacacaaaaugccauuaacgggauuacaaacaaggugaauucuguaauugagaaaaugaacacucaauucacagcugugggcaaagaauucaacaaauuggaaagaaggauggaaaacuuaaauaaaaaaguugaugauggguuucuagacauuuggacauauaacgcagaauuguugguucuacuggaaaaugaaaggacuuuggacuuccaugacuccaacgugaagaaucuguaugagaaaguaaaaagccaauuaaagaauaaugccaaagaaauaggaaacggguguuuugaauucuaucacaaguguaacgaugaaugcauggagagugugaaaaauggaacuuaugacuauccaaaauauuccgaagaaucaaaguugaacagggagaaaauugauggagugaaauuggaaucaaugggagucuaucagauuuuggcgaucuacucaacagucgccaguucccugguucuuuuggucucccugggggcaaucagcuucuggauguguuccaaugggucuuugcaguguagaauaugcaucuaa

SEQ ID NO: 33992 - RNA, 1698 nt, Artificial Sequence
  derived and/or modified CDS sequence (wt) from hemagglutinin__InfluenzaA__ABV30569
augaaaguaaaacuacugauucuguuauguacauuuaccgcuacauaugcagacacaauauguauaggcuaccaugccaacaacucgaccgacacuguugacacaguacuugagaagaaugugacagugacacacucugucaaccuacuugaggacaaucacaauggaaaacuaugucuacuaaaaggaauagccccacuacaauuggguaauugcagcguugccggauggaucuuaggaaacccagaaugcgaauugcugauuuccaaggaaucaugguccuacauuguagagacaccaaauccugagaauggaacauguuacccaggguauuucgccgacuaugaggagcugagagagcaauugaguucaguaucuucauuugagagguucgaaauauuccccaaagagagcucauggcccaaccacaccguaaccggaguaucagcaucaugcucccauaacgggaaaagcaguuuuuacagaaauuugcuauggcugacggggaagaaugguuuguauccaaaccugagcaaguccuaugcaaacaacaaagagaaagaaguccuuguacugugggguguucaucacccgccuaacauaggggaccaaagggcccucuaucauacagaaaaugcuuaugucucuguagugucuucacauuauagcagaagauucaccccagaaauagccaaaagacccaaggugagagaucaggaaggaagaaucaacuacuacuggacucugcuugaacccggggauacaauaauauuugaggcaaauggaaaucuaauagcgccaagguuugcuuucgcacugaguagaggcuuuggaucaggaaucaucaccucaaaugcaccaauggaugaaugugaugcgaaaugucaaacaccucagggagcuauaaacagcagucuuccuuuccagaauguacacccagucacaauaggagaguguccaaaguaugucaggaguacaaaauuaagaaugguuacaggacuaaggaacaucccauccauucaaucaagagguuuauuuggagccauugcugguuucauugaagggggguggacuggaaugguagaugguugguaugguuaucaccaucagaaugagcaaggaucuggguaugcugcagaucaaaaaagcacacaaaaugccauuaacgggauuacaaacaaggugaauucuguaauugagaaaaugaacacucaauucacagcugugggcaaagaauucaacaaauuggaaagaaggauggaaaacuuaaauaaaaaaguugaugauggguuucuagacauuuggacauauaacgcagaauuguugguucuacuggaaaaugaaaggacuuuggacuuccaugacuccaacgugaagaaucuguaugagaaaguaaaaagccaauuaaagaauaaugccaaagaaauaggaaacggguguuuugaauucuaucacaaguguaacgaugaaugcauggagagugugaaaaauggaacuuaugacuauccaaaauauuccgaagaaucaaaguugaacagggagaaaauugauggagugaaauuggaaucaaugggagucuaucagauuuuggcgaucuacucaacagucgccaguucccugguucuuuuggucucccugggggcaaucagcuucuggauguguuccaaugggucuuugcaguguagaauaugcaucuaa

SEQ ID NO: 33993 - RNA, 1698 nt, Artificial Sequence; identical to SEQ ID NO: 33937
  derived and/or modified CDS sequence (wt) from hemagglutinin__InfluenzaA__ABV30580

SEQ ID NO: 33994 - RNA, 1698 nt, Artificial Sequence
  derived and/or modified CDS sequence (wt) from hemagglutinin__InfluenzaA__ABV30591
augaaaguaaaacuacugauucuguuauguacauuuacagcuacauaugcagacacaauauguauaggcuaccaugccaacaacucgaccgacacuguugacacaguacuugagaagaaugugacagugacacacucugucaaccuacuugaggacagucacaauggaaaacuaugucuacuaaaaggaauagccccacuacaauuggguaauugcagcguugccggauggaucuuaggaaacccagaaugcgaauuacugauuuccaaggaaucaugguccuacauuguagagacaccaaauccugagaauggaacauguuacccaggguauuucgccgacuaugaggagcugagagagcaauugaguucaguaucuucauuugagagguucgaaauauuccccaaagagagcucauggcccaaccacaccguaaccggaguaucagcaucaugcucccauaacgggaaaagcaguuuuuacagaaauuugcuauggcugacggggaagaaugguuuguauccaaaccugagcaaguccuaugcaaacaacaaagagaaagaaguccuuguacugugggguguucaucacccgccuaacauaggggaccaaagggcccucuaucauacagaaaaugcuuaugucucuguagugucuucacauuauagcagaagauucaccccagaaauagccaaaagacccaaggugagagaucaggaaggaagaaucaacuacuacuggacucugcuugaacccggggauacaauaauauuugaggcaaauggaaaucuaauagcgccaagguuugcuuucgcacugaguagaggcuuuggaucaggaaucaucaccucaaaugcaccaauggaugaaugugaugcgaaaugucaaacaccucagggagcuauaaacagcagucuuccuuuucagaauguacacccagucacaauaggagaguguccaaaguaugucaggaguacaaaauuaagaaugguuacaggacuaaggaacaucccauccauucaauccagagguuuauuuggagccauugccgguuucauugaagggggguggacuggaaugguagaugguugguaugguuaucaccaucagaaugagcaaggaucuggguaugcugcagaucaaaaaagcacacaaaaugccauuaacgggauuacaaacaaggugaauucuguaauugagaaaaugaacacucaauucacagcugugggcaaagaauucaacaaauuggaaagaaggauggaaaacuuaaauaaaaaaguugaugauggguuucuagacauuuggacauauaacgcagaauuguugguucuacuggaaaaugaaaggacuuuggacuuccaugacuccaacgugaagaaucuguaugagaaaguaaaaagccaauuaaagaauaaugccaaagaaauaggaaacggguguuuugaauucuaucacaaguguaacgaugaaugcauggagagugugaaaaauggaacuuaugacuauccaaaauauuccgaagaaucaaaguugaacagggagaaaauugauggagugaaauuggaaucaaugggagucuaucagauuuuggcgaucuacucaacagucgccaguucccugguucuuuuggucucccugggggcaaucagcuucuggauguguuccaaugggucuuugcaguguagaauaugcaucuaa

SEQ ID NO: 33995 - RNA, 1698 nt, Artificial Sequence; identical to SEQ ID NO: 33932
  derived and/or modified CDS sequence (wt) from hemagglutinin__InfluenzaA__ABV30602

SEQ ID NO: 33996 - RNA, 1698 nt, Artificial Sequence
  derived and/or modified CDS sequence (wt) from hemagglutinin__InfluenzaA__ABV30613
augaaaguaaaacuacugauucuguuauguacauuuacagcuacauaugcagacacaauauguauaggcuaccaugccaacaacucgaccgacacuguugacacaguacuugagaagaaugugacagugacacacucugucaaccuacuugaggacagucacaauggaaaacuaugucuacuaaaaggaauagccccacuacaauuggguaauugcagcguugccggauggaucuuaggaaacccagaaugcgaauugcugauuuccaaggaaucaugguccuacauuguagagacaccaaauccugagaauggaacauguuacccaggguauuucgccgacuaugaggagcugagagagcaauugaguucaguaucuucauuugagagguucgaaauauuccccaaagagagcucauggcccaaccacaccguaaccggaguaucagcaucaugcucccauaacgggaaaagcaguuuuuacagaaauuugcuauggcugacggggaagaaugguuuguauccaaaccugagcaaguccuaugcaaacaacaaagagaaagaaguccuuguacugugggguguucaucacccgccuaacauaggggaccaaagggcccucuaucauacagaaaaugcuuaugucucuguagugucuucacauuauagcagaagauucaccccagaaauagccaaaagacccaaggugagagaucaggaaggaagaaucaacuacuacuggacucugcuugaacccggggauacaauaauauuugaggcaaauggaaaucuaauagcgccaagguuugcuuucgcacugaguagaggcuuuggaucaggaaucaucaccucaaaugcaccaauggaugaaugugaugcgaaaugucaaacaccucagggagcuauaaacagcagucuuccuuuccagaauguacacccagucacaauaggagaguguccaaaguaugucaggaguacaaaauuaagaaugguuacaggacuaaggaacaucccauccauucaauccagagguuuauuuggagccauugccgguuucauugaagggggguggacuggaaugguagaugguugguaugguuaucaccaucagaaugagcaaggaucuggguaugcagcagaucaaaaaagcacacaaaaugccauuaacgggauuacaaacaaggugaauucuguaauugagaaaaugaacacucaauucacagcugugggcaaagaauucaacaaauuggaaagaaggaugaaaaacuuaaauaaaaaaguugaugauggguuucuagacauuuggacauauaacgcagaauuguugguucuacuggaaaaugaaaggacuuuggacuuccaugacuccaacgugaagaaucuguaugagaaaguaaaaagccaauuaaagaauaaugccaaagaaauaggaaacggguguuuugaauucuaucacaaguguaacgaugaaugcauggagagugugaaaaauggaacuuaugacuauccaaaauauuccgaagaaucaaaguugaacagggagaaaauugauggagugaaauuggaaucaaugggagucuaucagauuuuggcgaucuacucaacagucgccaguucccugguucuuuuggucucccugggggcaaucagcuucuggauguguuccaaugggucuuugcaguguagaauaugcaucuaa

SEQ ID NO: 33997 - RNA, 1698 nt, Artificial Sequence
  derived and/or modified CDS sequence (wt) from hemagglutinin__InfluenzaA__ABV30624
augaaaguaaaacuacugauucuguuauguacauuuaccgcuacauaugcagacacaauauguauaggcuaccaugccaacaacucgaccgacacuguugacacaguacuugagaagaaugugacagugacacacucugucaaccuacuugaggacagucacaauggaaaacuaugucuacuaaaaggaauagccccacuacaauuggguaauugcagcguugccggauggaucuuaggaaacccagaaugcgaauugcugauuuccaaggaaucaugguccuacauuguagagacaccaaauccugagaauggaacauguuacccaggguauuucgccgacuaugaggagcugagagagcaauugaguucaguaucuucauuugagagguucgaaauauuccccaaagagagcucauggcccaaccacaccguaaccggaguaucagcaucaugcucccauaacgggaaaagcaguuuuuacagaaauuugcuauggcugacggggaagaaugguuuguauccaaaccugagcaaguccuaugcaaacaacaaagagaaagaaguccuuguacugugggguguucaucacccgccuaacauaggggaccaaagggcccucuaucauacagaaaaugcuuaugucucuguagugucuucacauuauagcagaagauucaccccagaaauagccaaaagacccaaggugagagaucaggaaggaagaaucaacuacuacuggacucugcuugaacccggggauacaauaauauuugaggcaaauggaaaucuaauagcgccaagguuugcuuucgcacugaguagaggcuuuggaucaggaaucaucaccucaaaugcaccaauggaugaaugugaugcgaaaugucaaacaccucagggagcuauaaacagcagucuuccuuuccagaauguacacccagucacaauaggagaguguccaaaguaugucaggaguacaaaauuaagaaugguuacaggacuaaggaacaucccauccauucaaucaagagguuuauuuggagccauugcugguuucauugaagggggguggacuggaaugguagaugguugguaugguuaucaccaucagaaugagcaaggaucuggguaugcugcagaucaaaaaagcacacaaaaugccauuaacgggauuacaaacaaggugaauucuguaauugagaaaaugaacacucaauucacagcugugggcaaagaauucaacaaauuggaaagaaggauggaaaacuuaaauaaaaaaguugaugauggguuucuagacauuuggacauauaacgcagaauuguugguucuacuggaaaaugaaaggacuuuggacuuccaugacuccaacgugaagaaucuguaugagaaaguaaaaagccaauuaaagaauaaugccaaagaaauaggaaacggguguuuugaauucuaucacaaguguaacgaugaaugcauggagagugugaaaaauggaacuuaugacuauccaaaauauuccgaagaaucaaaguugaacagggagaaaauugauggagugaaauuggaaucaaugggagucuaucagauuuuggcgaucuacucaacagucgccaguucccugguucuuuuggucucccugggggcaaucagcuucuggauguguuccaaugggucuuugcaguguagaauaugcaucuaa

SEQ ID NO: 33998 - RNA, 1701 nt, Artificial Sequence
  derived and/or modified CDS sequence (wt) from hemagglutinin__InfluenzaA__ABV30646
augaagacuaucauugcuuugagcuacauucuaugucugguuuucgcucaaaaacuucccggaaaugacaacagcacggcaacgcugugccuugggcaccaugcaguaccaaacggaacgauagugaaaacaaucacgaaugaccaaauugaaguuacuaaugcuacugagcugguucagaguuccucaacaggugaaauaugcgacaguccucaucagauccuugauggagaaaacugcacacuaauagaugcucuauugggagacccucagugugauggcuuccaaaauaagaaaugggaccuuuuuguugaacgcagcaaagccuacagcaacuguuacccuuaugaugugccggauuaugccucccuuaggucacuaguugccucauccggcacacuggaguuuaacaaugaaagcuucaauuggacuggagucacucaaaacggaacaagcucugcuugcauaaggagaucuaauaacaguuucuuuaguagauugaauugguugacccacuuaaaauucaaauacccagcauugaacgugacuaugccaaacaaugaaaaauuugacaaauuguacauuugggggguucaccacccggguacguacaaugaccaaaucuuccuguaugcucaagcaucaggaagaaucacagucucuaccaaaagaagccaacaaacuguaaucccgaauaucggaucuagacccagaguaaggaauauccccagcagaauaagcaucuauuggacaauaguaaaaccgggagacauacuuuugauuaacagcacagggaaucuaauugcuccuagggguuacuucaaaauacgaagugggaaaagcucaauaaugagaucagaugcacccauuggcaaaugcaauucugaaugcaucacuccaaauggaagcauucccaaugacaaaccauuccaaaauguaaacaggaucacauacggggccugucccagauauguuaagcaaaacacucugaaauuggcaacagggaugcgaaauguaccagagaaacaaacuagaggcauauuuggcgcaaucgcggguuucauagaaaaugguugggagggaaugguggaugguugguacgguuucaggcaucaaaauucugagggaauaggacaagcagcagaucucaaaagcacucaagcagcaaucgaucaaaucaaugggaagcugaauagguugaucgggaaaaccaacgagaaauuccaucagauugaaaaagaauucucagaagucgaagggagaauucaggaccuugagaaauauguugaggacaccaaaauagaucucuggucauacaacgcggagcuucuuguugcccuggagaaccaacauacaauugaucuaacugacucagaaaugaacaaacuguuugaaaaaacaaagaagcaacugagggaaaaugcugaggauaugggcaaugguuguuucaaaauauaccacaaaugugacaaugccugcauaggaucaaucagaaauggaacuuaugaccacgauguauacagagaugaagcauuaaacaaccgguuccagaucaagggcguugagcugaagucaggauacaaagauuggauccuauggauuuccuuugccauaucauguuuuuugcuuuguguugcuuuguugggguucaucaugugggccugccaaaaaggcaacauuaggugcaacauuugcauuuga

SEQ ID NO: 33999 - RNA, 1701 nt, Artificial Sequence
  derived and/or modified CDS sequence (wt) from hemagglutinin__InfluenzaA__ABV30657
augaagacuaucauugcuuugagcuacauucuaugucugguuuucgcucaaaaacuuccuggaaaugacaacagcacggcaacgcugugccuugggcaccaugcaguaccaaacggaacgauagugaaaacaaucacgaaugaccaaauugaaguuacuaaugcuacugagcugguucagaguuccucaacaggugaaauaugcgacaguccucaucagauccuugauggagaaaacugcacacuaauagaugcucuauugggagacccucagugugauggcuuccaaaauaagaaaugggaccuuuuuguugaacgcagcaaagccuacagcaacuguuacccuuaugaugugccggauuaugccucccuuaggucacuaguugccucauccggcacacuggaguuuaacaaugaaagcuucaauuggacuggagucacucaaaacggaacaagcucugcuugcauaaggagaucuaauaacaguuucuuuaguagauugaauugguugacccacuuaaaauucaaauacccagcauugaacgugacuaugccaaacaaugaaaaauuugacaaauuguacauuugggggguucaccacccggguacggacaaugaccaagucuuccuguaugcucaagcaucaggaagaaucacagucucuaccaaaagaagccaacaaacuguaaucccgaauaucggaucuagacccagaguaaggaauauccccagcagaauaagcaucuauuggacaauaguaaaaccgggagacauacuuuugauuaacagcacagggaaucuaauugcuccuagggguuacuucaaaauacgaagugggaaaagcucaauaaugagaucagaugcacccauuggcaaaugcaauucugaaugcaucacuccaaauggaagcauucccaaugacaaaccauuccaaaauguaaacaggaucacauacggggccugucccagauauguuaagcaaaacacucugaaauuggcaacagggaugcgaaauguaccagagaaacaaacuagaggcauauuuggcgcaaucgcggguuucauagaaaaugguugggagggaaugguggaugguugguacgguuucaggcaucaaaauucugagggaauaggacaagcagcagaucucaaaagcacucaagcagcaaucgaucaaaucaaugggaagcugaauagguugaucgggaaaaccaacgagaaauuccaucagauugaaaaagaauucucagaagucgaagggagaauucaggaccuugagaaauauguugaggacaccaaaauagaucucuggucauacaacgcggagcuucuuguugcccuggagaaccaacauacaauugaucuaacugacucagaaaugaacaaacuguuugaaaaaacaaagaagcaacugagggaaaaugcugaggauaugggcaaugguuguuucaaaauauaccacaaaugugacaaugccugcauaggaucaaucagaaauggaacuuaugaccacgauguauacagagaugaagcauuaaacaaccgguuccagaucaagggcguugagcugaagucaggauacaaagauuggauccuauggauuuccuuugccauaucauguuuuuugcuuuguguugcuuuguugggguucaucaugugggccugccaaaaaggcaacauuaggugcaacauuugcauuuga

SEQ ID NO: 34000 - RNA, 1701 nt, Artificial Sequence; identical to SEQ ID NO: 33999
  derived and/or modified CDS sequence (wt) from hemagglutinin__InfluenzaA__ABV45860

SEQ ID NO: 34001 - RNA, 1698 nt, Artificial Sequence; identical to SEQ ID NO: 33967
  derived and/or modified CDS sequence (wt) from hemagglutinin__InfluenzaA__ABV45871

SEQ ID NO: 34002 - RNA, 1698 nt, Artificial Sequence
  derived and/or modified CDS sequence (wt) from hemagglutinin__InfluenzaA__ABV45882
augaaaguaaaacuacugguucuguuauguacauuuacagcuacauaugcagacacaauauguauaggcuaccaugccaacaacucgaccgacacuguugacacaguacuugagaagaaugugacagugacacacucugucaaccuacuugaggacagucacaauggaaaacuaugucuacuaaaaggaauagccccacuacaauuggguaauugcagcguugccggauggaucuuaggaaacccagaaugcgaauuacugauuuccaaggaaucaugguccuacauuguagagacaccaaauccugagaauggaacauguuacccaggguauuucgccgacuaugaggagcugagagagcaauugaguucaguaucuucauuugagagguucgaaauauuccccaaagagagcucauggcccaaccacaccguaaccggaguaucagcaucaugcucccauaacgggaaaagcaguuuuuacagaaauuugcuauggcugacggggaagaaugguuuguauccaaaccugagcaaguccuaugcaaacaacaaagagaaagaaguccuuguacugugggguguucaucacccgccuaacauaggggaccaaagggcccucuaucauacagaaaaugcuuaugucucuguagugucuucacauuauagcagaagauucaccccagaaauagccaaaagacccaaggugagagaucaggaaggaagaaucaacuacuacuggacucugcuugaacccggggauacaauaauauuugaggcaaauggaaaucuaauagcgccaagguuugcuuucgcacugaguagaggcuuuggaucaggaaucaucaccucaaaugcaccaauggaugaaugugaugcgaaaugucaaacaccucagggagcuauaaacagcagucuuccuuuccagaauguacacccagucacaauaggagaguguccaaaguaugucaggaguacaaaauuaagaaugguuacaggacuaaggaacaucccauccauucaauccagaggcuuguuuggagccauugccgguuucauugaagggggguggacuggaaugguagaugguugguaugguuaucaccaucagaaugagcaaggaucuggguaugcugcagaucaaaaaagcacacaaaaugccauuaacgggauuacaaacaaggugaauucuguaauugagaaaaugaacacucaauucacagcugugggcaaagaauucaacaaauuggaaagaaggauggaaaacuuaaauaaaaaaguugaugauggguuucuagacauuuggacauauaacgcagaauuguugguucuacuggaaaaugaaaggacuuuggacuuccaugacuccaacgugaagaaucuguaugagaaaguaaaaagccaauuaaagaauaaugccaaagaaauaggaaacggguguuuugaauucuaucacaaguguaacgaugaaugcauggagagugugaaaaauggaacuuaugacuauccaaaauauuccgaagaaucaaaguugaacagggagaaaauugauggagugaaauuggaaucaaugggagucuaucagauuuuggcgaucuacucaacagucgccaguucccugguucuuuuggucucccugggggcaaucagcuucuggauguguuccaaugggucuuugcaguguagaauaugcaucuaa

SEQ ID NO: 34003 - RNA, 1698 nt, Artificial Sequence
  derived and/or modified CDS sequence (wt) from hemagglutinin__InfluenzaA__ABV45893
augaaaguaaaacugcuuguucuguuauguacauuuacagcuacauaugcagacacaauauguauaggcuaccaugccaacaacucgacugacacuguugacacaguacuugagaagaaugugacagugacacacucugucaaccuacuugaggacagucacaauggaaaacuaugucuacuaaaaggaauagccccacuacaauuggguaauugcagcguugccggauggaucuuaggaaacccagaaugcgaauuacugauuuccaaggaaucaugguccuacauuguagaaacaccaaauccugagaauggaacauguuacccaggguauuucgccgacuaugaggagcugagggagcaauugaguucaguaucuucauuugagagguucgaaauauuccccaaagagagcucauggcccaaccacaccguaaccggaguaucagcaucaugcucccauaacggggaaagcaguuuuuacagaaauuuguuauggcugacggggaagaaugguuuguauccaaaccugagcaaguccuaugcaaacaacaaagagaaagaaguccuuguacugugggguguucaucacccgccuaacauaggagaccaaagggcccucuaucauacagaaaaugcuuaugucucuguagugucuucacauuauagcagaagauucaccccagaaauagccaaaagacccaaggugagagaucaggaaggaagaaucaacuacuacuggacucugcuggaacccggggauacaauaauauuugaggcaaauggaaaucuaauagcgccaagguuugcuuucgcacugaguagaggcuuuggaucaggaaucaucaccucaaaugcaccaauggauaaaugugaugcaaagugucaaacaccucagggagcuauaaacagcagucuuccuuuccagaauguacacccagucacaauaggagaguguccaaaguaugucaggaguacaaaauuaaggaugguuacaggacuaaggaacaucccauccauucaauccagagguuuguuuggagccauugccgguuucauugaagggggguggacuggaaugguagaugguugguaugguuaucaccaucagaaugagcaaggaucuggguaugcugcagaucaaaaaagcacacaaaaugccauuaacgggauuacaaacaaggugaauucuguaauugagaaaaugaacacucaauucacagcugugggcaaagaauucaacaaauuggaaagaaggauggaaaauuuaaauaaaaagguugaugauggguuucuagacauuuggacauauaacgcagaauuguugguucuacuggaaaaugaaaggacuuuggacuuccaugacuccaacgugaagaaucuguaugagaaaguaaaaagccaauuaaagaauaaugccaaagaaauaggaaacggguguuuugaauucuaucacaaguguaacgaugaaugcauggagagugugaaaaauggaacuuaugacuauccaaaauauuccgaagaaucaaaguugaacagggagaaaauugauggagugaaauuggaaucaaugggagucuaucagauucuggcgaucuacucaacagucgccaguuccuugguucuuuuggucucccugggggcaaucagcuucuggauguguuccaaugggucuuugcaguguagaauaugcaucuaa

SEQ ID NO: 34004 - RNA, 1701 nt, Artificial Sequence
  derived and/or modified CDS sequence (wt) from hemagglutinin__InfluenzaA__ABV45904
augaagacuaucauugcuuugagcuacauucuaugucugguuuucgcucaaaaacuucccggaauugacaacagcacggcaacgcugugccuugggcaccaugcaguaccaaacggaacgauagugaaaacaaucacgaaugaccaaauugaaguuacuaaugcuacugagcugguucagaguuccucaacagguggaauaugcgacaguccucaucagauccuugauggagaaaacugcacacuaauagaugcucuauugggagacccucagugugauggcuuccaaaauaagaaaugggaccuuuuuguugaacgcagcaaagccuacagcaacuguuacccuuaugaugugccggauuaugccucccuuaggucacuaguugccucauccggcacacuggaguuuaacaaugaaagcuucaauuggacuggagucacucaaaauggaacaagcucugcuugcaaaaggggaucuaauaacaguuucuuuaguagauugaauugguugacccacucaaaauucaaauacccagcuuugaacgugacuaugccaaacaaugaagaauuugacaaauuguacauuugggggguucaccacccggguacggacaaugaccaaaucuuccuguaugcucaagcaucaggaagaaucacagucucuaccaaaagaagccaacaaacuguaaucccgaauaucggaucuagaccuagaguaaggaauauccccagcagaauaagcaucuauuggacaauaguaaaaccgggagacauacuuuugauuaacagcacagggaaucuaauugcuccuagggguuacuucaaaauacgaagugggaaaagcucaauaaugagaucagaugcacccauuggcaaaugcaauucugaaugcaucacuccaaauggaagcauucccaaugacaaaccauuucaaaauguaaacaggaucacauacggggccugucccagauauguuaagcaaaacacucugaaauuggcaacagggaugcgaaauguaccagagaaacaaacuagaggcauauuuggcgcaaucgcggguuucauagaaaaugguugggagggaaugguggaugguugguacgguuucaggcaucaaaauucugagggaauaggacaagcagcagaucucaaaagcacucaagcagcaaucgaucaaaucaaugggaagcugaauagguugaucgggaaaaccaacgagaaauuccaccagauugaaaaagaauucucagaaguagaagggagaauucaggaccucgagaaauauguugaggacacuaaaauagaucucuggucauacaacgcggagcuucuuguugcccuggagaaccaacauacaauugaucuaacugacucagaaaugaacaaacuguuugaaaagacaaagaagcaacugagggaaaaugcugaggauaugggcaaugguuguuucaaaauauaccacaaaugugacaaugccugcauaggaucaaucagaaauggaacuuaugaccaugauguauacagagaugaagcauuaaacaaccgguuucagaucaagggcguugagcugaagucaggauacaaagauuggauccuauggauuuccuuugccauaucauguuuuuugcuuuguguugcuuuguugggguucaucaugugggccugccaaaaaggcaacauuaggugcaacauuugcauuuga

SEQ ID NO: 34005 - RNA, 1698 nt, Artificial Sequence; identical to SEQ ID NO: 33990
  derived and/or modified CDS sequence (wt) from hemagglutinin__InfluenzaA__ABV45926

SEQ ID NO: 34006 - RNA, 1698 nt, Artificial Sequence
  derived and/or modified CDS sequence (wt) from hemagglutinin__InfluenzaA__ABV45937
augaaaguaaaacuacuuguucuguuauguacauuuacagcuacauaugcagacacaauauguauaggcuaccaugccaacaacucgaccgacacuguugacacaguacuugagaagaaugugacagugacacacucugucaaccuacuugaggacagucacaauggaaaacuaugucuacuaaaaggaauagccccacuacaauuggguaauugcagcguugccggauggaucuuaggaaacccagaaugcgaauuacugauuuccaaggaaucaugguccuacauuguagaaacaccaaauccugagaauggaacauguuacccaggauauuucgccgacuaugaggagcugagggagcaauugaguucaguaucuucauuugagagguucgaaauauuccccaaagagagcucauggcccaaccacaccguaaccggaguaucagcaucaugcucccauaacgggaaaagcaguuuuuacagaaauuugcuauggcugacggggaagaaugguuuguauccaaaccugagcaaguccuaugcaaacaacaaagagaaagaaguccuuguacugugggguguucaucacccgccuaacauaggggaccaaagggcccucuaucauacagaaaaugcuuaugucucuguagugucuucacauuauagcagaagauucaccccagaaauagccaaaagacccaaggugagagaucaggaaggaagaaucaacuacuacuggacucugcuggaacccggggauacaauaauauuugagacaaauggaaaucuaauagcgccaagguuugcuuucgcacugaguagaggcuuuggaucaggaaucaucaccucaaaugcaccaaugggugaaugugaugcgaagugucaaacaccucagggagcuauaaacaguagucuuccuuuccagaauguacacccagucacaauaggagaguguccaaaguaugucaggagugcaaaauuaagaaugguuacaggacuaaggaacaucccauccauucaauccagagguuuguuuggagccauugccgguuucauugaagggggguggacuggaaugguagaugguugguaugguuaucaccaucagaaugagcaaggaucuggguaugcugcagaucaaaaaagcacacaaaaugccauuaacgggauuacaaacaaggugaauucuguaauugagaaaaugaacacucaauucacagcugugggcaaagaauucaacaaauuggaaagaaggauggaaaacuuaaauaaaaagguugaugauggguuucuagacauuuggacauauaacgcagaauuguugguucuacuggaaaaugaaaggacuuuggacuuccaugacuccaacgugaagaaucuguaugagaaaguaaaaagccaauuaaagaauaaugccaaagaaauaggaaacggguguuuugaauucuaucacaaguguaacgaugaaugcauggagagugugaaaaauggaacuuaugacuauccaaaauauuccgaagaaucaaaguugaacagggagaaaauugauggagugaaauuggaaucaaugggagucuaucagauucuggcgaucuacucaacagucgccaguucccugguucuuuuggucucccugggggcaaucagcuucuggauguguuccaaugggucuuugcaguguagaauaugcaucuaa

SEQ ID NO: 34007 - RNA, 1698 nt, Artificial Sequence; identical to SEQ ID NO: 33959
  derived and/or modified CDS sequence (wt) from hemagglutinin__InfluenzaA__ABV45948

SEQ ID NO: 34008 - RNA, 1698 nt, Artificial Sequence
  derived and/or modified CDS sequence (wt) from hemagglutinin__InfluenzaA__ABV45959
augaaaguaaaacuacugguucuguuauguacauuuacagcuacauaugcagacacaauauguauaggcuaccaugccaacaacucgaccgacacuguugacacaguacuugagaagaaugugacagugacacacucugucaaccuacuugaggacagucacaauggaaaacuaugccuacuaaaaggaauagccccacuacaauuggguaauugcagcguugccggauggaucuuaggaaacccagaaugcgaauuacugauuuccaaggaaucaugguccuacauuguagagacaccaaauccugagaauggaacauguuacccaggguauuucgccgacuaugaggagcugagagagcaauugaguucaguaucuucauuugagagguucgaaauauuccccaaagagagcucauggcccaaccacaccguaaccggaguaucagcaucaugcucccauaacgggaaaagcaguuuuuacagaaauuugcuauggcugacggggaagaaugguuuguauccaaaccugagcaaguccuaugcaaacaacaaagagaaagaaguccuuguacugugggguguucaucacccgccuaacauaggggaccaaagggcccucuaucauacagaaaaugcuuaugucucuguagugucuucacauuauagcagaagauucaccccagaaauagccaaaagacccaaggugagagaucaggaaggaagaaucaacuacuacuggacucugcuugaacccggggauacaauaauauuugaggcaaauggaaaucuaauagcgccaagguuugcuuucgcacugaguagaggcuuuggaucaggaaucaucaccucaaaugcaccaauggaugaaugugaugcgaaaugucaaacaccucagggagcuauaaacagcagucuuccuuuccagaauguacacccagucacaauaggagaguguccaaaguaugucaggaguacaaaauuaagaaugguuacaggacuaaggaacaucccauccauucaauccagagguuuguuuggagccauugccgguuucauugaagggggguggacuggaaugguagaugguugguaugguuaucaccaucaaaaugagcaaggaucuggguaugcugcagaucaaaaaagcacacaaaaugccauuaacgggauuacaaacaaggugaauucuguaauugagaaaaugaacacucaauucacagcugugggcaaagaauucaacaaauuggaaagaaggauggaaaacuuaaauaaaaaaguugaugauggguuucuagacauuuggacauauaacgcagaauuguugguucuacuggaaaaugaaaggacuuuggacuuccaugacuccaacgugaagaaucuguaugagaaaguaaaaagccaauuaaagaauaaugccaaagaaauaggaaacggguguuuugaauucuaucacaaguguaacgaugaaugcauggagagugugaaaaauggaacuuaugacuauccaaaauauuccgaagaaucaaaguugaacagggagaaaauugauggagugaaauuggaaucaaugggagucuaucagauuuuggcgaucuacucaacagucgccaguucccugguucuuuuggucucccugggggcaaucagcuucuggauguguuccaaugggucuuugcaguguagaauaugcaucuaa

SEQ ID NO: 34009 - RNA, 1701 nt, Artificial Sequence
  derived and/or modified CDS sequence (wt) from hemagglutinin__InfluenzaA__ABV45970
augaagacuaucauugcuuugagcuacauucuaugucugguuuucgcucaaaaacuucccggaaaugacaacagcacggcaacgcugugccuugggcaccaugcaguaccaaacggaacgauagugaaaacaaucacgaaugaccaaauugaaguuacuaaugcuacugagcugguucagaguuccucaacaggugaaauaugcgacaguccucaccagauccuugauggagaaaacugcacacuaauagaugcucuauugggagacccucagugugauggcuuccaaaauaagaaaugggaccuuuuuguugaacgcagcaaagccuacagcaacuguuacccuuaugaugugccggaucaugccucccuuaggucacuaguugccucauccggcacacuggaguuuaacaaugaaagcuucaauuggacuggagucacucaaaacggaacaagcucugcuugcauaaggagaucuaauaacaguuucuuuaguagauugaauugguugacccacuuaaaauucaaauacccagcauugaacgugacuaugccaaacaaugaaaaauuugacaaauuguacauuugggggguucaccacccggguacggacaaugaccaaaucuuccuguaugcucaagcaucaggaagaaucacagucucuaccaaaagaagccaacaaacugugaucccgaauaucggaucuagacccagaguaaggaauauccccagcagaauaagcaucuauuggacaauaguaaaaccgggagacauacuuuugauuaacagcacagggaaucuaauugcuccuagggguuacuucaaaauacaaagugggaaaagcucaauaaugagaucagaugcacccauuggcaaaugcaauucugaaugcaucacuccaaauggaagcauucccaaugacaaaccauuccaaaauguaaacaggaucacauacggggccugucccagauauguuaagcaaaacacucugaaauuggcaacagggaugcgaaauguaccagagaaacaaacuagaggcauauuuggcgcaaucgcggguuucauagaaaaugguugggagggaaugguggaugguugguacgguuucaggcaucaaaauucugagggaauaggacaagcagcagaucucaaaagcacucaagcagcaaucgaucaaaucaaugggaagcugaauagguugaucgggaaaaccaacgagaaauuccaucagauugaaaaagaauucucagaagucgaagggagaauucaggaccuugagaaauauguugaggacaccaaaauagaucucuggucauacaacgcggagcuucuuguugcccuggagaaccaacauacaauugaucuaacugacucagaaaugaacaaacuguuugaaaaaacaaagaagcaacugagggaaaaugcugaggauaugggcaaugguuguuucaaaauauaccacaaaugugacaaugccugcauaggaucaaucagaaauggaacuuaugaccacgauguauacagagaugaagcauuaaacaaccgguuccagaucaagggcguugagcugaagucaggauacaaagauuggauccuauggauuuccuuugccauaucauguuuuuugcuuuguguugcuuuguugggguucaucaugugggccugccaaaaaggcaacauuaggugcaacauuugcauuuga

SEQ ID NO: 34010 - RNA, 1701 nt, Artificial Sequence
  derived and/or modified CDS sequence (wt) from hemagglutinin__InfluenzaA__ABV45981
augaagacuaucauugcuuugagcuacauucuaugucugguuuucgcucaaaaacuucccggaaaugacaacagcacggcaacgcugugccuugggcaccaugcaguaccaaacggaacgauagugaaaacaaucacgaaugaccaaauugaaguuacuaaugcuacugagcugguucagaguuccucaacaggugaaauaugcgacaguccucaucagauccuugauggagaaaacugcacacuaauagaugcucuauugggagacccucagugugauggcuuccaaaauaagaaaugggaccuuuuuguugaacgcagcaaagccuacagcaacuguuacccuuaugaugugccggauuaugccucccugaggucacuaguugccucauccggcacacuggaguuuaacaaugaaagcuucaauuggacuggagucacucaaaacggaacaagcucugcuugcauaaggagaucuaauaacaguuucuuuaguagauugaauugguugacccacuuaaaauucaaauacccagcauugaacgugacuaugccaaacaaugaaaaauuugacaaauuguacauuugggggguucaccacccggguacggacaaugaccaaaucuuccuguaugcucaagcaucaggaagaaucacagucucuaccaaaagaagccaacaaacuguaaucccgaauaucggaucuagacccagaguaaggaauauccccagcagaauaagcaucuauuggacaauaguaaaaccgggagacauacuuuugauuaacagcacagggaaucuaauugcuccuagggguuacuucaaaauacgaagugggaaaagcucaauaaugagaucagaugcacccauuggcaaaugcaauucugagugcaucacuccaaauggaagcauucccaaugacaaaccauuccaaaauguaaacaggaucacauacggggccugucccagauauguuaagcaaaacacucugaaauuggcaacagggaugcgaaauguaccagagaaacaaacuagaggcauauuuggcgcaaucgcggguuucauagaaaaugguugggagggaaugguggaugguugguacgguuucaggcaucaaaauucugagggaauaggacaagcagcagaucucaaaagcacucaagcagcaaucgaucaaaucaaugggaagcugaauagguugaucgggaaaaccaacgagaaauuccaucagauugaaaaagaauucucagaagucgaagggagaauucaggaccuugagaaauauguugaggacaccaaaauagaucucuggucauacaacgcggagcuucuuguugcccuggagaaccaacauacaauugaucuaacugacucagaaaugaacaaacuguuugaaaaaacaaagaagcaacugagggaaaaugcugaggauaugggcaaugguuguuucaaaauauaccacaaaugugacaaugccugcauaggaucaaucagaaauggaacuuaugaccacgauguguacagagaugaagcauuaaacaaccgguuccagaucaagggcguugagcugaagucaggauacaaagauuggaucauauggauuuccuuugccauaucauguuuuuugcuuuguguugcuuuguugggguucaucaugugggccugccaaaagggcaacauuaggugcaacauuugcauuuga

SEQ ID NO: 34011 - RNA, 1698 nt, Artificial Sequence
  derived and/or modified CDS sequence (wt) from hemagglutinin__InfluenzaA__ABV82551
augaaaguaaaacuacuuguucuguuauguacauuuacagcuacauaugcagacacaauauguauaggcuaccaugccaacaacucgacugacacuguugacacaguacuugagaagaaugugacagugacacacucugucaaccuacuugaggacagucacaauggaaaacuaugucuacuaaaaggaauagccccacuacaauuggguaauugcagcguugccggauggaucuuaggaaacccagaaugcgaauuacugauuuccaaggaaucaugguccuacauuguagaaacaccaaauccugagaauggaacauguuacccaggguauuucgccgacuaugaggagcugagggagcaauugaguucaguaucuucauuugagagguucgaaauauuccccaaagagagcucauggcccaaccacaccguaaccggaguaucagcaucaugcucccauaacggggaaagcaguuuuuacagaaauuuguuauggcugacggagaagaaugguuuguauccaaaccugagcaaguccuaugcaaacaacaaagagaaagaaguccuuguacugugggguguucaucacccgccuaacauaggagaccaaagggcccucuaucauacagaaaaugcuuaugucucuguagugucuucacauuauagcagaagauucaccccagaaauagccaaaagacccaaggugagagaucaggaaggaagaaucaacuacuacuggacucugcuggaacccggggauacaauaauauuugaggcaaauggaaaucuaauagcgccaagguuugcuuucgcacugaguagaggcuuuggaucaggaaucaucaccucaaaugcaccaauggacaaaugugaugcgaagugucaaacaccucagggagcuauaaacagcagucuuccuuuccagaauguacacccagucacaauaggagaguguccaaaguaugucaggaguacaaaauuaagaaugguuacaggacuaaggaacaucccauccauucaauccagagguuuguuuggagccauugccgguuucauugaagggggguggacuggaaugguagaugguugguaugguuaucaccaucagaaugagcaaggaucuggguaugcugcagaucaaaaaagcacacaaaaugccauuaacgggauuacaaacaaggugaauucuguaauugagaaaaugaacacucaauucacagcugugggcaaagaauucaacaaauuggaaagaaggauggaaaauuuaaauaaaaagguugaugauggguuucuagacauuuggacauauaacgcagaauuguugguucuacuggaaaaugaaaggacuuuggacuuccaugacuccaacgugaagaaucuguaugagaaaguaaaaagccaauuaaagaauaaugccaaagaaauaggaaacggguguuuugaauucuaucacaaguguaacgaugaaugcauggagagugugaaaaauggaacuuaugacuauccaaaauauuccgaagaaucaaaguugaacagggagaaaauugauggagugaaauuggaaucaaugggagucuaucagauucuggcgaucuacucaacagucgccaguuccuugguucuuuuggucucccugggggcaaucagcuucuggauguguuccaaugggucuuugcaguguagaauaugcaucuaa

SEQ ID NO: 34012 - RNA, 1701 nt, Artificial Sequence
  derived and/or modified CDS sequence (wt) from hemagglutinin__InfluenzaA__ABV82562
augaagacuaucauugcuuugagcuacauuuuaugucugguuuucgcucaaaaacuuccuggaaaugacaacagcacggcaacgcugugccuugggcaccaugcaguaccaaacggaacgauagugaaaacaaucacgaaugaccaaauugaaguuacuaaugcuacugagcugguucagaguuccucaacaggugaaauaugcgacaguccucaucagauccuugauggagaaaacugcacacuaauagaugcucuauugggagacccucagugugauggcuuccaaaauaagaaaugggaccuuuuuguugaacgcagcaaagccuacagcaacuguuacccuuaugaugugccggauuaugccucccuuaggucacuaguugccucauccggcacacuggaguuuaacaaugaaagcuucaauuggacuggagucacucaaaacggaacaagcucugcuugcauaagaagaucuaauaacaguuucuuuaguagauugaauugguugacccacuuaaaauucaaauacccagcauugaacgugacuaugccaaacaaugaaaaauuugacaaauuguacauuugggggguucaccacccggguacggacaaugaccaaaucuuccuguaugcucaagcaucaggaagaaucacagucucuaccaaaagaagccaacaaacuguaaucccgaauaucggaucuagacccagaguaaggaauauccccagcagaauaagcaucuauuggacaauaguaaaaccgggagacauacuuuugauuaacagcacagggaaucuaauugcuccuagggguuacuucaaaauacgaagugggaaaagcucaauaaugagaucagaugcacccauuggcaaaugcaauucugaaugcaucacuccaaauggaagcauucccaaugacaaaccauuccaaaauguaaacaggaucacauauggggccugucccagauauguuaagcaaaacacucugaaauuggcaacagggaugcgaaauguaccagagaaacaaacuagaggcauauuuggcgcaaucgcggguuucauagaaaaugguugggagggaaugguggaugguugguacgguuucaggcaucaaaauucugagggaauaggacaagcagcagaucucaaaagcacucaagcagcaaucgaucaaaucaaugggaagcugaauagguugaucgggaaaaccaacgagaaauuccaucagauugaaaaagaauucucagaagucgaagggaggauucaggaccuugagaaauauguugaggacaccaaaauagaucucuggucauacaacgcggagcuucuuguugcccuggagaaccaacauacaauugaucuaacugacucagaaaugaacaaacuguuugaaaaaacaaagaagcaacugagggaaaaugcugaggauaugggcaaugguuguuucaaaauauaccacaaaugugacaaugccugcauaggaucaaucagaaauggaacuuaugaccacgauguauacagagaugaagcauuaaacaaccgguuccagaucaagggcguugagcugaagucaggauacaaagauuggauccuauggauuuccuuugccauaucauguuuuuugcuuuguguugcuuuguugggguucaucaugugggccugccaaaaaggcaacauuaggugcaacauuugcauuuga

SEQ ID NO: 34013 - RNA, 1701 nt, Artificial Sequence; identical to SEQ ID NO: 33953
  derived and/or modified CDS sequence (wt) from hemagglutinin__InfluenzaA__ABW36168

SEQ ID NO: 34014 - RNA, 1698 nt, Artificial Sequence
  derived and/or modified CDS sequence (wt) from hemagglutinin__InfluenzaA__ABW36179
augaaaguaaaacuacugguucuguuauguacauuuacagcuacauaugcagacacaauauguauaggcuaccaugccaacaacucgaccgacacuguugacacaguacuugagaagaaugugacagugacacacucugucaaccuacuugaggacagucacaauggaaaacuaugucuacuaaaaggaauagccccacuacaauuggguaauugcagcguugccggauggaucuuaggaaacccagaaugcgaauuacugauuuccaaggaaucaugguccuacauuguagagacaccaaauccugagaauggaacauguuacccaggguauuucgccgacuaugaggagcugagagagcaauugaguucaguaucuucauuugagagguucgaaauauuccccaaagagagcucauggcccaaccacaccguaaccggaguaucagcaucaugcucccauaacgggaaaagcaguuuuuacagaaauuugcuauggcugacggggaagaaugguuuguauccaaaccugagcaaguccuaugcaaacaacaaagagaaagaaguccuuguacugugggguguucaucacccgccuaacauaggggaccaaagggcccucuaucauacagaaaaugcuuaugucucuguagugucuucacauuauagcagaagauucaccccagaaauagccaaaagacccaaggugagagaucaggaaggaagaaucaacuacuacuggacucugcuugaacccggggauacaauaauauuugaggcaaauggaaaucuaauagcgccaagguuugcuuucgcacugaguagaggcuuuggaucaggaaucaucaccucaaaugcaccaauggaugaaugugaugcgaaaugucaaacaccucagggagcuauaaacagcagucuuccguuccagaauguacacccagucacaauaggagaguguccaaaguaugucaggaguacaaaauuaagaaugguuacaggacuaaggaacaucccauccauucaauccagagguuuguuuggagccauugccgguuucauugaagggggguggacuggaaugguagauggaugguaugguuaccaccaucagaaugagcaaggaucuggguaugcugcugaucaaaaaagcacacaaaaugccauuaacgggauuacaaacaaggugaauucuguaauugagaaaaugaacacucaauucacagcugugggcaaagaauucaacaaauuggaaagaaggauggaaaacuuaaauaaaaaaguugaugauggguuucuagacauuuggacauauaacgcagaauuguugguucuacuggaaaaugaaaggacuuuggacuuccaugacuccaacgugaagaaucuguaugagaaaguaaaaagccaauuaaagaauaaugccaaagaaauaggaaacggguguuuugaauucuaucacaaguguaacgaugaaugcauggagagugugaaaaauggaacuuaugacuauccaaaauauuccgaagaaucaaaguugaacagggagaaaauugauggagugaaauuggaaucaaugggagucuaucagauuuuggcgaucuacucaacagucgccaguucccugguucuuuuggucucccugggggcaaucagcuucuggauguguuccaaugggucuuugcaguguagaauaugcaucuaa

SEQ ID NO: 34015 - RNA, 1698 nt, Artificial Sequence; identical to SEQ ID NO: 33969
  derived and/or modified CDS sequence (wt) from hemagglutinin__InfluenzaA__ABW36190

SEQ ID NO: 34016 - RNA, 1698 nt, Artificial Sequence
  derived and/or modified CDS sequence (wt) from hemagglutinin__InfluenzaA__ABW36201
augaaaguaaaacuacugguucuguuauguacauuuacagcuacauaugcagacacaauauguauaggcuaccaugccaacaacucgaccgacacuguugacacaguacuugagaagaaugugacagugacacacucugucaaccuacuugaggacagucacaauggaaaacuaugucuacuaaaaggaauagccccacuacaauuggguaauugcagcguugccggauggaucuuaggaaacccagaaugcgaauuacugauuuccaaggaaucaugguccuacauuguagagacaccaaauccugagaauggaacauguuacccaggguauuucgccgacuaugaggagcugagagagcaauugaguucaguaucuucauuugagagguucgaaauauuccccaaagagagcucauggcccaaccacaccguaaccggaguaucagcaucaugcucccauaacgggaaaagcaguuuuuacagaaauuugcuauggcugacggggaagaaugguuuguauccaaaccugagcaaguccuaugcaaacaacaaagagaaagaaguccuuguacugugggguguucaucacccgccuaacauaggggaccaaagggcccucuaucauacagaaaaugcuuaugucucuguagugucuucacauuauagcagaagauucaccccagaaauagccaaaagacccaaggugagagaucaggaaggaagaaucaacuacuacuggacucugcuugaacccggggauacaauaauauuugaggcaaauggaaaucuaauagcgccaagguuugcuuucgcacugaguagaggcuuuggaucaggaaucaucaccucaaaugcaccaauggaugaaugugaugcgaaaugucaaacaccucagggagcuauaaacagcagucuuccuuuccagaauguacacccagucacaauaggagaguguccaaaguaugucaggaguacaaaauuaagaaugguuacaggacuaaggaacaucccauccauucaauccagagguuuguuuggagccauugccggcuucauugaagggggguggacuggaaugguagauggaugguaugguuaucaccaucagaaugagcaaggaucuggguaugcugcugaucaaaaaagcacacaaaaugccauuaacgggauuacaaacaaggugaauucuguaauugagaaaaugaacacucaauucacagcugugggcaaagaauucaacaaauuggaaagaaggauggaaaacuuaaauaaaaaaguugaugauggguuucuagacauuuggacauauaacgcagaauuguugguucuacuggaaaaugaaaggacuuuggacuuccaugacuccaacgugaagaaucuguaugagaaaguaaaaagccaauuaaagaauaaugccaaagaaauaggaaacggguguuuugaauucuaucacaaguguaacgaugaaugcauggagagugugaaaaauggaacuuaugacuauccaaaauauuccgaagaaucaaaguugaacagggaaaaaauugauggagugaaauuggaaucaaugggagucuaucagauuuuggcgaucuacucaacagucgccaguucccugguucuuuuggucucccugggggcaaucagcuucuggauguguuccaaugggucuuugcaguguagaauaugcaucuaa

SEQ ID NO: 34017 - RNA, 1698 nt, Artificial Sequence
  derived and/or modified CDS sequence (wt) from hemagglutinin__InfluenzaA__ABW36212
augaaaguaaaacuacugguucuguuauguacauuuacagcuacauaugcagacacaauauguauaggcuaccaugccaacaauucaaccgacacuguugacacagugcuugagaagaaugugacagugacacacucugucaaccuacuugaggacagucacaauggaaaacuaugucuacuaaaaggaauagccccacuacaauuggguaauugcagcguugccggauggaucuuaggaaacccagaaugcgaauuacugauuuccaaggaaucaugguccuacauuguagaaacaccaaauccugagaauggaacauguuacccaggguauuucgccgacuaugaggagcugagggagcaauugaguucaguaucuucauuugagagguucgaaauauuccccaaagagaacucauggcccaaccacaccguaaccggaguaucagcaucaugcucccauaacgggaaaagcaguuuuuacagaaauuugcuauggcugacggggaagaaugguuuguacccaaaccugagcaaguccuaugcaaacaacaaagagaaagaaguccuuguacuaugggguguucaucacccgccuaacauaggggaccaaagggcccucuaucauacagaaaaugcuuaugucucuguagugucuucacauuauagcagaagauucaccccagaaauagccaaaagacccaaggugagagaucaggaaggaagaaucaacuacuacuggacucugcuggaacccggggauacaauaauauuugaggcaaauggaaaucuaauagcgccaagguuugcuuucgcacugaguagaggcuugggaucaggaaucaucaccucaaaugcaccaauggaugaaugugaugcgaaaugucaaacaccucagggagcuauaaacagcagucuuccuuuccagaauguacacccagucacaauaggagagugucccaaguaugucaggagugcaaaauuaaggaugguuacaggacuaaggaacaucccauccauucaauccagagguuuguuuggagccauugccgguuucauugaagggggguggacuggaaugguagaugguugguaugguuaucaucaucagaaugagcaaggaucuggguaugcugcagaucaaaaaagcacacaaaaugccauuaacgggauuacaaacaaggugaauucuguaauugagaaaaugaacacucaauucacagcugugggcaaagaauucaacaaauuggaaagaaggauggaaaacuuaaauaaaaaaguugaugauggguuucuagacauuuggaccuauaaugcagaauuguugguucuacuggaaaaugaaaggacuuuggauuuccaugacuccaacgugaagaaucuguaugagaaaguaaaaggccaauuaaagaauaaugccaaagaaauaggaaacggguguuuugaauucuaucacaaguguaacgaugaaugcauggagagugugaaaaauggaacuuaugacuauccaaaauauuccgaagaaucaaaguugaacagggagaaaauugauggagugaaauuggaaucaaugggagucuaucagauucuggcgaucuacucaacagucgccaguucccugguucuuuuggucucccugggggcaaucagcuucuggauguguuccaaugggucuuugcaguguagaauaugcaucuaa

SEQ ID NO: 34018 - RNA, 1698 nt, Artificial Sequence; identical to SEQ ID NO: 33934
  derived and/or modified CDS sequence (wt) from hemagglutinin__InfluenzaA__ABW36223

SEQ ID NO: 34019 - RNA, 1698 nt, Artificial Sequence; identical to SEQ ID NO: 33934
  derived and/or modified CDS sequence (wt) from hemagglutinin__InfluenzaA__ABW36245

SEQ ID NO: 34020 - RNA, 1698 nt, Artificial Sequence
  derived and/or modified CDS sequence (wt) from hemagglutinin__InfluenzaA__ABW36267
augaaaguaaaacuacugauucuguuauguacauuuacagcuacauaugcagacacaauauguauaggcuaccaugccaacaacucgaccgacacuguugacacaguacuugagaagaaugugacagugacacauucugucaaccuacuugaggacagucacaauggaaaacuaugucuacuaaaaggaauagccccacuacaauuggguaauugcagcguugccggauggaucuuaggaaacccagaaugcgaauuacugauuuccaaggaaucaugguccuacauuguagagacaccaaauccugagaauggaacauguuacccaggguauuucgccgacuaugaggagcugagagagcaauugaguucaguaucuucauuugagagguucgaaauauuccccaaagagagcucauggcccaaccacaccguaaccggaguaucagcaucaugcucccauaacgggaaaagcaguuuuuacagaaauuugcuauggcugacggggaagaaugguuuguauccaaaccugagcaaguccuaugcaaacaacaaagagaaagaaguccuuguacugugggguguucaucacccgccuaacauaggggaccaaagggcccucuaucauacagaaaaugcuuaugucucuguagugucuucacauuauagcagaagauucaccccagaaauagccaaaagacccaaggugagagaucaggaaggaagaaucaacuacuacuggacucugcuugaacccggggauacaauaauauuugaggcaaauggaaaucuaauagcgccaagguuugcuuucgcacugaguagaggcuuuggaucaggaaucaucaccucaaaugcaccaauggaugaaugugaugcgaaaugucaaacaccucagggagcuauaaacagcagucuuccuuuccagaauguacacccagucacaauaggagaguguccaaaguaugucaggaguacaaaauuaagaaugguuacaggacuaaggaacaucccauccauucaauccagagguuuauuuggagccauugccgguuucauugaagggggguggacuggaaugguagaugguugguaugguuaucaccaucagaaugagcaaggaucuggguaugcugcagaucaaaaaagcacacaaaaugccauuaacgggauuacaaacaaggugaauucuguaauugagaaaaugaacacucaauucacagcugugggcaaagaauucaacaaauuggaaagaaggauggaaaacuuaaauaaaaaaguugaugauggguuucuagacauuuggacauauaacgcagaauuguugguucuacuggaaaaugaaaggacuuuggacuuccaugacuccaacgugaagaaucuguaugagaaaguaaaaagccaauuaaagaauaaugccaaagaaauaggaaacggguguuuugaauucuaucacaaguguaacgaugaaugcauggagagugugaaaaauggaacuuaugacuauccaaaauauuccgaagaaucaaaguugaacagggagaaaauugauggagugaaauuggaaucaaugggagucuaucagauuuuggcgaucuacucaacagucgccaguucccugguucuuuuggucucccugggggcaaucagcuucuggauguguuccaaugggucuuugcaguguagaauaugcaucuaa

SEQ ID NO: 34021 - RNA, 1698 nt, Artificial Sequence; identical to SEQ ID NO: 33937
  derived and/or modified CDS sequence (wt) from hemagglutinin__InfluenzaA__ABW36278

SEQ ID NO: 34022 - RNA, 1698 nt, Artificial Sequence
  derived and/or modified CDS sequence (wt) from hemagglutinin__InfluenzaA__ABW36289
augaaauuaaaacuacugguucuguuauguacauuuacagcuacauaugcagacacaauauguauaggcuaccaugccaacaacucgaccgacacuguugacacaguacuugagaagaaugugacagugacacacucugucaaccuacuugaggacagucacaauggaaaacuaugucuacuaaaaggaauagccccacuacaauuggguaauugcagcguugccggauggaucuuaggaaacccagaaugcgaauuacugauuuccaaggaaucaugguccuacauuguagagacaccaaauccugagaauggaacauguuacccaggguauuucgccgacuaugaggagcugagagagcaauugaguucaguaucuucauuugaaagguucgaaauauuccccaaagagagcucauggcccaaccacaccguaaccggaguaucagcaucaugcucccauaacgggaaaagcaguuuuuacagaaauuugcuauggcugacggggaagaaugguuuguauccaaaccugagcaaguccuaugcaaacaacaaagagaaagaaguccuuguacugugggguguucaucacccgccuaacauaggggaccaaagggcccucuaucauacagaaaaugcuuaugucucuguagugucuucacauuauagcagaagauucaccccagaaauagccaaaagacccaaggugagggaucaggaaggaagaaucaacuacuacuggacucugcuugaacccggggauacaauaauauuugaggcaaauggaaaucuaauagcgccaagguuugcuuucgcacugaguagaggcuuuggaucaggaaucaucaccucaaaugcaccaauggaugaaugugaugcgaaaugucaaacaccucagggagcuauaaacagcagucuuccuuuccagaauguacacccagucacaauaggagaguguccaaaguaugucaggaguacaaaauuaagaaugguuacaggacuaaggaacaucccauccauucaauccagagguuuguuuggagccauugccgguuucauugaagggggguggacuggaaugguagaugguugguaugguuaucaccaucagaaugagcaaggaucuggguaugcugcugaucaaaaaagcacacaaaaugccauuaacgggauuacaaacaaggugaauucuguaauugagaaaaugaacacucaauucacagcugugggcaaagaauucaacaaauuggaaagaaggauggaaaacuuaaauaaaaaaguugaugauggguuucuagacauuuggacauauaacgcagaauuguugguucuacuggaaaaugaaaggacuuuggacuuccaugacuccaacgugaagaaucuguaugagaaaguaaaaagccaauuaaagaauaaugccaaagaaauaggaaacggguguuuugaauucuaucacaaguguaacgaugaaugcauggagagugugaaaaauggaacuuaugacuauccaaaauauuccgaagaaucaaaguugaacagggagaaaauugauggagugaaauuggaaucaaugggagucuaucagauuuuggcgaucuacucaacagucgccaguucccugguucuuuuggucucccugggggcaaucagcuucuggauguguuccaaugggucuuugcaguguagaauaugcaucuaa

SEQ ID NO: 34023 - RNA, 1698 nt, Artificial Sequence
  derived and/or modified CDS sequence (wt) from hemagglutinin__InfluenzaA__ABW36300
augaaaguaaaacuacuuguucuguuauguacauuuacagcuacauaugcagacacaauauguauaggcuaccaugccaacaacucgacugacacuguugacacaguacuugagaagaaugugacagugacacacucugucaaccuacuugaggacagucacaauggaaaacuaugucuacuaaaaggaauagccccacuacaauuggguaauugcagcguugccggauggaucuuaggaaacccagaaugcgaauuacugauuuccaaggaaucaugguccuacauuguagaaacaccaaauccugagaauggaacauguuacccaggauauuucgccgacuaugaggagcugagggagcaauugaguucaguaucuucauuugagagguucgaaauauuccccaaagagagcucauggcccaaccacaccguaaccggaguaucagcaucaugcucccauaacggggaaagcaguuuuuacagaaauuuguuauggcugacggggaagaaugguuuguauccaaaccugagcaaguccuaugcaaacaacaaagagaaagaaguccuuguacugugggguguucaucacccgcccaacauaggagaccaaagggcccucuaucauacagaaaaugcuuaugucucuguagugucuucacauuauagcagaagauucaccccagaaauagccaaaagacccaaggugagagaucaggaaggaagaaucaacuacuacuggacucugcuggaacccggggauacaauaauauuugaggcaaauggaaaucuaauagcgccaagguuugcuuucgcacugaguagaggcuuuggaucaggaaucaucaccucaaaugcaccaauggauaaaugugaugcgaagugucaaacaccucagggagcuauaaacagcagucuuccuuuccagaauguacacccagucacaauaggagaguguccaaaguaugucaggaguacaaaauuaagaaugguuacaggacuaaggaacaucccauccauucaauccagagguuuguuuggagccauugccgguuucauugaagggggguggacuggaaugguagaugguugguaugguuaucaccaucagaaugagcaaggaucuggguaugcugcagaucaaaaaagcacacaaaaugccauuaacgggauuacaaacaaggugaauucuguaauugagaaaaugaacacucaauucacagcugugggcaaagaauucaacaaauuggaaagaaggauggaaaauuuaaauaaaaagguugaugauggguuucuagacauuuggacauauaacgcagaauuguugguucuacuggaaaaugaaaggacuuuggacuuccaugacuccaacgugaagaaucuguaugagaaaguaaaaagccaauuaaagaauaaugccaaagaaauagggaacggguguuuugaauucuaucacaaguguaacgaugaaugcauggagagugugaaaaauggaacuuaugacuauccaaaauauuccgaagaaucaaaguugaacagggagaaaauugauggagugaaauuggaaucaaugggagucuaucagauucuggcgaucuacucaacagucgccaguuccuugguucuuuuggucucccugggggcaaucagcuucuggauguguuccaaugggucuuugcaguguagaauaugcaucuaa

SEQ ID NO: 34024 - RNA, 1701 nt, Artificial Sequence
  derived and/or modified CDS sequence (wt) from hemagglutinin__InfluenzaA__ABW36311
augaaagcaaaacuacugguccuguuaugugcacuuucagcuacagaugcagacacaauauguauaggcuaccaugcgaacaacucaaccgacacuguugacacaguacucgaaaagaacgugacagugacacacucugucaaccuacuugaggacagucacaacggaaaacuaugcagacuaaaaggaauagcuccacuacaauuggggaaaugcagcauugccggauggaucuuaggaaacccagaaugcgaaucacuguuuucuaagaaaucaugguccuacauugcagaaacaccaaacuccgagaauggaacauguuacccaggauauuucgccgacuaugaggaacugagggagcaauugaguucaguaucaucauucgagagauucgaaauauuccccaaggaaagaucauggcccaaacacaacguaaccagaggaguaacggcaucaugcucccauaaggggaaaagcaguuuuuacagaaauuugcuauggcugacggagaaaaauggcucguacccaaaucugagcaaguccuaugugaacaacaaagagaaagaaguccuuguacuaugggguguucaucacccgucuaacauagaggaccaaaagaccaucuaucggaaagaaaaugcuuaugucucuguagugucuucaaauuauaacaggagauucaccccagaaauagcaaaaagacccaaaguaagagaucaagaagggagaauuaacuacuacuggacucugcuggaacccggggacacaauaauauuugaggcaaauggaaaucuaauagcgccaugguaugcuuucgcacugaguagaggcuuugggucaggaaucaucaccucaaacgcaucgauggaugaaugugacacgaagugucaaacaccccagggagcuauaaacaguagccuuccuuuccagaauguacacccagucacaauaggagagugcccaaaauacgucaggaguacaaaauuaaggaugguuacaggacuaagaaacaucccauccauucaauccagaggucuguuuggagccauugccgguuucauugaagggggauggacuggaaugauagauggaugguaugguuaucaucaucagaaugaacagggaucuggcuaugcugcggaucaaaaaagcacacaaaaugccauuaacgggauuacaaacaaggugaacucuguuaucgagaaaaugaacacucaauucacagcuguggguaaagaauucaacaaauuagaaaaaaggauggaaaacuuaaauaaaaaaguugaugauggauuucuggacauuuggacauauaaugcagaauuguugguucuacuggaaaaugaaaggacuuuggauucucaugacucaaaugugaagaaucuguaugagaaaguaaaaagccaauuaaagaauaaugccaaagaaauaggaaacggguguuuugaauucuaccacaaguguaacaaugaaugcauggaaaguguaaaaaauggaacuuaugacuauccaaaauauucagaggaaucaaaguuaaacagggaaaaaauugauggagugaaauuggaaucaaugggagucuaucagauucuggcgaucuacucaacugucgccaguucacuggugcuuuuggucucccugggggcaaucagcuucuggauguguucuaaugggucuuugcagugcagaauaugcaucuga

SEQ ID NO: 34025 - RNA, 1701 nt, Artificial Sequence
  derived and/or modified CDS sequence (wt) from hemagglutinin__InfluenzaA__ABW38363
augaagacuaucauugcuuugagcuacauucuaugucugguuuucgcucaaaaacuucccggaaaugacaacagcacggcaacgcugugccuugggcaccaugcaguaccaaacggaacgauagugaaaacaaucacgaaugaccaaauugaaguuacuaaugcuacugagcugguucagaguucaucaacaggugaaauaugcgacaguccucaucagauccuugauggagaaaacugcacacuaauagaugcucuauugggagacccucagugugauggcuuccaaaauaagaaaugggaccuuuuuguugaacgcagcaaagccuacagcaacuguuacccuuaugaugugccggauuaugccucccuuaggucacuaguugccucauccggcacacuggaguuuaacaaugaaagcuucaauuggacuggagucacucaaaauggaacaagcucugcuugcaaaaggagaucuaauaacaguuucuuuaguagauugaauugguugacccacuuaaaauucaaauacccagcauugaacgugacuaugccaaacaaugaaaaauuugacaaauuguacauuugggggguucaccacccggguacggacaaugaccaaaucuuccuguaugcucaagcaucaggaagaaucacagucucuaccaaaagaagccaacaaacuguaaucccgaauaucggaucuagacccagaguaaggaauauccccagcagaauaagcaucuauuggacaauaguaaaaccgggagacauacuuuugauuaacagcacagggaaucuaauugcuccuagggguuacuucaaaauacgaagugggaaaagcucaauaaugagaucagaugcacccauuggcaaaugcaauucugaaugcaucacuccaaauggaagcauucccaaugacaaaccauuucaaaauguaaacaggaucacauauggggccugucccagauauguuaagcaaaacacucugaaauuggcaacagggaugcgaaauguaccagagaaacaaacuagaggcauauuuggcgcaaucgcggguuucauagaaaaugguugggagggaaugguggaugguugguacgguuucaggcaucaaaauucugagggaauaggacaagcagcagaucucaaaagcacucaagcagcaaucgaucaaaucaaugggaagcugaauagguugaucgggaaaaccaacgagaaauuccaucagauugaaaaagaauucucagaaguagaagggagaauucaggaccucgagaaauauguugaggacacuaaaauagaucucuggucauacaacgcggagcuuauuguugcccuggagaaccaacauacaauugaucuaacugacucagaaaugaacaaacuguuugaaagaacaaagaagcaacugagggaaaaugcugaggauaugggcaaugguuguuucaaaauauaccacaaaugugacaaugccugcauaggaucaaucagaaauggaacuuaugaccaugauguauacagagaugaagcauuaaacaaccgguuccagaucaaagguguugagcugaagucaggauacaaagauuggauccuauggauuuccuuugccauaucauguuuuuugcuuuguguugcuuuguugggguucaucaugugggccugccaaaaaggcaacauuaggugcaacauuugcauuuga

SEQ ID NO: 34026 - RNA, 1698 nt, Artificial Sequence
  derived and/or modified CDS sequence (wt) from hemagglutinin__InfluenzaA__ABW39777
augaaaguaaaacuacugguucuguuauguacauuuacagcuacauaugcagacacaauauguauaggcuaccaugccaacaauucaaccgacacuguugacacagugcuugagaagaaugugacagugacacacucugucaaccuacuugaggacagucacaauggaaaacuaugucuacuaaaaggaauagccccacuacaauuggguaauugcagcguugccggauggaucuuaggaaacccagaaugcgaauuacugauuuccaaggaaucaugguccuacauuguagaaacaccaaauccugagaauggaacauguuacccaggguauuucgccgacuaugaggagcugagggagcaauugaguucaguaucuucauuugagagguucgaaauauuccccaaagagaacucauggcccaaccacaccguaaccggaguaucagcaucaugcucccauaacgggaaaagcaguuuuuacagaaauuugcuauggcugacggggaagaaugguuuguacccaaaccugagcaaguccuaugcaaacaacaaagagaaagaaguccuuguacuaugggguguucaucacccgccuaacauaggggaccaaagggcccucuaucauacagaaaaugcuuaugucucuguagugucuucacauuauagcagaagauucaccccagaaauagccaaaagacccaaggugagagaucaggaaggaagaaucaacuacuacuggacucugcuggaacccggggauacaauaauauuugaggcaaaugggaaucuaauagcgccaagguuugcuuucgcacugaguagaggcuugggaucaggaaucaucaccucaaaugcaccaauggaugaaugugaugcgaaaugucaaacaccucagggagcuauaaacagcagucuuccuuuccagaauguacacccagucacaauaggagagugucccaaguaugucaggagugcaaaauuaaggaugguuacaggacuaaggaacaucccauccauucaauccagagguuuguuuggagccauugccgguuucauugaagggggguggacuggaaugguagaugguugguaugguuaucaucaucagaaugagcaaggaucuggguaugcugcagaucaaaaaagcacacaaaaugccauuaacgggauuacaaacaaggugaauucuguaauugagaaaaugaacacucaauucacagcugugggcaaagaauucaacaaauuggaaagaaggauggaaaacuuaaauaaaaaaguugaugauggguuucuagacauuuggaccuauaaugcagaauuguugguucuacuggaaaaugaaaggacuuuggauuuccaugacuccaacgugaagaaucuguaugagaaaguaaaaagccaauuaaagaauaaugccaaagaaauaggaaacggguguuuugaauucuaucacaaguguaacgaugaaugcauggagagugugaaaaauggaacuuaugacuauccaaaauauuccgaagaaucaaaguuaaacagggagaaaauugauggagugaaauuggaaucaaugggagucuaucagauucuggcgaucuacucaacagucgccaguucccugguucuuuuggucucccugggggcaaucagcuucuggauguguuccaaugggucuuugcaguguagaauaugcaucuaa

SEQ ID NO: 34027 - RNA, 1698 nt, Artificial Sequence; identical to SEQ ID NO: 33926
  derived and/or modified CDS sequence (wt) from hemagglutinin__InfluenzaA__ABW39806

SEQ ID NO: 34028 - RNA, 1698 nt, Artificial Sequence
  derived and/or modified CDS sequence (wt) from hemagglutinin__InfluenzaA__ABW39817
augaaaguaaaacuacuuguucuguuauguacauuuacagcuacauaugcagacacaauauguauaggcuaccaugccaacaacucgacugacacuguugacacaguacuugagaagaaugugacagugacacacucugucaaccuacuugaggacagucacaauggaaaacuaugucuacuaaaaggaauagccccacuacaauuggguaauugcagcguugccggauggaucuuaggaaacccagaaugcgaauuacugauuuccaaggaaucaugguccuacauuguagaaacaccaaauccugagaauggaacauguuacccaggauauuucgccgacuaugaggagcugagggagcaauugaguucaguaucuucauuugagagguucgaaauauuccccaaagagagcucauggcccaaccacaccguaaccggaguaucagcaucaugcucccauaacggggaaagcaguuuuuacagaaauuuguuauggcugacggggaagaaugguuuguauccaaaccugagcaaguccuaugcaaacaacaaagagaaagaaguccuuguacugugggguguucaucacccgccuaacauaggagaccaaagggcccucuaucauacagaaaaugcuuaugucucuguagugucuucacauuauagcagaagauucaccccagaaauagccaaaagacccaaggugagagaucaggaaggaagaaucaacuacuacuggacucugcuggaacccggggauacaauaauauuugaggcaaauggaaaucuaauagcgccaagguuugcuuucgcacugaguagaggcuuuggaucaggaaucaucaccucaaaugcaccaauggauaaaugugaugcgaagugucaaacaccucagggagcuauaaacagcagucuuccuuuccagaauguacacccagucacaauaggagaguguccaaaauaugucaggaguacaaaauuaagaaugguuacaggacuaaggaacaucccauccauucaauccagagguuuguuuggagccauugccgguuucauugaagggggguggacuggaaugguagaugguugguaugguuaucaccaucagaaugagcaaggaucuggguaugcugcagaucaaaaaagcacacaaaaugccauuaacgggauuacaaacaaggugaauucuguaauugagaaaaugaacacucaauucacagcugugggcaaagaauucaacaaauuggaaagaaggauggaaaauuuaaauaaaaagguugaugauggguuucuagacauuuggacauauaaugcagaauuguugguucuacuggaaaaugaaaggacuuuggacuuccaugacuccaacgugaagaaucuguaugagaaaguaaaaagccaauuaaagaauaaugccaaagaaauaggaaacggguguuuugaauucuaucacaaguguaacgaugaaugcauggagagugugaaaaauggaacuuaugacuauccaaaauauuccgaagaaucaaaguugaacagggagaaaauugauggagugaaauuggaaucaaugggagucuaucagauucuggcgaucuacucaacagucgccaguuccuugguucuuuuggucucccugggggcaaucagcuucuggauguguuccaaugggucuuugcaguguagaauaugcaucuaa

SEQ ID NO: 34029 - RNA, 1698 nt, Artificial Sequence
  derived and/or modified CDS sequence (wt) from hemagglutinin__InfluenzaA__ABW39828
augaaaguaaaacuacugguccuauuaugcacauuuacagcuacauaugcagacacaauauguaucggcuaccaugccaacaacucaaccgacacuguugacacaguacuugaaaagaaugugacagugacacacucugucaaccugcuugaggacaaccacaauggaaaacuaugucuauuaaaaggaauagccccauuacaauuggguaacugcagcguugccggguggaucuuaggaaacccagaaugcgaauuacugauuuccaaggagucaugguccuacauuguagaaaaaccaaauccugagaauggaacauguuacccagggcauuucgccgacuaugaggaacugagggagcaauugaguucaguaucuucauuugagagguucgaaauauuccccaaagaaagcucauggcccaaccacaccguaaccggaguauccgcaucaugcucccauaauggggaaagcagcuuuuacaaaaauuugcuauggcugacgggaaagaaugguuuguacccaaaccugagcaaguccuaugcaaacaacaaagagaaagaaguccucguacuaugggguguucaucacccgccaaacauaggugaccaaaugacccucuaucauaaagaaaaugcuuaugucucuguagugucuucacauuauagcagaaaauucaccccagaaauagccaaaagacccaaaguaagagaucaagaaggaagaaucaacuacuacuggacucugcuugaacccggggauacaauaauauuugaggcaaauggaaaucuaauagcgccaagauaugcuuucgcacugaguagaggcuuuggaucaggaaucaucaacucaaaugcaccaauggaugaaugugaugcgaagugccaaacaccucagggagcuauaaacagcagucuuccuuuccagaauguacacccagucacaauaggagaauguccaaaguaugucaggagugcaaaauuaaggaugguuacaggacuaaggaacaucccauccauucaauccagagguuuguuuggagccauugccgguuucauugaagggggguggacuggaaugguagaugguugguaugguuaucaucaccagaaugagcaaggaucuggcuaugcugcagaucaaaaaagcacacaaaaugccauuaaugggauuacaaacaaggugaauucuguaauugagaagaugaacacucaauucacagcugugggcaaagaauucaacaaauuggaaagaaggauggaaaacuuaaauaaaaaaguugaugacggguuuauagacguuuggacauauaaugcagaacuguugguucuacuggaaaaugaaagaacuuuggauuuccaugacuccaaugugaagaauuuguaugagaaaguaaaaaaucaauuaaagaauaaugccaaagaaauaggaaauggguguuuugaauuuuaucacaaguguaacgaugaaugcauggagaguguaaaaaauggaacuuaugacuauccaaaauauuccgaagaaucaaaguuaagcagggagaaaauugauggagugaaauuggaaucaaugggagucuaucagauucuggcgaucuacucaacagucgccaguucucugguucuuuuggucucccugggggcaaucagcuucuggauguguuccaaugggucuuugcaguguagaauaugcaucuaa

SEQ ID NO: 34030 - RNA, 1698 nt, Artificial Sequence
  derived and/or modified CDS sequence (wt) from hemagglutinin__InfluenzaA__ABW39839
augaaaguaaaacuacuuguucuguuauguacauuuacagcuacauaugcagacacaauauguauaggcuaccaugccaacaacucgaccgacacuguugacacaguacuugagaagaaugugacagugacacacucugucaaccuacuugaggacagucacaauggaaaacuaugucuacuaaaaggaauagccccacuacaauuggguaauugcagcguugccggauggaucuuaggaaacccagaaugcgaauuacugauuuccaaggaaucaugguccuacauuguagaaacaccaaauccugagaauggaacauguuacccaggauauuucgccgacuaugaggagcugagggagcaauugaguucaguaucuucauuugagagguucgaaauauuccccaaagagagcucauggcccaaccacaccguaaccggaguaucagcaucaugcucccauaacgggaaaagcaguuuuuacagaaauuugcuauggcugacggggaagaaugguuuguauccaaaccugagcaaguccuauucaaacaacaaagagaaagaaguccuuguacugugggguguucaucacccgccuaacauaggggaccaaagggcccucuaucauacagaaaaugcuuaugucucuguagugucuucacauuauagcagaagauucaccccagaaauagccaaaagacccaaggugagagaucaggaaggaagaaucaacuacuacuggacucugcuggaacccggggauacaauaauauuugaggcaaauggaaaucuaauagcgccaagguuugcuuucgcacugaguagaggcuuuggaucaggaaucaucaccucaaaugcaccaaugggugaaugugaugcgaagugucaaacaccucagggagcuauaaacaguagucuuccuuuccagaauguacauccagucacaauaggagaguguccaaaguaugucaggagugcaaaauuaagaaugguuacaggacuaaggaacaucccauccauucaauccagagguuuguuuggagccauugccgguuucauugaagggggguggacuggaaugguagaugguugguaugguuaucaccaucagaaugagcaaggaucuggguaugcugcagaucaaaaaagcacacaaaaugccauuaacgggauuacaaacaaggugaauucuguaauugagaaaaugaacacucaauucacagcugugggcaaagaauucaacaaauuggaaagaaggauggaaaacuuaaauaaaaagguugaugauggguuucuagacauuuggacauauaacgcagaauuguugguucuacuggaaaaugaaaggacuuuggacuuccaugacuccaacgugaagaaucuguaugagaaaguaaaaagccaauuaaagaauaaugccaaagaaauaggaaacggguguuuugaauucuaucacaaguguaacgaugaaugcauggagagugugagaaauggaacuuaugacuauccaaaauauuccgaagaaucaaaguugaacagggagaaaauugauggagugaaauuggaaucaaugggagucuaucagauucuggcgaucuacucaacagucgccaguucccugguucuuuuggucucccugggggcaaucagcuucuggauguguuccaaugggucuuugcaguguagaauaugcaucuaa

SEQ ID NO: 34031 - RNA, 1698 nt, Artificial Sequence
  derived and/or modified CDS sequence (wt) from hemagglutinin__InfluenzaA__ABW39850
augaaaguaaaacuacugguccuguuaugcacauuuacagcuacaaaugcagacacaauauguauaggcuaccaugcuaacaacucgaccgacacuguugacacaguacuugaaaagaaugugacagugacacacucugucaaucugcuugagaacagucacaauggaaaacuaugucuauuaaaaggaauagccccacuacaauuggguaauugcagcguugccggguggaucuuaggaaacccagaaugcgaauuacugauuuccaaggagucaugguccuacauuguagaaaaaccaaauccugagaauggaacauguuacccagggcauuucgcugacuaugaggaacugagggagcaauugaguucaguaucuucauuugagagguucgaaauauuccccaaagaaagcucauggcccaaucacaccguaaccggagugucagcaucaugcucccauaauggggaaagcaguuuuuacagaaauuugcuauggcugacggggaagaaugguuuguacccaaaccugagcaaguccuaugcaaacaacaaagaaaaagaaguccuuguacuaugggguguucaucacccgccaaacauaggugaccaaaaggcccucuaucauacagaaaaugcuuaugucucuguagugucuucacauuauagcagaaaauucaccccagaaauagccaaaagacccaaaguaagagaucaagaaggaagaaucaacuacuacuggacucugcuugaacccggggauacaauaauauuugaggcaaauggaaaucuaauagcgccaagauaugcuuucgcacugaguagaggcuuuggaucaggaaucaucaacucaaaugcaccaauggauaaaugugaugcgaagugccaaacaccucagggagcuauaaacagcagccuuccuuuccagaauguacacccagucacaauaggagaguguccaaaguaugucaggagugcaaaauuaaggaugguuacaggacuaaggaacaucccauccauucaauccagagguuuguuuggagccauugccgguuucauugaagggggguggacuggaaugguagaugguugguaugguuaucaucaucagaaugagcaaggaucuggcuaugcugcagaucaaaaaagcacacaaaaugccauuaaugggauuacaaacaaggugaauucuguaauugagaaaaugaacacucaauucacagcagugggcaaagaauucaacaaauuggaaagaaggauggaaaacuugaauaaaaaaguugaugauggauuuauagacauuuggacauauaaugcagaacuguugguucuacuggaaaaugaaaggacuuuggauuuccaugacuccaaugugaagaaucuguaugagaaaguaaaaggccaguuaaagaauaaugccaaagaaauaggaaauggguguuuugaauucuaucacaaguguaacgaugaaugcauggagaguguaaagaauggaacuuaugacuauccaaaauauuccgaagaaucaaaguuaaacagggagaaaauugauggagugaaauuggaaucaaugggagucuaucagauucuggcgaucuacucaacagucgccaguucucugguucuuuuggucucccugggggcaaucagcuucuggauguguuccaaugggucuuugcaguguagaauaugcaucuaa

SEQ ID NO: 34032 - RNA, 1698 nt, Artificial Sequence
  derived and/or modified CDS sequence (wt) from hemagglutinin__InfluenzaA__ABW39861
augaaaguaaaacuacugguucuguuauguacauuuacagcuacauaugcagacacaauauguauaggcuaccaugccaacaacucgaccgacacuguugacacaguacuugagaagaauguaacagugacacacucugucaaccuacuugaggacagucacaauggaaaacuaugucuacuaaaaggaauagccccacuacaauuggguaauugcagcguugccggauggaucuuaggaaacccagaaugcgaauuacugauuuccaaggaaucaugguccuacauuguagagacaccaaauccugagaauggaacauguuacccagggaauuucgccgacuaugaggagcugagagagcaauugaguucaguaucuucauuugagagguucgaaauauuccccaaagagagcucauggcccaaccacaccguaaccggaguaucagcaucaugcucccauaacgggaaaagcaguuuuuacagaaauuugcuauggcugacggggaagaaugguuuguauccaaaccugagcaaguccuaugcaaacaacaaagagaaagaaguccuuguacugugggguguucaucacccgccuaacauaggggaccaaagggcccucuaucauacagaaaaugcuuaugucucuguagugucuucacauuauagcagaagauucaccccagaaauagccaaaagacccaaggugagagaucaggaaggaagaaucaacuacuacuggacucugcuugaacccggggauacaauaauauuugaggcaaauggaaaucuaauagcgccaagguuugcuuucgcacugaguagaggcuuuggaucaggaaucaucaccucaaaugcaccaauggaugaaugugaugcgaaaugucaaacaccucagggagcuauaaacagcagccuuccuuuccagaauguacacccagucacaauaggagaguguccaaaguaugucaggagugcaaaauuaagaaugguuacagggcuaaggaacaucccauccauucaauccagagguuuguuuggagccauugccgguuucauugaagggggguggacuggaaugguagaugguugguaugguuaucaccaucagaaugagcaaggaucuggguaugcugcagaucaaaaaagcacacaaaaugccauuaacgggauuacaaacaaggugaauucuguaauugagaaaaugaacacucaauucacagcugugggcaaagaauucaacaaauuggaaagaaggauggaaaacuuaaauaaaaaaguugaugauggguuucuagacauuuggacauauaacgcagaauuguugguucuacuggaaaaugaaaggacuuuggacuuccaugacuccaacgugaagaaucuguaugagaaaguaaaaagccaauuaaagaauaaugccaaagaaauaggaaacggguguuuugaauucuaucacaaauguaacgaugaaugcauggagagugugaaaaauggaacuuaugacuauccaaaauauuccgaagaaucaaaguugaacagggagaaaauugauggagugaaauuggaaucaaugggagucuaucagauuuuggcgaucuacucaacagucgccaguucccugguucuuuuggucucccugggggcaaucagcuucuggauguguuccaaugggucuuugcaguguagaauaugcaucuaa

SEQ ID NO: 34033 - RNA, 1701 nt, Artificial Sequence; identical to SEQ ID NO: 33953
  derived and/or modified CDS sequence (wt) from hemagglutinin__InfluenzaA__ABW39872

SEQ ID NO: 34034 - RNA, 1698 nt, Artificial Sequence
  derived and/or modified CDS sequence (wt) from hemagglutinin__InfluenzaA__ABW39883
augaaaguaaaacuacugguucuguuauguacauuuacagcuacauaugcagacacaauauguauaggcuaccaugccaacaacucgaccgacacuguugacacaguacuugagaagaaugugacagugacacacucugucaaccuacuugaggacagucacaauggaaaacuaugucuacuaaaaggaauagccccacuacaauuggguaauugcagcguugccggauggaucuuaggaaacccagaaugcgaauuacugauuuccaaggaaucaugguccuacauuguagagacaccaaauccugagaauggaacauguuacccaggguauuucgccgacuaugaggagcugagagagcaauugaguucaguaucuucauuugagagguucgaaauauuccccaaagagagcucauggcccaaccacaccguaaccggaguaucagcaucaugcucccauaacgggaaaagcaguuuuuacagaaauuugcuauggcugacggggaagaaugguuuguauccaaaccugagcaaguccuaugcaaacaacaaagagaaagaaguccuuguacugugggguguucaucacccgcauaacauaggggaccaaagggcccucuaucauacagaaaaugcuuaugucucuguagugucuucacauuauagcagaagauucaccccagaaauagccaaaagacccaaggugagagaucaggaaggaagaaucaacuacuacuggacucugcuugaacccggggauacaauaauauuugaggcaaauggaaaucuaauagcgccaagguuugcuuucgcacugaguagaggcuuuggaucaggaaucaucaccucaaaugcaccaauggaugaaugugaugcgaaaugucaaacaccucagggagcuauaaacagcagucuuccuuuccagaauguacacccagucacaauaggagaguguccaaaguaugucaggaguacaaaauuaagaaugguuacaggacuaaggaacaucccauccauucaauccagagguuuguuuggagccauugccgguuucauugaagggggguggacuggaaugguagauggaugguaugguuaccaccaucagaaugagcaaggaucuggguaugcugcugaucaaaaaagcacacaaaaugccauuaacgggauuacaaacaaggugaauucuguaauugagaaaaugaacacucaauucacagcugugggcaaagaauucaacaaauuggaaagaaggauggaaaacuuaaauaaaaaaguugaugauggguuucuagacauuuggacauauaacgcagaauuguugguucuacuggaaaaugaaaggacuuuggacuuccaugacuccaacgugaagaaucuguaugagaaaguaaaaagccaauuaaagaauaaugccaaagaaauaggaaacggguguuuugaauucuaucacaaguguaacgaugaaugcauggagagugugaaaaauggaacuuaugacuauccaaaauauuccgaagaaucaaaguugaacagggagaaaauugauggagugaaauuggaaucaaugggagucuaucagauuuuggcgaucuacucaacagucgccaguucccugguucuuuuggucucccugggggcaaucagcuucuggauguguuccaaugggucuuuacaguguagaauaugcaucuaa

SEQ ID NO: 34035 - RNA, 1698 nt, Artificial Sequence; identical to SEQ ID NO: 33967
  derived and/or modified CDS sequence (wt) from hemagglutinin__InfluenzaA__ABW39894

SEQ ID NO: 34036 - RNA, 1698 nt, Artificial Sequence
  derived and/or modified CDS sequence (wt) from hemagglutinin__InfluenzaA__ABW39905
augaaaguaaaacuacugauucuguuauguacauuuacagcuacauaugcagacacaauauguauaggcuaccaugccaacaacucgaccgacacuguugacacaguacuugagaagaaugugacagugacacacucugucaaccuacuugaggacagucacaauggaaaacuaugucuacuaaaaggaauagccccacuacaauuggguaauugcagcguugccggauggaucuuaggaaacccagaaugcgaauugcugauuuccaaggaaucaugguccuacauuguagagacaccaaauccugagaauggaacauguuacccaggguauuucgccgacuaugaggagcugagagagcaauugaguucaguaucuucauuugagagguucgaaauauuccccaaagagagcucauggcccaaccacaccguaaccggaguaucagcaucaugcucccauaacgggaaaagcaguuuuuacagaaauuugcuauggcugacugggaagaaugguuuguauccaaaccugagcaaguccuaugcaaacaacaaagagaaagaaguccuuguacugugggguguucaucacccgccuaacauaggggaccaaagggcccucuaucauacagaaaaugcuuaugucucuguagugucuucacauuauagcagaagauucaccccagaaauagccaaaagacccaaggugagagaucaggaaggaagaaucaacuacuacuggacucugcuugaacccggggauacaauaauauuugaggcaaauggaaaucuaauagcgccaagguuugcuuucgcacugaguagaggcuuuggaucaggaaucaucaccucaaaugcaccaauggaugaaugugaugcgaaaugucaaacaccucagggagcuauaaacagcagucuuccuuuccagaauguacacccagucacaauaggagaguguccaaaguaugucaggaguacaaaauuaagaaugguuacaggacuaaggaacaucccauccauucaauccagagguuuauuuggagccauugccgguuucauugaagggggauggacuggaaugguagaugguugguaugguuaucaccaucagaaugagcaaggaucuggguaugcugcagaucaaaaaagcacacaaaaugccauuaacgggauuacaaacaaggugaauucuguaauugagaaaaugaacacucaauucacagcugugggcaaagaauucaacaaauuggaaagaaggauggaaaacuuaaauaaaaaaguugaugauggguuucuagacauuuggacauauaacgcagaauuguugguucuacuggaaaaugaaaggacuuuggacuuccaugacuccaacgugaagaaucuguaugagaaaguaaaaagccaauuaaagaauaaugccaaagaaauaggaaacggguguuuugaauucuaucacaaguguaacgaugaaugcauggagagugugaaaaauggaacuuaugacuauccaaaauauuccgaagaaucaaaguugaacagggagaaaauugauggagugaaauuggaaucaaugggagucuaucagauuuuggcgaucuacucaacagucgccaguucccugguucuuuuggucucccugggggcaaucagcuucuggauguguuccaaugggucuuugcaguguagaauaugcaucuaa

SEQ ID NO: 34037 - RNA, 1698 nt, Artificial Sequence; identical to SEQ ID NO: 33945
  derived and/or modified CDS sequence (wt) from hemagglutinin__InfluenzaA__ABW39927

SEQ ID NO: 34038 - RNA, 1701 nt, Artificial Sequence
  derived and/or modified CDS sequence (wt) from hemagglutinin__InfluenzaA__ABW39938
augaagacuaucauugcuuugagcuacauucuaugucugguuuucgcucaaaaaauuccuggaaaugacaacagcacggcaacgcugugccuugggcaccaugcaguaccaaacggaacgauagugaaaacaaucacgaaugaccaaauugaaguuacuaaugcuacugagcugguucagaguuccucaacaggugaaauaugcgacaguccucaucagauccuugauggagaaaacugcacacuaauagaugcucuauugggagacccucagugugauggcuuccaaaauaagaaaugggaccuuuuuguugaacgcagcaaagccuacagcaacuguuacccuuaugaugugccggauuaugccucccuuaggucacuaguugccucauccggcacacuggaguuuaacaaugaaagcuucaauuggacuggagucacucaaaacggaacaagcucugcuugcauaaggagaucuaauaacaguuucuuuaguagauugaauugguugacccacuuaaaauucaaauacccagcauugaacgugacuaugccaaacaaugaaaaauuugacaaauuguacauuugggggguucaccacccggguacagacaaugaccaaaucuuccuguaugcucaagcaucaggaagaaucacagucucuaccaaaagaagccaacaaacuguaaucccgaauaucggaucuagacccagaguaaggaauauccccagcagaauaagcaucuauuggacaauaguaaaaccgggagacauacuuuugauuaacagcacagggaaucuaauugcuccuagggguuacuucaaaauacgaagugggaaaagcucaauaaugagaucagaugcacccauuggcaaaugcaauucugaaugcaucacuccaaauggaagcauucccaaugacaaaccauuccaaaauguaaacaggaucacauacggggccugucccagauauguuaagcaaaacacucugaaauuggcaacagggaugcgaaauguaccagagaaacaaacuagaggcauauuuggcgcaaucgcggguuucauagaaaaugguugggagggaaugguggaugguugguacgguuucaggcaucaaaauucugagggaauaggacaagcagcagaucucaaaagcacucaagcagcaaucgaucaaaucaaugggaagcugaauagguugaucgggaaaaccaacgagaaauuccaucagauugaaaaagaauucucagaagucgaagggaggauucaggaccuugagaaauauguugaggacaccaaaauagaucucuggucauacaacgcggagcuucuuguugcccuggagaaccaacauacaauugaucuaacugacucagaaaugaacaaacuguuugaaaaaacaaagaagcaacugagggaaaaugcugaggauaugggcaaugguuguuucaaaauauaccacaaaugugacaaugccugcauaggaucaaucagaaauggaacuuaugaccacgaugcauacagagaugaagcauuaaacaaccgguuccagaucaagggcguugagcugaagucaggauacaaagauuggauccuauggauuuccuuugccauaucauguuuuuugcuuuguguugcuuuguugggguucaucaugugggccugccaaaaaggcaacauuaggugcaacauuugcauuuga

SEQ ID NO: 34039 - RNA, 1698 nt, Artificial Sequence; identical to SEQ ID NO: 34002
  derived and/or modified CDS sequence (wt) from hemagglutinin__InfluenzaA__ABW39949

SEQ ID NO: 34040 - RNA, 1698 nt, Artificial Sequence; identical to SEQ ID NO: 33967
  derived and/or modified CDS sequence (wt) from hemagglutinin__InfluenzaA__ABW39960

SEQ ID NO: 34041 - RNA, 1698 nt, Artificial Sequence; identical to SEQ ID NO: 33934
  derived and/or modified CDS sequence (wt) from hemagglutinin__InfluenzaA__ABW39982

SEQ ID NO: 34042 - RNA, 1698 nt, Artificial Sequence
  derived and/or modified CDS sequence (wt) from hemagglutinin__InfluenzaA__ABW39993
augaaaguaaaacuacuuguucuguuauguacauuuacagcuacauaugcagacacaauauguauaggcuaccaugccaacaacucgaccgacacuguugacacaguacuugagaagaaugugacagugacacacucugucaaccuacuugaggacagucacaauggaaaacuaugucuacuaaaaggaauagccccacuacaauuggguaauugcagcguugccggauggaucuuaggaaacccagaaugcgaauuacugauuuccaaggaaucaugguccuacauuguagaaacaccaaauccugagaauggaacauguuacccaggauauuucgcugacuaugaggagcugagggagcaauugaguucaguaucuucauuugagagguucgaaauauuccccaaagagagcucauggcccaaccacaccguaaccggaguaucagcaucaugcucccauaacgggaaaagcaguuuuuacagaaauuugcuauggcugacggggaagaaugguuuguauccaaaccugagcaaguccuaugcaaacaacaaagagaaagaaguccuuguacugugggguguucaucacccgccuaacauaggggaccaaagggcccucuaucauacagaaaaugcuuaugucucuguagugucuucacauuauagcagaagauucaccccagaaauagccaaaagaccuaaggugagagaucaggaaggaagaaucaacuacuacuggacucugcuggaacccggggauacaauaauauuugaggcaaauggaaaucuaauagcgccaagguuugcuuucgcacugaguagaggcuuuggaucaggaaucaucaccucaaaugcaccaaugggugaaugugaugcgaagugucaaacaccucagggagcuauaaacaguagucuuccuuuccagaauguacacccagucacaauaggagaguguccaaaguaugucaggagugcaaaauuaagaaugguuacaggacuaaggaacauuccauccauucaauccagagguuuguuuggagccauugccgguuucauugaagggggguggacuggaaugguagaugguugguaugguuaucaccaucagaaugagcaaggaucuggguaugcugcagaucaaaaaagcacacaaaaugccauuaacgggauuacaaacaaggugaauucuguaauugagaaaaugaacacucaauucacagcugugggcaaagaauucaacaaauuggaaagaaggauggaaaacuuaaauaaaaagguugaugauggguuucuagacauuuggacauauaacgcagaauuguugguucuacuggaaaaugaaaggacuuuggacuuccaugacuccaacgugaagaaucuguaugagaaaguaaaaagccaauuaaagaauaaugccaaagaaauaggaaacggguguuuugaauuuuaucacaaguguaacgaugaaugcauggagagugugaaaaauggaacuuaugacuauccaaaauauuccgaagaaucaaaguugaacagggagaaaauugauggagugaaauuggaaucaaugggagucuaucagauucuggcgaucuacucaacagucgccaguucccugguucuuuuggucucccugggggcaaucagcuucuggauguguuccaaugggucuuugcaguguagaauaugcaucuaa

SEQ ID NO: 34043 - RNA, 1698 nt, Artificial Sequence; identical to SEQ ID NO: 33938
  derived and/or modified CDS sequence (wt) from hemagglutinin__InfluenzaA__ABW40004

SEQ ID NO: 34044 - RNA, 1698 nt, Artificial Sequence
  derived and/or modified CDS sequence (wt) from hemagglutinin__InfluenzaA__ABW40015
augaaagugaaacuacugguucuguuauguacauuuacagcuacauaugcagacacaauauguauaggcuaccaugccaacaacucgaccgacacuguugacacaguacuugagaagaaugugacagugacacacucugucaaccuacuugaggaccgucacaauggaaaacuaugucuacuaaaaggaauagccccacuacaauuggguaauugcagcguugccggauggaucuuaggaaacccagaaugcgaauuacugauuuccaaggaaucauggucuuacauuguagaaacaccaaauccugagaauggaacauguuacccaggguauuucgccgacuaugaggagcugagggagcaauugaguucaguaucuucauuugagagguucgaaauauuccccaaagagagcucauggcccaaccacaccguaaccggaguaucagcaucaugcucccauaacgggaaaagcaguuuuuacagaaauuugcuauggcugacgggaaagaaugguuuguacccaaaccugagcagauccuaugcaaacaacaaagagaaagaaguccuuguacugugggguguucaucacccgccuaacauaggggaccaaagggcccucuaucauacagaaaaugcuuaugucucuguagugucuucacauuauagcagaagauucaccccagaaauagccaaaagacccaaggugagagaucaggaaggaagaaucaauuacuacuggacucuacuggaacccggggauacaauaauauuugaggcaaaugggaaucuaauagcgccaagguuugcuuucgcacugaguagaggcuuuggaucaggaaucaucaccucaaaugcaccaauggaugaaugugaugcgaagugucaaacaccucagggagcuauaaacagcagucuuccuuuccagaauguacacccagucacaauaggagaguguccaaaguaugucaggagugcaaaauuaagaaugguuacaggacuaaggaacaucccauccauucaauccagagguuuguuuggagccauugccgguuucauugaagggggguggacuggaaugguagaugguugguaugguuaucaccaccagaaugagcaaggaucuggguaugcugcagaucaaaaaagcacacaaaaugccauuaacgggauuacaaacaaggugaauucugugauugagaaaaugaacacucaauucacagcugugggcaaagaauucaacaaauuggaaagaagaauggaaaacuuaaauaaaaaaguugaugauggguuucuagacauuuggacguauaacgcagaguuguugguucuacuggaaaaugaaaggacuuuggacuuccaugacuccaacgugaagaaucuguaugagaaaguaaaaagccaauuaaagaauaaugccaaagaaauaggaaacggguguuuugaauucuaucacaaguguaacgaugaaugcauggagagugugaaaaauggaacuuaugacuauccaaaauauuccgaagaaucaaaguuaaacagggagaaaauugauggagugaaauuggaaucaaugggagucuaucagauucuggcgaucuacucaacagucgccaguucccugguucuuuuggucucccugggggcaaucagcuucuggauguguuccaaugggucuuugcaguguagaauaugcaucuaa

SEQ ID NO: 34045 - RNA, 1701 nt, Artificial Sequence; identical to SEQ ID NO: 33999
  derived and/or modified CDS sequence (wt) from hemagglutinin__InfluenzaA__ABW40026

SEQ ID NO: 34046 - RNA, 1698 nt, Artificial Sequence; identical to SEQ ID NO: 33930
  derived and/or modified CDS sequence (wt) from hemagglutinin__InfluenzaA__ABW40037

SEQ ID NO: 34047 - RNA, 1698 nt, Artificial Sequence
  derived and/or modified CDS sequence (wt) from hemagglutinin__InfluenzaA__ABW40048
augaaaguaaaacuacugguucuguuauguacauuuacagcuacauaugcagacacaauauguauaggcuaccaugccaacaacucgaccgacacugucgacacaguacuugagaagaaugugacaguaacacacucugucaaccuacuugaggacagucacaauggaaaacuaugucuacuaaaaggaauagccccacuacaauuggguaauugcagcguugccggauggaucuuaggaaacccagaaugcgaauuacugauuuccaaggaaucaugguccuacauuguagagacaccaaauccugagaauggaacauguuacccaggguauuucgccgacuaugaggagcugagagagcaauugaguucaguaucuucauuugagagguucgaaauauuccccaaagagagcucauggcccaaccacaccguaaccggaguaucagcaucaugcucccauaacgggaaaagcaguuuuuacagaaauuugcuauggcugacggggaagaaugguuuguauccaaaccugagcaaguccuaugcaaacaacaaagagaaagaaguccuuguacugugggguguucaucacccgccuaacauaggggaccaaaaggcccucuaucauacagaaaaugcuuauguuucuguagugucuucacauuauagcagaagauucaccccagaaauagccaaaagacccaaggugagagaucaggaaggaagaaucaacuacuacuggacucugcuugaacccggggauacaauaauauuugaggcaaauggaaaucuaauagcaccaagguuugcuuucgcacugaguagaggcuuuggaucaggaaucaucaccucaaaugcaccaauggaugaaugugaugcgaaaugucaaacaccucagggagcuauaaacagcagucuuccuuuccagaauguacacccagucacaauaggagaguguccaaaguaugucaggaguacaaaauuaagaaugguuacaggacuaaggaacaucccauccauucaauccagagguuuguuuggagccauugccgguuucauugaagggggguggacuggaaugguagaugguugguaugguuaucaccaucagaaugagaaaggaucuggguaugcugcagaucaaaaaagcacacaaaaugccauuaacggaauuacaaacaaggugaauuccguaauugagaaaaugaacacucaauucacagcugugggcaaagaauucaacaaauuggaaagaaggauggaaaacuuaaauaaaaaaguugaugauggguuucuagacauuuggacauauaacgcagaauuguugguucuacuggaaaaugaaaggacuuuggacuuccaugacuccaacgugaagaaucuguaugagaaaguaaaaagccaauuaaagaauaaugccaaagaaauaggaaacggguguuuugaauucuaucacaaguguaacgaugaaugcauggagagugugaaaaauggaacuuaugacuauccaaaauauuccgaagaaucaaaguugaacagggagaaaauugauggagugaaauuggaaucaaugggagucuaucagauuuuggcgaucuacucaacagucgccaguucccugguucuuuuggucucccugggggcaaucagcuucuggauguguuccaaugggucuuugcaguguagaauaugcaucuaa

SEQ ID NO: 34048 - RNA, 1698 nt, Artificial Sequence; identical to SEQ ID NO: 33937
  derived and/or modified CDS sequence (wt) from hemagglutinin__InfluenzaA__ABW40059

SEQ ID NO: 34049 - RNA, 1698 nt, Artificial Sequence
  derived and/or modified CDS sequence (wt) from hemagglutinin__InfluenzaA__ABW40070
augaaaguaaaacuacugguccuguuaugcacauuuacagcuacauaugcagacacaauauguauaggcuaccaugcuaacaacucgaccgacacuguugacacaguacuugaaaagaaugugacagugacacacucugucaaccugcuugagaacagucacaauggaaaacuaugucuauuaaaaggaauagccccacuacaauuggguaauugcagcguugccggguggaucuuaggaaacccagaaugcgaauuacugauuuccaaggagucaugguccuacauuguagaaaaaccaaauccugagaauggaacauguuacccagggcauuucgcugacuaugaggaacugagggagcaauugaguucaguaucuucauuuaagagguucgaaauauuccccaaagaaagcucauggcccaaccacaccguaaccggagugucagcaucaugcucccauaauggggaaagcaguuuuuacagaaauuugcuauggcugacggggaagaaugguuuguacccaaaccugagcaaguccuaugcaaacaacaaagaaaaagaaguccuuguacuaugggguguucaucacccgccaaacauaggugaccaaaaggcccucuaucauacagaaaaugcuuaugucucuguagugucuucacauuauagcagaaaauucaccccagaaauagccaaaagacccaaaguaagagaucaagaaggaagaaucaacuacuacuggacucugcuugaacccggggauacaauaauauuugaggcaaauggaaaccuaauagcgccaagauaugcuuucgcacugaguagaggcuuuggaucaggaaucaucaacucaaaugcaccaauggauaaaugugauucgaagugccaaacaccucagggagcuauaaacagcagucuuccuuuccagaauguacacccagucacaauaggagaguguccaaaguaugucaggagugcaaaauuaaggaugguuacaggacuaaggaacaucccauccauucaauccagagguuuguuuggagccauugccgguuucauugaagggggguggacuggaaugguagaugguugguaugguuaucaucaucagaaugagcaaggaucuggcuaugcugcagaucaaaaaagcacacaaaaugccauuaaugggauuacaaacaaggugaauucuguaauugagaaaaugaacacucaauucacagcagugggcaaagaauucaacaaauuggaaagaaggauggaaaacuugaauaaaaaaguugaugauggguuuauagacauuuggacauauaaugcagaacuguugguucuacuggaaaaugaaaggacuuuggauuuccaugauuccaaugugaagaaucuguaugagaaaguaaaaagccaguuaaagaauaaugccaaagaaauaggaaauggguguuuugaauucuaucacaaguguaacgaugaaugcauggagaguguaaagaauggaacuuaugacuauccaaaauauuccgaagaaucaaaguuaaacagggagaaaauugauggagugaaauuggaaucaaugggagucuaucagauucuggcgaucuacucaacagucgccaguucucugguucuuuuggucucccugggggcaaucagcuucuggauguguuccaaugggucuuugcaguguagaauaugcaucuaa

SEQ ID NO: 34050 - RNA, 1701 nt, Artificial Sequence
  derived and/or modified CDS sequence (wt) from hemagglutinin__InfluenzaA__ABW40081
augaagacuaucauugcuuugagcuacauucuaugucugguuuucgcucaaaaacuuccuggaaaugacaacagcacggcaacgcugugccuugggcaccaugcaguaccaaacggaacgauagugaaaacaaucacgaaugaccaaauugaaguuacuaaugcuacugagcugguucagaguuccucaacaggugaaauaugcgacaguccucaucagauccuugauggagaaaacugcacacuaauagaugcucuauugggggacccucagugugauggcuuccaaaauaagaaaugggaccuuuuuguugaacgcagcaaagccuacagcaacuguuacccuuaugaugugccggauuaugccucccuuaggucacuaguugccucauccggcacacuggaguuuaacaaugaaagcuucaauuggacuggagucacucaaaacggaacaagcucugcuugcauaaggagaucuaauaacaguuucuuuaguagauugaauugguugacccacuuaaaauucaaauacccagcauugaacgugacuaugccaaacaaugaaaaauuugacaaauuguacauuugggggguucaccacccggguacggacaaugaccaaaucuuccuguaugcucaagcaucaggaagaaucacagucucuaccaaaagaagccaacaaacuguaaucccgaauaucggaucuagacccagaguaaggaauauccccagcagaauaagcaucuauuggacaauaguaaaaccgggagacauacuuuugauuaacagcacagggaaucuaauugcuccuagggguuacuucaaaauacgaagugggaaaagcucaauaaugagaucagaugcacccauuggcaaaugcaauucugaaugcaucacuccaaauggaagcauucccaaugacaaaccauuccaaaauguaaacaggaucacauacggggccugucccagauauguuaagcaaaacacucugaaauuggcaacagggaugcgaaauguaccagagaaacaaacuagaggcauauuuggcgcaaucgcggguuucauagaaaaugguugggagggaaugguggaugguugguacgguuucaggcaucaaaauucugagggaauaggacaagcagcagaucucaaaagcacucaagcagcaaucgaucaaaucaaugggaagcugaauagguugaucgggaaaaccaacgagaaauuccaucagauugaaaaagaauucucagaagucgaagggaggauucaggaccuugagaaauauguugaggacaccaaaauagaucucuggucauacaacgcggagcuucuuguugcccuggagaaccaacauacaauugaucuaacugacucagaaaugaacaaacuguuugaaaaaacaaagaagcaacugagggaaaaugcugaggauaugggcaaugguuguuucaaaauauaccacaaaugugacaaugccugcauaggaucaaucagaaauggaacuuaugaccacgauguauacagagaugaagcauuaaacaaccgguuccagaucaagggcguugagcugaagucaggauacaaagauuggauccuauggauuuccuuugccauaucauguuuuuugcuuuguguugcuuuguugggguucaucaugugggccugccaaaaaggcaacauuaggugcaacauuugcauuuga

SEQ ID NO: 34051 - RNA, 1698 nt, Artificial Sequence
  derived and/or modified CDS sequence (wt) from hemagglutinin__InfluenzaA__ABW40092
augaaaguaaaacuacugauucuguuauguacauuuacagcuacauaugcagacacaauauguauaggcuaccaugccaacaacucgaccgacacuguugacacaguacuugagaagaaugugacagugacacacucugucaaccuacuugaggacagucacaauggaaaacuaugucuacuaaaaggaauagccccacuacaauuggguaauugcagcguugccggauggaucuuaggaaacccagaaugcgaauuacugauuuccaaggaaucaugguccuacauuguagagacaccaaauccugagaauggaacauguuacccaggguauuucgccgacuaugaggagcugagagagcaauugaguucaguaucuucauuuaagagguucgaaauauuccccaaagagagcucauggcccaaccacaccguaaccggaguaucagcaucaugcucccauaacgggaaaagcaguuuuuacagaaauuugcuauggcugacggggaagaaugguuuguauccaaaccugagcaaguccuaugcaaacaacaaagagaaagaaguccuuguacugugggguguucaucacccgccuaacauaggggaccaaagggcccucuaucauacagaaaaugcuuaugucucuguagugucuucacauuauagcagaagauucaccccagaaauagccaaaagacccaaggugagagaucaggaaggaagaaucaacuacuacuggacucugcuugaacccggggauacaauaauauuugaggcaaauggaaaucuaauagcgccaagguuugcuuucgcacugaguagaggcuuuggaucaggaaucaucaccucaaaugcaccaauggaugaaugugaugcgaaaugucaaacaccucagggagcuauaaacagcagucuuccuuuccagaauguacacccagucacaauaggagaguguccaaaguaugucaggaguacaaaauuaagaaugguuacaggacuaaggaacaucccauccauucaauccagagguuuauuuggagccauugccgguuucauugaagggggguggacuggaaugguagaugguugguaugguuaucaccaucagaaugagcaaggaucuggguaugcugcagaucaaaaaagcacacaaaaugccauuaacgggauuacaaacaaggugaauucuguaauugagaaaaugaacacucaauucacagcugugggcaaagaauucaacaaauuggaaagaaggauggaaaacuuaaauaaaaaaguugaugauggguuccuagacauuuggacauauaacgcagaauuguugguucuacuggaaaaugaaaggacuuuggacuuccaugacuccaacgugaagaaucuguaugagaaaguaaaaagccaauuaaagaauaaugccaaagaaauaggaaacggguguuuugaauucuaucacaaguguaacgaugaaugcauggagagugugaaaaauggaacuuaugacuauccaaaauauuccgaagaaucaaaguugaacagggagaaaauugauggagugaaauuggaaucaaugggagucuaucagauuuuggcgaucuacucaacagucgccaguucccugguucuuuuggucucccugggggcaaucagcuucuggauguguuccaaugggucuuugcaguguagaauaugcaucuaa

SEQ ID NO: 34052 - RNA, 1698 nt, Artificial Sequence; identical to SEQ ID NO: 33969
  derived and/or modified CDS sequence (wt) from hemagglutinin__InfluenzaA__ABW40103

SEQ ID NO: 34053 - RNA, 1698 nt, Artificial Sequence
  derived and/or modified CDS sequence (wt) from hemagglutinin__InfluenzaA__ABW40114
augaaaguaaaacuacugauucuguuauguacauuuacagcuacauaugcagacacaauauguauaggcuaccaugccaacaacucgaccgacacuguugacacaguacuugagaagaaugugacagugacacacucugucaaccuacuugaggacagucacaauggaaaacuaugucuacuaaaaggaauagccccacuacaauuggguaauugcagcguugccggauggaucuuaggaaacccagaaugcgaauuacugauuuccaaggaaucaugguccuacauuguagagacaccaaauccugagaauggaacauguuacccaggguauuucgccgacuaugaggagcugagagagcaauugaguucagugucuucauuugagagguucgaaauauuccccaaagagagcucauggcccaaccacaccguaaccggaguaucaacaucaugcucccauaacgggaaaagcaguuuuuacagaaauuugcuauggcugacggggaagaaugguuuguauccaaaccugagcaaguccuaugcaaacaacaaagagaaagaaguccuuguacugugggguguucaucacccgccuaacauagggaaccaaagggcccucuaucauacagaaaaugcuuaugucucuguagugucuucacauuauagcagaagauucaccccagaaauagccaaaagacccaaggugagagaucaggaaggaagaaucaacuacuacuggacucugcuugaacccggggauacaauaauauuugaggcaaauggaaaucuaauagcgccaagguuugcuuucgcacugaguagaggcuuuggaucaggaaucaucaccucaaaugcaccaauggaugaaugugaugcgaaaugucaaacaccucagggagcuauaaacagcagucuuccuuuccagaauguacacccagucacaauaggagaguguccaaaguaugucaggaguacaaaauuaagaaugguuacaggacuaaggaacaucccauccauucaauccagagguuuauuuggagccauugccgguuucauugaagggggguggacuggaaugguagaugguugguaugguuaucaccaucagaaugagcaaggaucuggguaugcugcagaucaaaaaagcacacaaaaugccauuaacgggauuacaaacaaggugaauucuguaauugagaaaaugaacacucaauucacagcugugggcaaagaauucaacaaauuggaaagaaggauggaaaacuuaaauaaaaaaguugaugauggguuucuagacauuuggacauauaacgcagaauuguugguucuacuggaaaaugaaaggacuuuggacuuccaugacuccaacgugaagaaucuguaugagaaaguaaaaagccaauuaaagaauaaugccaaagaaauaggaaacggguguuuugaauucuaucacaaguguaacgaugaaugcauggagagugugaaaaauggaacuuaugacuauccaaaauauuccgaagaaucaaaguugaacagggagaaaauugauggagugaaauuggaaucaaugggagucuaucagauuuuggcgaucuacucaacagucgccaguucccugguucuuuuggucucccugggggcaaucagcuucuggauguguuccaaugggucuuugcaguguagaauaugcaucuaa

SEQ ID NO: 34054 - RNA, 1698 nt, Artificial Sequence
  derived and/or modified CDS sequence (wt) from hemagglutinin__InfluenzaA__ABW40125
augaaaguaaaacuacugauucuguuauguacauuuacagcuacauaugcagacacaauauguauaggcuaccaugccaacaacucgaccgacacuguugacacaguacuugagaagaaugugacagugacacacucugucaaccuacuugaggacagucacaauggaaaacuaugucuacuaaaaggaauagccccacuacaauuggguaauugcagcguugccggauggaucuuaggaaacccagaaugcgaauugcugauuuccaaggaaucaugguccuacauuguagagacaccaaauccugagaauggaacauguuacccaggguauuucgccgacuaugaggagcugagagagcaauugaguucaguaucuucauuugagagguucgaaauauuccccaaagagagcucauggcccaaccacaccguaaccggaguaucagcaucaugcucccauaacgggaaaagcaguuuuuacagaaauuugcuauggcugacggggaagaaugguuuguauccaaaccugagcaaguccuaugcaaacaacaaagagaaagaaguccuuguacugugggguguucaucacccgccuaacauaggggaccaaagggcccucuaucauacagaaaaugcuuaugucucuguagugucuucacauuauagcagaagauucaccccagaaauagccaaaagacccaaggugagagaucaggaaggaagaaucaacuacuacuggacucugcuugaacccggggauacaauaauauuugaggcaaauggaaaucuaauagcaccaagguuugcuuucgcacugaguagaggcuuuggaucaggaaucaucaccucaaaugcaccaauggaugaaugugaugcgaaaugucaaacaccucagggagcuauaaacagcagucuuccuuuccagaauguacacccagucacaauaggagaguguccaaaguaugucaggaguacaaaauuaagaaugguuacaggacuaaggaacaucccauccauucaauccagagguuuauuuggagccauugccgguuucauugaagggggguggacuggaaugguagaugguugguaugguuaucaccaucagaaugagcaaggaucuggguaugcugcagaucaaaaaagcacacaaaaugccauuaacgggauuacaaacaaggugaauucuguaauugagaaaaugaacacucaauucacagcugugggcaaagaauucaacaaauuggaaagaaggauggaaaacuuaaauaaaaaaguugaugauggguuucuagacauuuggacauauaacgcagaauuguugguucuacuggaaaaugaaaggacuuuggacuuccaugacuccaacgugaagaaucuguaugagaaaguaaaaagccaauuaaagaauaaugccaaagaaauaggaaacggguguuuugaauucuaucacaaguguaacgaugaaugcauggagagugugaaaaauggaacuuaugacuauccaaaauauuccgaagaaucaaaguugaacagggagaaaauugauggagugaaauuggaaucaaugggagucuaucagauuuuggcgaucuacucaacagucgccaguucccugguucuuuuggucucccugggggcaaucagcuucuggauguguuccaaugggucuuugcaguguagaauaugcaucuaa

SEQ ID NO: 34055 - RNA, 1701 nt, Artificial Sequence
  derived and/or modified CDS sequence (wt) from hemagglutinin__InfluenzaA__ABW40136
augaagacuaucauugcuuugagcuacauucuaugucugguuuucgcucaaaaacuuccuggaaaugacaacagcacggcaacgcugugccuugggcaccaugcaguaccaaacggaacgauagugaaaacaaucacgaaugaccaaauugaaguuacuaaugcuacugagcugguucagaguucuucaacaggugaaauaugcgacaguccucaucagauccuugauggagaaaacugcacacuaauagaugcucuauugggagacccucagugugauggcuuccaaaauaagaaaugggaccuuuuuguugaacgcagcaaagccuacagcaacuguuacccuuaugaugugccggauuaugccucccuuaggucacuaguugccucauccggcacacuggaguuuaacaaugaaagcuucaauuggacuggagucacucaaaacggaacaagcucugcuugcauaaggagaucuaauaacaguuucuuuaguagauugaauugguugacccacuugaaauucaaauacccagcauugaacgugacuaugccaaacaaugaaaaauuugacaaauuguacauuugggggguucaccacccggguacggacaaugaccaaaucuuccuguaugcucaagcaucaggaagaaucacagucucuaccaaaagaagccaacaaacuguaaucccgaauaucggaucuagacccagaguaaggaauauccccagcagaauaagcaucuauuggacaauaguaaaaccgggagacauacuuuugauuaacagcacagggaaucuaauugcuccuagggguuacuucaaaauacgaagugggaaaagcucaauaaugagaucagaugcacccauuggcaaaugcaauucugaaugcaucacuccaaauggaagcauucccaaugacaaaccauuccaaaauguaaacaggaucacauacggggccugucccagauauguuaagcaaaacacucugaaauuggcaacagggaugcgaaauguaccagagaaacaaacuagaggcauauuuggcgcaaucgcggguuucauagaaaaugguugggagggaaugguggaugguugguacgguuucaggcaucaaaauucugagggaauaggacaagcagcagaucucaaaagcacucaagcagcaaucgaucaaaucaaugggaagcugaauagguugaucgggaaaaccaacgagaaauuccaucagauugaaaaagaauucucagaagucgaagggagaauucaggaccuugagaaauauguugaggacaccaaaauagaucucuggucauacaacgcggagcuucuuguugcccuggagaaccaacauacaauugaucuaacugacucagaaaugaacaaacuguuugaaaaaacaaagaagcaacugagggaaaaugcugaggauaugggcaaugguuguuucaaaauauaccacaaaugugacaaugccugcauaggaucaaucagaaauggaacuuaugaccacgauguauacagagaugaagcauuaaacaaccgguuccagaucaagggcguugagcugaagucaggauacaaagauuggauccuauggauuuccuuugccauaucauguuuuuugcuuuguguugcuuuguugggguucaucaugugggccugccaaaaaggcaacauuaggugcaacauuugcauuuga

SEQ ID NO: 34056 - RNA, 1698 nt, Artificial Sequence; identical to SEQ ID NO: 33957
  derived and/or modified CDS sequence (wt) from hemagglutinin__InfluenzaA__ABW40147

SEQ ID NO: 34057 - RNA, 1698 nt, Artificial Sequence
  derived and/or modified CDS sequence (wt) from hemagglutinin__InfluenzaA__ABW40158
augaaaguaaaacuauugguucuguuauguacauuuacagcuacauaugcagacacaauauguauaggcuaccaugccaacaacucgaccgacacuguugacacaguacuugagaagaaugugacagugacacacucugucaaccuacuugaggacagucacaauggaaaacuaugucuacuaaaaggaauagccccacuacaauuggguaauugcagcguugccggauggaucuuaggaaacccagaaugcgaauuacugauuuccaaggaaucaugguccuacauuguagagacaccaaauccugagaauggaacauguuacccaggguauuucgccgacuaugaggagcugagagagcaauugaguucaguaucuucauuugagagguucgaaauauuccccaaagagagcucauggcccaaccacaccguaaccggaguaucagcaucaugcucccauaacgggaaaagcaguuuuuacagaaauuugcuauggcugacggggaagaaugguuuguauccaaaccugagcaaguccuaugcaaacaacaaagagaaagaaguccuuguacugugggguguucaucacccgccuaacauaggggaccaaagggcccucuaucauacagaaaaugcuuaugucucuguagugucuucacauuauagcagaagauucaccccagaaauagccaaaagacccaaggugagagaucaggaaggaagaaucaacuacuacuggacucugcuugaacccggggauacaauaauauuugaggcaaauggaaaucuaauagcgccaagguuugcuuucgcacugaguagaggcuuuggaucaggaaucaucaccucaaaugcaccaauggaugaaugugaugcgaaaugucaaacaccucagggagcuauaaacagcagucuuccuuuccagaauguacacccagucacaauaggagaguguccaaaguaugucaggaguacaaaauuaagaaugguuacaggacuaaggaacaucccauccauucaauccagagguuuguuuggagccaucgccgguuucauugaagggggguggacuggaaugguagaugguugguaugguuaucaccaucagaaugagcaaggaucuggguaugcugcugaucaaaaaagcacacaaaaugccauuaacgggauuacaaacaaggugaauucuguaauugagaaaaugaacacucaauucacagcugugggcaaagaauucaacaaauuggaaagaaggauggaaaacuuaaauaaaaaaguugaugauggguuucuagacauuuggacauauaacgcagaauuguugguucuacuggaaaaugaaaggacuuuggacuuccaugacuccaacgugaagaaucuguaugagaaaguaaaaagccaauuaaagaauaaugccaaagaaauaggaaacggguguuuugaauucuaucacaaguguaacgaugaaugcauggagagugugaaaaauggaacuuaugacuauccaaaauauuccgaagaaucaaaguugaacagggagaaaauugauggagugaaauuggaaucaaugggagucuaucagauuuuggcgaucuacucaacagucgccaguucccugguucuuuuggucucccugggggcaaucagcuucuggauguguuccaaugggucuuugcaguguagaauaugcaucuaa

SEQ ID NO: 34058 - RNA, 1698 nt, Artificial Sequence; identical to SEQ ID NO: 33926
  derived and/or modified CDS sequence (wt) from hemagglutinin__InfluenzaA__ABW40180

SEQ ID NO: 34059 - RNA, 1701 nt, Artificial Sequence
  derived and/or modified CDS sequence (wt) from hemagglutinin__InfluenzaA__ABW40191
augaagacuaucauugcuuugagcuacauucuaugucugguuuucgcucaaaaacuucccggaaaugacaacagcacggcaacgcugugccuugggcaccaugcaguaccaaacggaacgauagugaaaacaaucacgaaugaccaaauugaaguuacuaaugcuacugagcugguucagaguuccucaacaggugaaauaugcgacaguccucaucagauccuugauggagaaaacugcacacuaauagaugcucuauugggagacccucagugugauggcuuccaaaauaagaaaugggaccuuuuuguugaacgcagcaaagccuacagcaacuguuacccuuaugaugugccggauuaugccucccuuaggucacuaguugccucauccggcacacuggaguuuaacaaugaaagcuucaauuggacuggagucacucaaaacggaacaagcucugcuugcauaaggagaucuaauaacaguuucuuuaguagauugaauugguugacccacuuaaaauucaaauacccagcauugaacgugacuaugccaaacaaugaaaaauuugacaaauuguacauuugggggguucaccacccggguacggacaaugaccaaaucuuccuguaugcucaagcaucaggaagaaucacagucucuaccaaaagaagccaacaaacuguaaucccgaauaucggaucuagacccagaguaaggaauauccccagcagaauaagcaucuauuggacaauaguaaaaccgggagacauacuuuugauuaacagcacagggaaucuaauugcuccuagggguuacuucaaaauacgaagugggaaaagcucaauaaugagaucagaugcacccauuggcaaaugcaauucugaaugcaucacuccaaauggaagcauucccaaugacaaaccauuccaaaauguaaacaggaucacauacggggccugucccagauauguuaagcaaaacacucugaaauuggcaacagggaugcgaaauguaccagagaaacaaacuagaggcauauuuggcgcaaucgcggguuucauagaaaaugguugggagggaaugguggaugguugguacgguuucaggcaucaaaauucugagggaauaggacaagcagcagaucucaaaagcacucaagcagcaaucgaucaaaucaaugggaagcugaauagguugaucgggaaaaccaacgagaaauuccaucagauugaaaaagaauucucagaagucgaagggagaauucaggaccuugagaaauauguugaggacaccaaaauagaucucuggucauacaacgcggagcuucuuguugcccuggagaaccaacauacaauugaucuaacugacucagaaaugaacaaacuguuugaaaaaacaaagaagcaacugagggaaaaugcugaggauaugggcaaugguuguuucaaaauauaccacaaaugugacaaugccugcauaggaucaaucagaaauggaacuuaugaccacgauguauacagagaugaagcauuaaacaaccgguuccagaucaagggcguugagcugaagucaggauacaaagauuggauccuauggauuuccuuugccauaucauguuuuuugcuuuguguugcuuuguugggguucaucaugugggccugccaaaaaggcaacauuaggugcaacauuugcauuuga

SEQ ID NO: 34060 - RNA, 1698 nt, Artificial Sequence
  derived and/or modified CDS sequence (wt) from hemagglutinin__InfluenzaA__ABW40202
augaaaguaaaacuacuuguucuguuauguacauuuacagcuacauaugcagacacaauauguauaggcuaccaugccaacaacucgaccgacacuguugacacaguacuugagaagaaugugacagugacacacucugucaaccuacuugaggacagucacaauggaaaacuaugucuacuaaaaggaauagccccacuacaauuggguaauugcagcguugccggauggaucuuaggaaacccagaaugcgaauuacugauuuccaaggaaucaugguccuacauuguagaaacaccaaauccugagaauggaacauguuacccaggauauuucgccgacuaugaggagcugagggagcaauugaguucaguaucuucauuugagagguucgaaauauuccccaaagagagcucauggcccaaccacaccguaaccggaguaucagcaucaugcucccauaacgggaaaagcaguuuuuacagaaauuugcuauggcugacggggaagaaugguuuguauccaaaccugagcaaguccuaugcaaacaacaaagagaaagaaguccuuguacugugggguguucaucacccgccuaacauaggggaccaaagggcccucuaucauacagaaaaugcuuaugucucuguagugucuucacauuauagcagaagauucaccccagaaauagccaaaagacccaaggugagagaucaggaaggaagaaucaacuacuacuggacucugcuggaacccggggauacaauaauauuugaggcaaauggaaaucugauagcgccaagguuugcuuucgcacugaguagaggcuuuggaucaggaaucaucaccucaaaugcaccaaugggugaaugugaugcgaagugucaaacaccucagggagcuauaaacaguagucuuccuuuccagaauguacacccagucacaauaggagaguguccaaaguaugucaggagugcaaaauuaagaaugguuacaggacuaaggaacaucccauccauucaauccagagguuuguuuggagccauugccgguuucauugaagggggguggacuggaaugguagaugguugguaugguuaucaccaucagaaugagcaaggaucuggguaugcugcagaucaaaaaagcacacaaaaugccauuaacgggauuacaaacaaggugaauucuguaauugagaaaaugaacacucaauucacagcugugggcaaagaauucaacaaauuggaaagaaggauggaaaacuuaaauaaaaagguugaugauggguuucuagacauuuggacauauaacgcagaauuguugguucuacuggaaaaugaaaggacuuuggacuuccaugacuccaacgugaagaaucuguaugagaaaguaaaaagccaauuaaagaauaaugccaaagaaauaggaaacggguguuuugaauucuaucacaaguguaacgaugaaugcauggagagugugaaaaauggaacuuaugacuauccaaaauauuccgaagaaucaaaguugaacagggagaaaauugauggagugaaauuggaaucaaugggagucuaucagauucuggcgaucuacucaacagucgccaguucccugguucuuuuggucucccugggggcaaucagcuucuggauguguuccaaugggucuuugcaguguagaauaugcaucuaa

SEQ ID NO: 34061 - RNA, 1698 nt, Artificial Sequence; identical to SEQ ID NO: 33938
  derived and/or modified CDS sequence (wt) from hemagglutinin__InfluenzaA__ABW40213

SEQ ID NO: 34062 - RNA, 1698 nt, Artificial Sequence; identical to SEQ ID NO: 33938
  derived and/or modified CDS sequence (wt) from hemagglutinin__InfluenzaA__ABW40224

SEQ ID NO: 34063 - RNA, 1698 nt, Artificial Sequence; identical to SEQ ID NO: 33926
  derived and/or modified CDS sequence (wt) from hemagglutinin__InfluenzaA__ABW40235

SEQ ID NO: 34064 - RNA, 1701 nt, Artificial Sequence
  derived and/or modified CDS sequence (wt) from hemagglutinin__InfluenzaA__ABW40246
augaagacuaucauugcuuugagcuacauucuaugucugguuuucgcucaaaaacuuccuggaaaugacaacagcacggcaacgcugugccuugggcaccaugcaguaccaaacggaacgauagugaaaacaaucacgaaugaccaaauugaaguuacuaaugcuacugagcugguucagaguuccucaacaggugaaauaugcgacaguccucaucagauccuugauggagaaaacugcacacuaauagaugcucuauugggagacccucagugugauggcuuccaaaauaagaaaugggaccuuuuuguugaacgcagcaaagccuacagcaacuguuacccuuaugaugugccggauuaugccucccuuaggucacuaguugccucauccggcacacuggaguuuaacaaugaaagcuucaauuggacuggagucacucaaaacggaacaagcucugcuugcauaaggagaucuaauaacaguuucuuuaguagauugaauugguugacccacuuaaaauucaaauacccagcauugaacgugacuaugccaaacaaugaaaaauuugacaaauuguacauuugggggguucaccacccggguacggacaaugaccaagucuuccuguaugcucaagcaucaggaagaaucacagucucuaccaaaagaagccaacaaacuguaaucccgaauaucggaucuagacccagaguaaggaauauccccagcagaauaagcaucuauuggacaauaguaaaaccgggagacauacuuuugauuaacagcacagggaaucuaauugcuccuagggguuacuucagaauacgaagugggaaaagcucaauaaugagaucagaugcacccauuggcaaaugcaauucugaaugcaucacuccaaauggaagcauucccaaugacaaaccauuccaaaauguaaacaggaucacauacggggccugucccagauauguuaagcaaaacacucugaaauuggcaacagggaugcgaaauguaccagagaaacaaacuagaggcauauuuggcgcaaucgcggguuucauagaaaaugguugggagggaaugguggaugguugguacgguuucaggcaucaaaauucugagggaauaggacaagcagcagaucucaaaagcacucaagcagcaaucgaucaaaucaaugggaagcugaauagguugaucgggaaaaccaacgagaaauuccaucagauugaaaaagaauucucagaagucgaagggagaauucaggaccuugagaaauauguugaggacaccaaaauagaucucuggucauacaacgcggagcuucuuguugcccuggagaaccaacauacaauugaucuaacugacucagaaaugaacaaacuguuugaaaaaacaaagaagcaacugagggaaaaugcugaggauaugggcaaugguuguuucaaaauauaccacaaaugugacaaugccugcauaggaucaaucagaaauggaacuuaugaccacgauguauacagagaugaagcauuaaacaaccgguuccagaucaagggcguugagcugaagucaggauacaaagauuggauccuauggauuuccuuugccauaucauguuuuuugcuuuguguugcuuuguugggguucaucaugugggccugccaaaaaggcaacauuaggugcaacauuugcauuuga

SEQ ID NO: 34065 - RNA, 1698 nt, Artificial Sequence
  derived and/or modified CDS sequence (wt) from hemagglutinin__InfluenzaA__ABW40257
augaaaguaaaacuacugauucuguuauguacauuuacagcuacauaugcagacacaauauguauaggcuaccaugccaacaacucgaccgacacuguugacacaguacuugagaagaaugugacagugacacacucugucaaccuacuugaggacagucacaauggaaaacuaugucuacuaaaaggaauagccccacuacaauuggguaauugcagcguugccggauggaucuuaggaaacccagaaugcgaauuacugauuuccaaggaaucaugguccuacauuguagagacaccaaauccugagaauggaacauguuacccaggguauuucgccgacuaugaggagcugagagagcaauugaguucaguaucuucauuugagagguucgaaauauuccccaaagagagcucauggcccaaccacaccguaaccggaguaucagcaucaugcucccauaacgggaaaagcaguuuuuacagaaauuugcuauggcugacggggaagaaugguuuguauccaaaccugagcaaguccuaugcaaacaacaaagagaaagaaguccuuguacugugggguguucaucacccgccuaacauaggggaccaaagggcccucuaucauacagaaaaugcuuaugucucuguagugucuucacauuauagcagaagauucaccccagaaauagccaaaagacccaaggugagagaucaggaaggaagaaucaacuacuacuggacucugcuugaacccggggauacaauaauauuugaggcaaauggaaaucuaauagcgccaagguuugcuuucgcacugaguagaggcuuuggaucaggaaucaucaccucaaaugcaccaauggaugaaugugaugcgaaaugucaaacaccucagggagcuauaaacagcagucuuccuuuccagaauguacacccagucacaauaggagaguguccaaaguaugucaggaguacaaaauuaagaaugguuacaggacuaaggaacaucccauccauucaauccagagguuuauuuggagccauugccgguuucauugaagggggguggacuggaaugguagaugguugguaugguuaucaccaucagaaugagcaaggaucuggguaugcugcagaucaaaaaagcacacaaaaugccauuaacgggauuacaaacaaggugaauucuauaauugagaaaaugaacacucaauucacagcugugggcaaagaauucaacaaauuggaaagaaggauggaaaacuuaaauaaaaaaguugaugauggguuucuagacauuuggacauauaacgcagaauuguugguucuacuggaaaaugaaaggacuuuggacuuccaugacuccaacgugaagaaucuguaugagaaaguaaaaagccaauuaaagaauaaugccaaagaaauaggaaacggguguuuugaauucuaucacaaguguaacgaugaaugcauggagagugugaaaaauggaacuuaugacuauccaaaauauuccgaagaaucaaaguugaacagggagaaaauugauggagugaaauuggaaucaaugggagucuaucagauuuuggcgaucuacucaacagucgccaguucccugguucuuuuggucucccugggggcaaucagcuucuggauguguuccaaugggucuuugcaguguagaauaugcaucuaa

SEQ ID NO: 34066 - RNA, 1701 nt, Artificial Sequence
  derived and/or modified CDS sequence (wt) from hemagglutinin__InfluenzaA__ABW40268
augaagacuaucauugcuuugagcuacauucuaugucugguuuucgcucaaaaacuuccuggaaaugacaacagcacggcaacgcugugccuugggcaccaugcaguaccaaacggaacgauagugaaaacaaucacgaaugaccaaauugaaguuacuaaugcuacugagcugguucagaguuccucaacaggugaaauaugcgacaguccucaucagauccuugauggagaaaacugcacacuaauagaugcucuauugggagacccucagugugauggcuuccaaaauaagaaaugggaccuuuuuguugaacgcagcaaagccuacagcaacuguuacccuuaugaugugccggauuaugccucccuuaggucacuaguugccucauccggcacacuggaguuuaacaaugaaagcuucaauuggacuggagucacucaaaacggaacaagcucugcuugcauaaggagaucuaauaacaguuucuuuaguagauugaauugguugacccacuuaaaauucaaauacccagcauugaacgugacuaugccaaacaaugaaaaauuugacaaauuguacauuugggggguucaccacccggguacggacaaugaccaagucuuccuguaugcucaagcaucaggaagaaucacagucucuaccaaaagaagccaacaaacuguaaucccgaauaucggaucuagacccagaguaaggaauauccccagcagaauaagcaucuauuggacaauaguaaaaccgggagacauacuuuugauuaacagcacagggaaucuaauugcuccuagggguuacuucaaaauacgaagugggaaaagcucaauaaugagaucagaugcacccauuggcaaaugcaauucugaaugcaucacuccaaauggaagcauucccaaugacaaaccauuccaaaauguaaacaggaucacauacggggccugucccagauauguuaagcaaaacacucugaaauuggcaacagggaugcgaaauguaccagagaaacaaacuagaggcauauuuggcgcaaucgcggguuucauagaaaaugguugggagggaaugguggaugguugguacgguuucaggcaucaaaauucugagggaauaggacaagcagcagaucucaaaagcacucaagcagcaaucgaucaaaucaaugggaagcugaauagguugaucgggaaaaccaacgagaaauuccaucagauugaaaaagaauucucagaagucgaagggagaauucaggaccuugagaaauauguugaggacaccaaaauagaucucuggucauacaacgcggagcuucuuguugcccuggagaaccaacauacaauugaucuaacugacucagaaaugaacaaacuguuugaaaaaacaaagaagcaacugagggaaaaugcugaggauaugggaaaugguuguuucaaaauauaccacaaaugugacaaugccugcauaggaucaaucagaaauggaacuuaugaccacgauguauacagagaugaagcauuaaacaaccgguuccagaucaagggcguugagcugaagucaggauacaaagauuggauccuauggauuuccuuugccauaucauguuuuuugcuuuguguugcuuuguugggguucaucaugugggccugccaaaaaggcaacauuaggugcaacauuugcauuuga

SEQ ID NO: 34067 - RNA, 1698 nt, Artificial Sequence
  derived and/or modified CDS sequence (wt) from hemagglutinin__InfluenzaA__ABW40312
augaaaguaaaacuacugguucuguuauguacauuuacagcuacauaugcagacacaauauguauaggcuaccaugccaacaacucgaccgacacuguugacacaguacuugagaagaaugugacagugacacacucugucaaccuacuugaggacagucacaauggaaaacuaugucuacuaaaaggaauagccccacuacaauuggguaauugcagcguugccggauggaucuuaggaaacccagaaugcgaauuacugauuuccaaggaaucaugguccuacauuguagagacaccaaauccugagaauggaacauguuacccaggguauuucgccgacuaugaggagcugagagagcaauugaguucaguaucuucauuugagagguucgaaauauuccccaaagagagcucauggcccaaccacaccguaaccggaguaucagcaucaugcucccauaacgggagaagcaguuuuuacagaaauuugcuauggcugacggggaagaaugguuuguauccaaaccugagcaaguccuaugcaaacaacaaagagaaagaaguccuuguacugugggguguucaucacccgccuaacauaggggaccaaagggcccucuaucauacagaaaaugcuuauguuucuguaguuucuucacauuauagcagaagauucaccccagaaauagccaaaagacccaaggugagagaucaggaaggaagaaucaacuacuacuggacucugcuugaacccggggauacaauaauauuugaggcaaauggaaaucuaauagcgccaagguuugcuuucgcacugaguagaggcuuuggaucaggaaucaucaccucaaaugcaccaauggaugaaugugaugcgaaaugucaaacaccucagggagcuauaaacagcagucuuccuuuccagaauguacacccagucacaauaggagaguguccaaaguaugucaggaguacaaaauuaagaaugguuacaggacuaaggaacaucccauccauucaauccagagguuuguuuggagccauugccgguuucauugaagggggguggacuggaaugguagaugguugguaugguuaucaccaucagaaugagcaaggaucuggguaugcugcagaucaaaaaagcacacaaaaugccauuaacgggauuacaaacaaggugaauucuguaauugagaaaaugaacacucaauucacagcugugggcaaagaauucaacaaauuggaaagaaggauggaaaacuuaaauaaaaaaguugaugauggguuucuagacauuuggacauauaacgcagaauuguugguucuacuggaaaaugaaaggacuuuggacuuccaugacuccaacgugaagaaucuguaugagaaaguaaaaagccaauuaaagaauaaugccaaagaaauaggaaacggguguuuugaauucuaucacaaguguaacgaugaaugcauggagagugugaaaaauggaacuuaugacuauccaaaauauuccgaagaaucaaaguugaacagggagaaaauugauggagugaaauuggaaucaaugggagucuaucagauuuuggcgaucuacucaacagucgccaguucccugguucuuuuggucucccugggggcaaucagcuucuggauguguuccaaugggucuuugcaguguagaauaugcaucuaa

SEQ ID NO: 34068 - RNA, 1701 nt, Artificial Sequence
  derived and/or modified CDS sequence (wt) from hemagglutinin__InfluenzaA__ABW40323
augaagacuaucauugcuuugagcuacauucuaugucugguuuucgcucaaaaacuucccggaaaugacaacagcacggcaacgcugugccuugggcaccaugcaguaccaaacggaacgauagugaaaacaaucacgaaugaccaaauugaaguuacuaaugcuacugagcugguucagaguuccucaacaggugaaauaugcgacaguccucaucagauccuugauggagaaaacugcacacuaauagaugcucuauugggagacccucagugugauggcuuccaaaauaagaaaugggaccuuuuuguugaacgcagcaaagccuacagcaacuguuacccuuaugaugugccggauuaugccucccuuaggucacuaguugccucauccggcacacuggaguuuaacaaugaaagcuucaauuggacuggagucacucaaaacggaacaagcucugcuugcauaaggagaucuaauaacaguuucuuuaguagauugaauugguugacccacuuaaaauucaaauacccagcauugaacgugacuaugccaaacaaugaaaaauuugacaaauuguacauuugggggguucaccacccggguacggacaaugaccaaaucuuccuguaugcucaagcaucaggaagaaucacagucucuaccaaaagaagccaacaaacuguaaucccgaauaucggaucuagacccagaguaaggaauauccccagcagaauaagcauuuauuggacaauaguaaaaccgggagacauacuuuugauuaacagcacagggaaucuaauugcuccuagggguuacuucaaaauacgaagugggaaaagcucaauaaugagaucagaugcacccauuggcaaaugcaauucugaaugcaucacuccaaauggaagcauucccaaugacaaaccauuccaaaauguaaacaggaucacauacggggccugucccagauauguuaagcaaaacacucugaaauuggcaacagggaugcgaaauguaccagagaaacaaacuagaggcauauuuggcgcaaucgcggguuucauagaaaaugguugggagggaaugguggaugguugguacgguuucaggcaucaaaauucugagggaauaggacaagcagcagaucucaaaagcacucaagcagcaaucgaucaaaucaaugggaagcugaauagguugaucgggaaaaccaacgagaaauuccaucagauugaaaaagaauucucagaagucgaagggagaauucaggaccuugagaaauauguugaggacaccaaaauagaucucuggucauacaacgcggagcuucuuguugcccuggagaaccaacauacaauugaucuaacugacucagaaaugaacaaacuguuugaaaaaacaaagaagcaacugagggaaaaugcugaggauaugggcaaugguuguuucaaaauauaccacaaaugugacaaugccugcauaggaucaaucagaaauggaacuuaugaccacgauguauacagagaugaagcauuaaacaaccgguuccagaucaagggcguugagcugaagucaggauacaaagauuggauccuauggauuuccuuugccauaucauguuuuuugcuuuguguugcuuuguugggguucaucaugugggccugccaaaaaggcaacauuaggugcaacauuugcauuuga

SEQ ID NO: 34069 - RNA, 1698 nt, Artificial Sequence
  derived and/or modified CDS sequence (wt) from hemagglutinin__InfluenzaA__ABW40334
augaaagugaaacuacugguucuguuauguacauuuacagcuacauaugcagacacaauauguauaggcuaccaugccaacaacucgaccgacacuguugacacaguacuugagaagaaugugacagugacacacucugucaaccuacuugaggaccgucacaauggaaaacuaugucuacuaaaaggaauagccccacuacaauuggguaauugcagcguugccggauggaucuuaggaaacccagaaugcgaauuacugauuuccaaggaaucaugguccuacauuguagaaacaccaaauccugagaauggaacauguuacccaggguauuucgccgacuaugaggagcugagggagcaauugaguucaguaucuucauuugagagguucgaaauauuccccaaagagagcucauggcccaaccacaccguaaccggaguaucagcaucaugcucccauaacgggaaaagcaguuuuuacagaaauuugcuauggcugacgggaaagaaugguuuguacccaaaccugagcagauccuaugcaaacaacaaagagaaagaaguccuuguacugugggguguucaucacccgccuaacauaggggaccaaagggcccucuaucauacagaaaaugcuuaugucucuguagugucuucacauuauagcagaagauucaccccagaaauagccaaaagacccaaggugagagaucaggaaggaagaaucaauuacuacuggacucuacuggaacccggggauacaauaauauuugaggcaaaugggaaucuaauagcgccaagguuugcuuucgcacugaguagaggcuuuggaucaggaaucaucaccucaaaugcaccaauggaugaaugugaugcgaagugucaaacaccucagggagcuauaaacagcagucuuccuuuccagaauguacacccagucacaauaggagaguguccaaaguaugucaggagugcaaaauuaagaaugguuacaggacuaaggaacaucccauccauucaauccagagguuuguuuggagccauugccgguuucauugaagggggguggacuggaaugguagacgguugguaugguuaucaccaccagaaugagcaaggaucuggguaugcugcagaucaaaaaagcacacaaaaugccauuaacgggauuacaaacaaggugaauucugugauugagaaaaugaacacucaauucacagcugugggcaaagaauucaacaaauuggaaagaagaauggaaaacuuaaauaaaaaaguugaugauggguuucuagacauuuggacguauaacgcagaauuguugguucuacuggaaaaugaaaggacuuuggacuuccaugacuccaacgugaagaaucuguaugagaaaguaaaaagccaauuaaagaauaaugccaaagaaauaggaaacggguguuuugaauucuaucacaaguguaacgaugaaugcauggagagugugaaaaauggaacuuaugacuauccaaaauauuccgaagaaucaaaguuaaacagggagaaaauugauggagugaaauuggaaucaaugggagucuaucagauucuggcgaucuacucaacagucgccaguucccugguucuuuuggucucccugggggcaaucagcuucuggauguguuccaaugggucuuugcaguguagaauaugcaucuaa

SEQ ID NO: 34070 - RNA, 1698 nt, Artificial Sequence
  derived and/or modified CDS sequence (wt) from hemagglutinin__InfluenzaA__ABW40345
augaaagugaaacuacugguucuguuauguacauuuacagcuacauaugcagacacaauauguauaggcuaccaugccaacaacucgaccgacacuguugacacaguacuugagaagaaugugacagugacacacucugucaaccuacuugaggaccgucacaauggaaaacuaugucuacuaaaaggaauagccccacuacaauuggguaauugcagcguugccggauggaucuuaggaaacccagaaugcgaauuacugauuuccaaggaaucauggucuuacauuguagaaacaccaaauccugagaauggaacauguuacccaggguauuucgccgacuaugaggagcugagggagcaauugaguucaguaucuucauuugagagguucgaaauauuccccaaagagagcucauggcccaaccacaccguaaccggaguaucagcaucaugcucccauaacgggaaaagcaguuuuuacagaaauuugcuauggcugacgggaaagaaugguuuguacccaaaccugagcagauccuaugcaaacaacaaagagaaagaaguccuuguacugugggguguucaucacccgccaaacauaggggaccaaagggcccucuaucauacagaaaaugcuuaugucucuguagugucuucacauuauagcagaagauucaccccagaaauagccaaaagacccaaggugagagaucaggaaggaagaaucaauuacuacuggacucuacuggaacccggggauacaauaauauuugaggcaaaugggaaucuaauagcgccaagguuugcuuucgcacugaguagaggcuuuggaucaggaaucaucacuucaaaugcaccaauggaugaaugugaugcgaagugucaaacaccucagggagcuauaaacagcagucuuccuuuccagaauguacacccagucacaauaggagaguguccaaaguaugucaggagugcaaaauuaagaaugguuacaggacuaaggaacaucccauccauucaauccagagguuuguuuggagccauugccgguuucauugaaggaggguggacuggaaugguagaugguugguaugguuaucaccaccagaaugagcaaggaucuggguaugcugcagaucaaaaaagcacacaaaaugccauuaacgggauuacaaacaaggugaauucugugauugagaaaaugaacacucaauucacagcugugggcaaagaauucaacaaauuggaaagaagaauggaaaacuuaaauaaaaaaguugaugauggguuucuagacauuuggacguauaacgcagaguuguugguucuacuggaaaaugaaaggacuuuggacuuccaugacuccaacgugaagaaucuguaugagaaaguaaaaagccaauuaaagaauaaugccaaagaaauaggaaacggguguuuugaauucuaucacaaguguaacgaugaaugcauggagagugugaaaaauggaacuuaugacuauccaaaauauuccgaagaaucaaaguuaaacagggagaaaauugauggagugaaauuggaaucaaugggagucuaucagauucuggcgaucuacucaacagucgccaguucccugguucuuuuggucucccugggggcaaucagcuucuggauguguuccaaugggucuuugcaguguagaauaugcaucuaa

SEQ ID NO: 34071 - RNA, 1698 nt, Artificial Sequence
  derived and/or modified CDS sequence (wt) from hemagglutinin__InfluenzaA__ABW40356
augaaaguaaaacuacuuguucuguuauguacauuuacagcuacauaugcagacacaauauguauaggcuaccaugccaacaacucgaccgacacuguugacacaguacuugagaagaaugugacagugacacacucugucaaccuacuugaggacagucacaauggaaaacuaugucuacuaaaaggaauagccccacuacaauuggguaauugcagcguugccggauggaucuuaggaaacccagaaugcgaauuacugauuuccaaggaaucaugguccuacauuguagaaacaccaaauccugaaaauggaacauguuacccaggauauuucgccgacuaugaggagcugagggagcaauugaguucaguaucuucauuugagagguucgaaauauuccccaaagagagcucauggcccaaccacaccguaaccggaguaucagcaucaugcucccauaacgggaaaagcaguuuuuacagaaauuugcuauggcugacggggaagaaugguuuguauccaaaccugagcaaguccuaugcaaacaacaaagagaaagaaguccuuguaaugugggguguucaucacccgccuaacauaggggaccaaagggcccucuaucauacagaaaaugcuuaugucucuguagugucuucacauuauagcagaagauucaccccagaaauagccaaaagacccaaggugagagaucaggaaggaagaaucaacuacuacuggacucugcuggaacccggggauacaauaauauuugaggcaaauggaaaucuaauagcgccaagguuugcuuucgcacugaguagaggcuuuggaucaggaaucaucaccucaaaugcaccaaugggugaaugugaugcgaagugucaaacaccucagggagcuauaaacaguagucuuccuuuccagaauguacacccagucacaauaggagaguguccaaaguaugucaggagugcaaaauuaagaaugguuacaggacuaaggaacaucccauccauucaauccagagguuuguuuggagccauugccgguuucauugaagggggguggacuggaaugguagaugguugguaugguuaucaccaucagaaugagcaaggaucuggguaugcugcagaucaaaaaagcacacaaaaugccauuaacgggauuacaaacaaggugaauucuguaauugagaaaaugaacacucaauucacagcugugggcaaagaauucaacaaauuggaaagaaggauggaaaacuuaaauaaaaagguugaugauggguuucuagacauuuggacauauaacgcagaauuguugguucuacuggaaaaugaaaggacuuuggacuuccaugacuccaacgugaagaaucuguaugagaaaguaaaaagccaauuaaagaauaaugccaaagaaauaggaaacggguguuuugaauucuaucacaaguguaacgaugaaugcauggagagugugaaaaauggaacuuaugacuacccaaaauauuccgaagaaucaaaguugaacagggagaaaauugauggagugaaauuggaaucaaugggagucuaucagauucuggcgaucuacucaacagucgccaguucccugguucuuuuggucucccugggggcaaucagcuucuggauguguuccaaugggucuuugcaguguagaauaugcaucuaa

SEQ ID NO: 34072 - RNA, 1698 nt, Artificial Sequence
  derived and/or modified CDS sequence (wt) from hemagglutinin__InfluenzaA__ABW40367
augaaaguaaaacuacugguucuguuauguacauuuacagcuacauaugcagacacaauauguauaggcuaccaugccaacaacucgaccgacacuguugacacaguacuugagaagaaugugacagugacacacucugucaaccuacuugaggacagucacaauggaaaacuaugucuacuaaaaggaauagccccacuacaauuggguaauugcagcguugccggauggaucuuaggaaacccagaaugcgaauuacugauuuccaaggaaucaugguccuacauuguagagacaccaaauccugagaauggaacauguuacccaggguauuucgccgacuaugaggagcugagagagcaauugaguucaguaucuucauuugagagguucgaaauauuccccaaagagagcucauggcccaaccacaccguaaccggaguaucagcaucaugcucccauaacgggaaaagcaguuuuuacagaaauuugcuauggcugacggggaagaaugguuuguauccaaaccugagcaaguccuaugcaaacaacaaagagaaagaaguccuuguacugugggguguucaucacccgccuaacauaggggaccaaagggcccucuaucauacagaaaaugcuuaugucucuguagugucuucacauuauagcagaagauucaccccagaaauagccaaaagacccaaggugagagaucaggaaggaagaaucaacuacuacuggacucugcuugaacccggggauacaauaauauuugaggcaaauggaaaucuaauagcgccaagguuugcuuucgcacugaguagaggcuuuggaucaggaaucaucaccucaaaugcaccaauggaugaaugugaugcgaaaugucaaacaccacagggagcuauaaacagcagucuuccuuuccagaauguacacccagucacaauaggagaguguccaaaguaugucaggaguacaaaauuaagaaugguuacaggacuaaggaacaucccauccauucaauccagagguuuguuuggagccauugccgguuucauugaagggggguggacuggaaugguagauggaugguaugguuaccaccaucagaaugagcaaggaucuggguaugcugcugaucaaaaaagcacacaaaaugccauuaacgggauuacaaacaaggugaauucuguaauugagaaaaugaacacucaauucacagcugugggcaaagaauucaacaaauuggaaagaaggauggaaaacuuaaauaaaaaaguugaugauggguuucuagacauuuggacauauaacgcagaauuguugguucuacuggaaaaugaaaggacuuuggacuuccaugacuccaacgugaagaaucuguaugagaaaguaaaaagccaauuaaagaauaaugccaaagaaauaggaaacggguguuuugaauucuaucacaaguguaacgaugaaugcauggagagugugaaaaauggaacuuaugacuauccaaaauauuccgaagaaucaaaguugaacagggagaaaauugauggagugaaauuggaaucaaugggagucuaucagauuuuggcgaucuacucaacagucgccaguucccugguucuuuuggucucccugggggcaaucagcuucuggauguguuccaaugggucuuugcaguguagaauaugcaucuaa

SEQ ID NO: 34073 - RNA, 1701 nt, Artificial Sequence; identical to SEQ ID NO: 33953
  derived and/or modified CDS sequence (wt) from hemagglutinin__InfluenzaA__ABW40378

SEQ ID NO: 34074 - RNA, 1698 nt, Artificial Sequence
  derived and/or modified CDS sequence (wt) from hemagglutinin__InfluenzaA__ABW40389
augaaaguaaaacuacuaguucuguuauguacauuuacagcuacauaugcagacacaauauguauaggcuaccaugccaacaacucgaccgacacuguugacacaguacuugagaagaaugugacagugacacacucugucaaccuacuugaggacagucacaauggaaaacuaugucuacuaaaaggaauagccccacuacaauuggguaauugcagcguugccggauggaucuuaggaaacccagaaugcgaauuacugauuuccaaggaaucaugguccuacauuguagagacaccaaauccugagaauggaacauguuacccaggguauuuugccgacuaugaggagcugagagagcaauugaguucaguaucuucauuugagagguucgaaauauuccccaaagagagcucauggcccaaccacaccguaaccggaguaucagcaucaugcucccauaacgggaaaagcaguuuuuacagaaauuugcuauggcugacggggaagaaugguuuguauccaaaccugagcaaguccuaugcaaacaacaaagagaaagaaguccuuguacugugggguguucaucacccgccuaacauaggggaccaaagggcccucuaucauacagaaaaugcuuaugucucuguagugucuucacauuauagcagaagauucaccccagaaauagccaaaagacccaaggugagagaucaggaaggaagaaucaacuacuacuggacucugcuugaacccggggauacaauaauauuugaggcaaauggaaaucuaauagcgccaagguuugcuuucgcacugaguagaggcuuuggaucaggaaucaucaccucaaaugcaccaauggaugaaugugaugcgaaaugucaaacaccucagggagcuauaaacagcagucuuccuuuccagaauguacacccagucacaauaggagaguguccaaaguaugucaggaguacaaaauuaagaaugguuacaggacuaaggaacaucccauccauucaauccagagguuuguuuggagccauugccgguuucauugaagggggguggacuggaaugguagaugguugguaugguuaucaccaucagaaugagcaaggaucuggguaugcugcugaucaaaaaagcacacaaaaugccauuaacgggauuacaaacaaggugaacucuguaauugagaaaaugaacacucaauucacagcugugggcaaagaauucaacaaauuggaaagaaggauggaaaacuuaaauaaaaaaguugaugauggguuucuagacauuuggacauauaacgcagaauuguugguucuacuggaaaaugaaaggacuuuggacuuccaugacuccaacgugaagaaucuguaugagaaaguaaaaagccaauuaaagaauaaugccaaagaaauaggaaacggguguuuugaauucuaucacaaguguaacgaugaaugcauggagagugugaaaaauggaacuuaugacuauccaaaauauuccgaagaaucaaaguugaacagggagaaaauugauggagugaaauuggaaucaaugggagucuaucagauuuuggcgaucuacucaacagucgccaguucccugguucuuuuggucucccugggggcaaucagcuucuggauguguuccaaugggucuuugcaguguagaauaugcaucuaa

SEQ ID NO: 34075 - RNA, 1698 nt, Artificial Sequence; identical to SEQ ID NO: 33932
  derived and/or modified CDS sequence (wt) from hemagglutinin__InfluenzaA__ABW40400

SEQ ID NO: 34076 - RNA, 1698 nt, Artificial Sequence; identical to SEQ ID NO: 33938
  derived and/or modified CDS sequence (wt) from hemagglutinin__InfluenzaA__ABW40411

SEQ ID NO: 34077 - RNA, 1698 nt, Artificial Sequence; identical to SEQ ID NO: 33938
  derived and/or modified CDS sequence (wt) from hemagglutinin__InfluenzaA__ABW40422

SEQ ID NO: 34078 - RNA, 1698 nt, Artificial Sequence
  derived and/or modified CDS sequence (wt) from hemagglutinin__InfluenzaA__ABW40433
augaaagugaaacuacugguucuguuauguacauuuacagcuacauaugcagacacaauauguauaggcuaccaugccaacaacucgaccgacacuguugacacaguacuugagaagaaugugacagugacacacucugucaaccuacuugaggaccgucacaauggaaaacuaugucuacuaaaaggaauagccccacuacaauuggguaauugcagcguugccggauggaucuuaggaaacccagaaugcgaauuacugauuuccaaggaaucaugguccuacaucguagaaacaccaaauccugagaauggaacauguuacccaggguauuucgccgacuaugaggagcugagggagcaauugaguucaguaucuucauuugagagguucgaaauauuccccaaagagagcucauggcccaaccacaccguaaccggaguaucagcaucuugcucccauaacgggaaaagcaguuuuuacagaaauuugcuauggcugacgggaaagaaugguuuguacccaaaccugagcagauccuaugcaaacaacaaagagaaagaaguccuuguacugugggguguucaucacccgccuaacauaggggaccaaagggcccucuaucauacagaaaaugcuuaugucucuguagugucuucacauuauagcagaagauucaccccagaaauagccaaaagacccaaggugagagaucaggaaggaagaaucaauuacuacuggacucuacuggaacccggggauacaauaauauuugaggcaaaugggaaucuaauagcgccaagguuugcuuucgcacugaguagaggcuuuggaucaggaaucaucaccucaaaugcaccaauggaugaaugugaugcgaagugucaaacaccucagggagcuauaaacagcagucuuccuuuccagaauguacacccagucacaauaggagaguguccaaaguaugucaggagugcaaaauuaagaaugguuacaggacuaaggaacaucccauccauucaauccagagguuuguuuggagccauugccgguuucauugaagggggguggacuggaaugguagaugguugguaugguuaucaccaccagaaugagcaaggaucuggguaugcugcagaucaaaaaagcacacaaaaugccauuaacgggauuacaaacaaggugaauucugugauugagaaaaugaacacucaauucacagcugugggcaaagaauucaacaaauuggaaagaagaauggaaaacuuaaauaaaaaaguugaugauggguuucuagacauuuggacguauaacgcagaauuguugguucuacuggaaaaugaaaggacuuuggacuuccaugacuccaacgugaagaaucuguaugagaaaguaaaaagccaauuaaagaauaaugccaaagaaauaggaaacggguguuuugaauucuaucacaaguguaacgaugaaugcauggagagugugaaaaauggaacuuaugacuauccaaaauauuccgaagaaucaaaguuaaacagggagaaaauugauggagugaaauuggaaucaaugggagucuaucagauucuggcgaucuacucaacagucgccaguucccugguucuuuuggucucccugggggcaaucagcuucuggauguguuccaaugggucuuugcaguguagaauaugcaucuaa

SEQ ID NO: 34079 - RNA, 1698 nt, Artificial Sequence
  derived and/or modified CDS sequence (wt) from hemagglutinin__InfluenzaA__ABW40444
augaaaguaaaacuacuuguucuguuauguacauuuacagcuacauaugcagacacaauauguauaggcuaccaugccaacaacucgaccgacacuguugacacaguacuugagaagaaugugacagugacacacucugucaaccuacuugaggacagucacaauggaaaacuaugucuacuaaaaggaauagccccacuacaauuggguaauugcagcguugccggauggaucuuaggaaacccagaaugcgaauuacugauuuccaaggaaucaugguccuacauuguagaaacaccaaauccugagaauggaacauguuacccaggauauuucgccgacuaugaggagcugagggagcaauugaguucaguaucuucauuugagagguucgaaauauuccccaaagagagcucauggcccaaccacaccguaaccggaguaucagcaucaugcucccauaacgggaaaagcaguuuuuacagaaauuugcuauggcugacggggaagaaugguuuguauccaaaccugagcaaguccuaugcaaacaacaaagagaaagaaguccuuguacugugggguguucaucacccgccuaacauaggggaccaaagggcccucuaucauacagaaaaugcuuaugucucuguagugucuucacauuauagcagaagauucaccccagaaauagccaaaagacccaaggugagagaucaggaaggaagaaucaacuacuacuggacucugcuggaacccggggauacaauaauauuugaggcaaauggaaaucuaauagcgccaagguuugcuuucgcacugaguagaggcuuuggaucaggaaucaucaccucaaaugcaccaaugggugaaugugaugcgaagugucaaacaccucagggagcuauaaacaguagucuuccuuuccagaauguacacccagucacaauaggagaguguccaaaguaugucaggagugcaaaauuaagaaugguuacaggacuaaggaacaucccauccauucaauccagagguuuguuuggagccauugccgguuucauugaagggggguggacuggaaugguagaugguugguaugguuaucaccaucagaaugagcaaggaucuggguaugcugcagaucaaaaaagcacacaaaaugccauuaacgggauuacaaacaaggugaauucuguaauugagaaaaugaacacucaauucacagcugugggcaaagaauucaacaaauuggaaaggaggauggaaaacuuaaauaaaaagguugaugauggguuucuagacauuuggacauauaacgcagaauuguugguucuacuggaaaaugaaaggacuuuggacuuccaugacuccaacgugaagaaucuguaugagaaaguaaaaagccaauuaaagaauaaugccaaagaaauaggaaacggguguuuugaauucuaucacaaguguaacgaugaaugcauggagagugugaaaaauggaacuuaugacuauccaaaauauuccgaagaaucaaaguugaacagggagaaaauugauggagugaaauuggaaucaaugggagucuaucagauucuggcgaucuacucaacagucgccaguucccugguucuuuuggucucccugggggcaaucagcuucuggauguguuccaaugggucuuugcaguguagaauaugcaucuaa

SEQ ID NO: 34080 - RNA, 1698 nt, Artificial Sequence; identical to SEQ ID NO: 33959
  derived and/or modified CDS sequence (wt) from hemagglutinin__InfluenzaA__ABW40455

SEQ ID NO: 34081 - RNA, 1698 nt, Artificial Sequence; identical to SEQ ID NO: 33937
  derived and/or modified CDS sequence (wt) from hemagglutinin__InfluenzaA__ABW40466

SEQ ID NO: 34082 - RNA, 1698 nt, Artificial Sequence; identical to SEQ ID NO: 33973
  derived and/or modified CDS sequence (wt) from hemagglutinin__InfluenzaA__ABW40477

SEQ ID NO: 34083 - RNA, 1698 nt, Artificial Sequence; identical to SEQ ID NO: 33997
  derived and/or modified CDS sequence (wt) from hemagglutinin__InfluenzaA__ABW40488

SEQ ID NO: 34084 - RNA, 1698 nt, Artificial Sequence; identical to SEQ ID NO: 33937
  derived and/or modified CDS sequence (wt) from hemagglutinin__InfluenzaA__ABW40499

SEQ ID NO: 34085 - RNA, 1698 nt, Artificial Sequence
  derived and/or modified CDS sequence (wt) from hemagglutinin__InfluenzaA__ABW40510
augaaagugaaacuacugguucuguuauguacauuuacagcuacauaugcagacacaauauguauaggcuaccaugccaacaacucgaccgacacuguugacacaguacuugagaagaaugugacagugacacacucugucaaccuacuugaggaccgucacaauggaaaacuaugucuacuaaaaggaauagccccacuacaauuggguaauugcagcguugccggauggaucuuaggaaacccagaaugcgaauuacugauuuccaaggaaucaugguccuacauuguagaaacaccaaauccugagaauggaacauguuacccaggguauuucgccgacuaugaggagcugagggagcaauugaguucaguaucuucauuugagagguucgaaauauuccccaaagagagcucauggcccaaccacaccguaaccggaguaucagcaucaugcucccauaacgggaaaagcaguuuuuacagaaauuugcuauggcugacgggaaagaaugguuuguacccaaaccugagcagauccuaugcaaacaacaaagagaaagaaguccuuguacugugggguguucaucacccgccuaacauaggggaccaaagggcccucuaucauacagaaaaugcuuaugucucuguagugucuucacauuauagcagaagauucaccccagaaauagccaaaagacccaaggugagagaucaggaaggaagaaucaauuacuacuggacucuacuggaacccggggauacaauaauauuugaggcaaaugggaaucuaauagcgccaagguuugcuuucgcacugaguagaggcuuuggaucaggaaucaucaccucaaaugcaccaauggaugaaugugaugcgaagugucaaacaccucagggagcuauaaacagcagucuuccuuuccagaauguacacccagucacaauaggagaguguccaaaguaugucaggagugcaaaauuaagaaugguuacaggacuaaggaacaucccauccauucaauccagagguuuguuuggagccauugccgguuucauugaagggggguggacuggaaugguagaugguugguaugguuaucaccaccagaaugagcaaggaucuggguaugcugcagaucaaaaaagcacacaaaaugccauuaacgggauuacaaacaaggugaauucugugauugagaaaaugaacacucaauucacagcugugggcaaagaauucaacaaauuggaaagaagaauggaaaacuuaaauaaaaaaguugaugauggguuucuagacauuuggacguauaacgcagaauuguugguucuacuggaaaaugaaaggacuuuggacuuccaugacuccaacgugaagaaucuguaugagaaaguaaaaagccaauuaaagaauaaugccaaagaaauaggaaacggguguuuugaauucuaucacaaguguaacgaugaaugcauggagagugugaaaaauggaacuuaugacuauccaaaauauuccgaagaaucaaaguuaaacagggagaaaauugauggagugaaauuggaaucaaugggagucuaucagauucuggcgaucuacucaacagucgccaguucccugguucuuuuggucucccugggggcaaucagcuucuggauguguuccaaugggucuuugcaguguagaauaugcaucuaa

SEQ ID NO: 34086 - RNA, 1698 nt, Artificial Sequence; identical to SEQ ID NO: 33994
  derived and/or modified CDS sequence (wt) from hemagglutinin__InfluenzaA__ABW40521

SEQ ID NO: 34087 - RNA, 1698 nt, Artificial Sequence; identical to SEQ ID NO: 33937
  derived and/or modified CDS sequence (wt) from hemagglutinin__InfluenzaA__ABW40532

SEQ ID NO: 34088 - RNA, 1698 nt, Artificial Sequence
  derived and/or modified CDS sequence (wt) from hemagglutinin__InfluenzaA__ABW40543
augaaagugaaacuacugguucuguuauguacauuuacagcuacauaugcagacacaauauguauaggcuaccaugccaacaacucgaccgacacuguugacacaguacuugagaagaaugugacagugacacacucugucaaccuacuugaggaccgucacaauggaaaacuaugucuacuaaaaggaauagccccacuacaauuggguaauugcagcguugccggauggaucuuaggaaacccagaaugcgaauuacugacuuccaaggaaucaugguccuacauuguagaaacaccaaauccugagaauggaacauguuacccaggguauuucgccgacuaugaggagcugagggagcaauugaguucaguaucuucauuugagagguucgaaauauuccccaaagagagcucauggcccaaccacaccguaaccggaguaucagcaucaugcucccauaacgggaaaagcaguuuuuacagaaauuugcuauggcugacgggaaagaaugguuuguacccaaaccugagcaaauccuaugcaaacaacaaagagaaagaaguccuuguacugugggguguucaucacccgccuaacauaggggaccaaagggcccucuaucauacagaaaaugcuuaugucucuguagugucuucacauuauagcagaagauucaccccagaaauagccaaaagacccaaggugagagaucaggaaggaagaaucaacuacuacuggacucuacuggaacccggggauacaauaauauuugaggcaaauggaaaucuaauagcgccaagguuugcuuucgcacugaguagaggcuuuggaucaggaaucaucaccucaaaugcaccaauggaugaaugugaugcgaagugucaaacaccucagggagcuauaaacagcagucuuccuuuccagaauguacacccagucacaauaggagaguguccaaaguaugucaggagugcaaaauuaagaaugguuacaggacuaaggaacaucccauccauucaauccagagguuuguuuggagccauugccgguuucauugaagggggguggacuggaaugguagaugguugguaugguuaucaccaccagaaugagcaaggaucuggguaugcugcagaucaaaaaagcacacaaaaugccauuaacgggauuacaaacaaggugaauucugugauugagaaaaugaacacucaauucacagcugugggcaaagaauucaacaaauuggaaagaaggauggaaaacuuaaauaaaaagguugaugauggguuucuagacauuuggacguauaacgcagaauuguugguucuacuggaaaaugaaaggacuuuggacuuccaugacuccaacgugaagaaucuguaugagaaaguaaaaagccaauuaaagaauaaugccaaagaaauaggaaacggauguuuugaauucuaucacaaguguaacgaugaaugcauggagagugugaaaaauggaacuuaugacuauccaaaauauuccgaagaaucaaaguuaaacagggagaaaauugauggagugaaauuggaaucaaugggagucuaucagauucuggcgaucuacucaacagucgccaguucccugguucuuuuggucucccugggggcaaucagcuucuggauguguuccaaugggucuuugcaguguagaauaugcaucuaa

SEQ ID NO: 34089 - RNA, 1698 nt, Artificial Sequence; identical to SEQ ID NO: 34067
  derived and/or modified CDS sequence (wt) from hemagglutinin__InfluenzaA__ABW40554

SEQ ID NO: 34090 - RNA, 1698 nt, Artificial Sequence; identical to SEQ ID NO: 33926
  derived and/or modified CDS sequence (wt) from hemagglutinin__InfluenzaA__ABW40565

SEQ ID NO: 34091 - RNA, 1698 nt, Artificial Sequence
  derived and/or modified CDS sequence (wt) from hemagglutinin__InfluenzaA__ABW40576
augaaaguaaaacuacugauucuguuauguacauuuacagcuacauaugcagacacaauauguauaggcuaccaugccaacaacucgaccgacacuguugacacaguacuugagaagaaugugacagugacacacucugucaaccuacuugaggacagucacaauggaaaacuaugucuacuaaaaggaauagccccacuacaauuggguaauugcagcguugccggauggaucuuaggaaacccagaaugcgaauugcugauuuccaaggaaucaugguccuacauuguagagacaccaaauccugagaauggaacauguuacccaggguauuucgccgacuaugaggagcugagagagcaauugaguucaguaucuucauuugagagguucgaaauauuccccaaagagagcucauggcccaaccacaccguaaccggaguaucagcaucaugcucccauaacgggaaaagcaguuuuuacagaaauuugcuauggcugacggggaagaaugguuuguauccaaaccugagcaaguccuaugcaaacaacaaagagaaagaaguccuuguacugugggguguucaucacccgccuaacauaggggaccaaagggcccucuaucauacagaaaauacuuaugucucuguagugucuucacauuauagcagaagauucaccccagaaauagccaaaagacccaaggugagagaucaggaaggaagaaucaacuacuacuggacucugcuugaacccggggauacaauaauacuugaggcaaauggaaaucuaauagcgccaagguuugcuuucgcacugaguagaggcuuuggaucaggaaucaucaccucaaaugcaccaauggaugaaugugaugcgaaaugucaaacaccucagggagcuauaaacagcagucuuccuuuccagaauguacacccagucacaauaggagaguguccaaaguaugucaggaguacaaaauuaagaaugguuacaggacuaaggaacaucccauccauucaauccagagguuuauuuggagccauugccgguuucauugaagggggguggacuggaaugguagaugguugguaugguuaucaccaucagaaugagcaaggaucuggguaugcugcagaucaaaaaagcacacaaaaugccauuaacgggauuacaaacaaggugaauucuguaauugagaaaaugaacacucaauucacagcugugggcaaagaauucaacaaauuggaaagaaggauggaaaacuuaaauaaaaaaguugaugauggguuucuagacauuuggacauauaacgcagaauuguugguucuacuggaaaaugaaaggacuuuggacuuccaugacuccaacgugaagaaucuguaugagaaaguaaaaagccaauuaaagaauaaugccaaagaaauaggaaacggguguuuugaauucuaucacaaguguaacgaugaaugcauggagagugugaaaaauggaacuuaugacuauccaaaauauuccgaagaaucaaaguugaacagggagaaaauugauggagugaaauuggaaucaaugggagucuaucagauuuuggcgaucuacucaacagucgccaguucccugguucuuuuggucucccugggggcaaucagcuucuggauguguuccaaugggucguugcaguguagaauaugcaucuaa

SEQ ID NO: 34092 - RNA, 1701 nt, Artificial Sequence
  derived and/or modified CDS sequence (wt) from hemagglutinin__InfluenzaA__ABW40587
augaagacuaucauugcuuugagcuacauucuaugucugguuuucgcucaaaaacuuccuggaaaugacaacagcacggcaacgcugugccuugggcaccaugcaguaccaaacggaacgauagugaaaacaaucacgaaugaccaaauugaaguuacuaaugcuaccgagcugguucagaguuccucaacaggugaaauaugcgacaguccucaucagauccuugauggagaaaacugcacacuaauagaugcucuauugggagacccucagugugauggcuuccaaaauaagaaaugggaccuuuuuguugaacgcagcaaagccuacagcaacuguuacccuuaugaugugccggauuaugccucccuuaggucacuaguugccucauccggcacacuggaguuuaacaaugaaagcuucaauuggacuggagucacucaaaacggaacaagcucugcuugcauaaggagaucuaauaacaguuucuuuaguagauugaauugguugacccacuuaaaauucaaauacccagcauugaacgugacuaugccaaacaaugaaaaauuugacaaauuguacauuugggggguucaccacccggguacggacaaugaccaagucuuccuguaugcucaagcaucaggaagaaucacagucucuaccaaaagaagccaacaaacuguaaucccgaauaucggaucuagacccagaguaaggaauauccccagcagaauaagcaucuauuggacaauaguaaaaccgggagacauacuuuugauuaacagcacagggaaucuaauugcuccuagggguuacuucaaaauacgaagugggaaaagcucaauaaugagaucagaugcacccauuggcaaaugcaauucugaaugcaucacuccaaauggaagcauucccaaugacaaaccauuccaaaauguaaacaggaucacauacggggccugucccagauauguuaagcaaaacacucugaaauuggcaacagggaugcgaaauguaccagagaaacaaacuagaggcauauuuggcgcaaucgcggguuucauagaaaaugguugggagggaaugguggaugguugguacgguuucaggcaucaaaauucugagggaauaggacaagcagcagaucucaaaagcacucaagcagcaaucgaucaaaucaaugggaagcugaauagguugaucgggaaaaccaacgagaaauuccaucagauugaaaaagaauucucagaagucgaagggagaauucaggaccuugagaaauauguugaggacaccaaaauagaucucuggucauacaacgcggagcuucuuguugcccuggagaaccaacauacaauugaucuaacugacucagaaaugaacaaacuguuugaaaaaacaaagaagcaacugagggaaaaugcugaggauaugggcaaugguuguuucaaaauauaccacaaaugugacaaugccugcauaggaucaaucagaaauggaacuuaugaccacgauguauacagagaugaagcauuaaacaaccgguuccagaucaagggcguugagcugaagucaggauacaaagauuggauccuauggauuuccuuugccauaucauguuuuuugcuuuguguugcuuuguugggguucaucaugugggccugccaaaaaggcaacauuaggugcaacauuugcauuuga

SEQ ID NO: 34093 - RNA, 1698 nt, Artificial Sequence
  derived and/or modified CDS sequence (wt) from hemagglutinin__InfluenzaA__ABW40598
augaaagugaaacuacugguucuguuauguacauuuacagcuacauaugcagacacaauauguauaggcuaccaugccaacaacucgaccgacacuguugacacaguacuugagaagaaugugacagugacacacucugucaaccuacuugaggaccgucacaauggaaaacuaugucuacuaaaaggaauagccccacuacaauuggguaauugcagcguugccggauggaucuuaggaaacccagaaugcgaauuacugauuuccaaggaaucauggucuuacauuguagaaacaccaaauccugagaauggaacauguuacccaggguauuucgccgacuaugaggagcugagggagcaauugaguucaguaucuucauuugagagguucgaaauauuccccaaagagagcucauggcccaaccacaccguaaccggaguaucagcaucaugcucccauaacgggaaaagcaguuuuuacagaaauuugcuauggcugacgggaaagaaugguuuguacccaaaccugagcagauccuaugcaaacaacaaagagaaagaaguccuuguacugugggguguucaucacccgccuaacauaggggaccaaagggcccucuaucauacagaaaaugcuuaugucucuguagugucuucacauuauagcagaagauucaccccagaaauagccaaaagacccaaggugagagaucaggaaggaagaaucaauuacuacuggacucuacuggaacccggggauacaauaauauuugaggcaaaugggaaucuaauagcgccaagguuugcuuucgcacugaguagaggcuuuggaucaggaaucaucacuucaaaugcaccaauggaugaaugugaugcgaagugucaaacaccucagggagcuauaaacagcagucuuccuuuccagaauguacacccagucacaauaggagaguguccaaaguaugucaggagugcaaaauuaagaaugguuacaggacuaaggaacaucccauccauucaauccagagguuuguuuggagccauugccgguuucauugaaggaggguggacuggaaugguagaugguugguaugguuaucaccaccagaaugagcaaggaucuggguaugcugcagaucaaaaaagcacacaaaaugccauuaacgggauuacaaacaaggugaauucugugauugagaaaaugaacacucaauucacagcugugggcaaagaauucaacaaauuggaaagaagaauggaaaacuuaaauaaaaaaguugaugauggguuucuagacauuuggacguauaacgcagaguuguugguucuacuggaaaaugaaaggacuuuggacuuccaugacuccaacgugaagaaucuguaugagaaaguaaaaagccaauuaaagaauaaugccaaagaaauaggaaacggguguuuugaauucuaucacaaguguaacgaugaaugcauggagagugugaaaaauggaacuuaugacuauccaaaauauuccgaagaaucaaaguuaaacagggagaaaauugauggagugaaauuggaaucaaugggagucuaucagauucuggcgaucuacucaacagucgccaguucccugguucuuuuggucucccugggggcaaucagcuucuggauguguuccaaugggucuuugcaguguagaauaugcaucuaa

SEQ ID NO: 34094 - RNA, 1698 nt, Artificial Sequence
  derived and/or modified CDS sequence (wt) from hemagglutinin__InfluenzaA__ABW40609
augaaaguaaaacuacuuguucuguuauguacauuuacagcuacauaugcagacacaauauguauaggcuaccaugccaacaacucgaccgacacuguugacacaguacuugagaagaaugugacagugacacacucugucaaccuacuugaggacagucacaauggaaaacuaugucuacuaaaaggaauagccccacuacaauuggguaauugcagcguugccggauggaucuuaggaaacccagaaugcgaauuacugauuuccaaggaaucaugguccuacauuguagaaacaccaaauccugagaauggaacauguuacccaggauauuucgccgacuaugaggagcugagggagcaauugaguucaguaucuucauuugagagguucgaaauauuccccaaagagagcucauggcccaaccacaccguaaccggaguaucagcaucaugcucccauaacgggaaaagcaguuuuuacagaaauuugcuauggcugacgggaaagaaugguuuguauccaaaccugagcaaguccuaugcaaacaacaaagagaaagaaguccuuguacugugggguguucaucacccgccuaacauaggggaccaaagggcccucuaucauacagaaaaugcuuaugucucuguagugucuucacauuauagcagaagauucaccccagaaauagccaaaagacccaaggugagagaucaggaaggaagaaucaacuacuacuggacucugcuggaacccggggauacaauaauauuugaggcaaauggaaaucuaauagcgccaagguuugcuuucgcacugaguagaggcuuuggaucaggaaucaucaccucaaaugcaccaaugggugaaugugaugcgaagugucaaacaccucagggagcuauaaacaguagucuuccuuuccagaauguacacccagucacaauaggagaguguccaaaguaugucaggagugcaaaauuaagaaugguuacaggacuaaggaacaucccauccauucaauccagagguuuguuuggagccauugccgguuucauugaagggggguggacuggaaugguagaugguugguaugguuaucaccaucagaaugagcaaggaucuggguaugcugcagaucaaaaaagcacacaaaaugccauuaacgggauuacaaacaaggugaauucuguaauugagaaaaugaacacucaauucacagcugugggcaaagaauucaacaaauuggaaaggaggauggaaaacuuaaauaaaaagguugaugauggguuucuagacauuuggacauauaacgcagaauuguugguucuacuggaaaaugaaaggacuuuggacuuccaugacuccaacgugaagaaucuguaugagaaaguaaaaagccaauuaaagaauaaugccaaagaaauaggaaacggguguuuugaauucuaucacaaguguaacgaugaaugcauggagagugugaaaaauggaacuuaugacuauccaaaauauuccgaagaaucaaaguugaacagggagaaaauugauggagugaaauuggaaucaaugggagucuaucagauucuggcgaucuacucaacagucgccaguucccugguucuuuuggucucccugggggcaaucagcuucuggauguguuccaaugggucuuugcaguguagaauaugcaucuaa

SEQ ID NO: 34095 - RNA, 1698 nt, Artificial Sequence; identical to SEQ ID NO: 34032
  derived and/or modified CDS sequence (wt) from hemagglutinin__InfluenzaA__ABW40620

SEQ ID NO: 34096 - RNA, 1701 nt, Artificial Sequence; identical to SEQ ID NO: 34066
  derived and/or modified CDS sequence (wt) from hemagglutinin__InfluenzaA__ABW40631

SEQ ID NO: 34097 - RNA, 1698 nt, Artificial Sequence
  derived and/or modified CDS sequence (wt) from hemagglutinin__InfluenzaA__ABW40642
augaaaguaaaacuacugauucuguuauguacauuuacagccacauaugcagacacaauauguauaggcuaccaugccaacaacucgaccgacacuguugacacaguacuugagaagaaugugacagugacacacucugucaaccuacuugaggacagucacaauggaaaacuaugucuacuaaaaggaauagccccacuacaauuggguaauugcagcguugccggauggaucuuaggaaacccagaaugcgaauugcugauuuccaaggaaucaugguccuacauuguagagacaccaaauccugagaauggaacauguuacccaggguauuucgccgacuaugaggagcugagagagcaauugaguucaguaucuucauuugagagguucgaaauauuccccaaagagagcucauggcccaaccacaccguaaccggaguaucagcaucaugcucccauaacgggaaaagcaguuuuuacagaaauuugcuauggcugacggggaagaaugguuuguauccaaaccugagcaaguccuaugcaaacaacaaagagaaagaaguccuuguacugugggguguucaucacccgccuaacauaggggaccaaagggcccucuaucauacagaaaaugcuuaugucucuguagugucuucacauuauagcagaagauucaccccagaaauagccaaaagacccaaggugagagaucaggaaggaagaaucaacuacuacuggacucugcuugaacccggggauacaauaauauuugaggcaaauggaaaucuaauagcgccaagguuugcuuucgcacugaguagaggcuuuggaucaggaaucaucaccucaaaugcaccaauggaugaaugugaugcgaaaugucaaacaccucagggagcuauaaacagcagucuuccuuuccagaauguacacccagucacaauaggagaguguccaaaguaugucaggaguacaaaauuaagaaugguuacaggacuaaggaacauuccauccauucaauccagagguuuauuuggagccauugccgguuucauugaagggggguggacuggaaugguagaugguugguaugguuaucaccaucagaaugagcaaggaucuggguaugcugcagaucaaaaaagcacacaaaaugccauuaacgggauuacaaacaaggugaauucuguaauugagaaaaugaacacucaauucacagcugugggcaaagaauucaacaaauuggaaagaaggauggaaaacuuaaauaaaaaaguugaugauggguuucuagacauuuggacauauaacgcagaauuguugguucuacuggaaaaugaaaggacuuuggacuuccaugacuccaacgugaagaaucuguaugagaaaguaaaaagccaauuaaagaauaaugccaaagaaauaggaaacggguguuuugaauucuaucacaaguguaacgaugaaugcauggagagugugaaaaauggaacuuaugacuauccaaaauauuccgaagaaucaaaguugaacagggagaaaauugauggagugaaauuggaaucaaugggagucuaucagauuuuggcgaucuacucaacagucgccaguucccugguucuuuuggucucccugggggcaaucagcuucuggauguguuccaaugggucuuugcaguguagaauaugcaucuaa

SEQ ID NO: 34098 - RNA, 1701 nt, Artificial Sequence; identical to SEQ ID NO: 34066
  derived and/or modified CDS sequence (wt) from hemagglutinin__InfluenzaA__ABW40653

SEQ ID NO: 34099 - RNA, 1698 nt, Artificial Sequence; identical to SEQ ID NO: 34085
  derived and/or modified CDS sequence (wt) from hemagglutinin__InfluenzaA__ABW40664

SEQ ID NO: 34100 - RNA, 1698 nt, Artificial Sequence
  derived and/or modified CDS sequence (wt) from hemagglutinin__InfluenzaA__ABW40675
augaaaguaaaacuacuuguucuguuauguacauuuacagcuacauaugcagacacaauauguauaggcuaccaugccaacaacucgaccgacacuguugacacaguacuugagaagaaugugacagugacacacucugucaaccuacuugaggacagucacaauggaaaacuaugucuacuaaaaggaauagccccacuacaauuggguaauugcagcguugccggauggaucuuaggaaacccagaaugcgaauuacugauuuccaaggaaucaugguccuacauuguagaaacaccaaauccugagaauggaacauguuacccaggauauuucgccgacuaugaggagcugagggagcaauugaguucaguaucuucauuugagagguucgaaauauuccccaaagagagcucauggcccaaccacaccguaaccggaguaucagcaucaugcucccauaacgggaaaagcaguuuuuacagaaauuugcuauggcugacggggaagaaugguuuguauccaaaccugagcaaguccuaugcaaacaacaaagagaaagaaguccuuguacugugggguguucaucacccgccuaacauaggggaccaaagggcccucuaucauacagaaaaugcuuaugucucuguagugucuucacauuauagcagaagauucaccccagaaauagccaaaagacccaaggugagagaucaggaaggaagaaucaacuacuacuggacucugcuggaacccggggauacaauaauauuugaggcaaauggaaaucuaauagcgccaagguuugcuuucgcacugaguagaggcuuuggaucaggaaucaucaccucaaaugcaccaaugggugaaugugaugcgaagugucaaacaccucagggagcuauaaacaguagucuuccuuuccagaauguacauccagucacaauaggagaguguccaaaguaugucaggagugcaaaauuaagaaugguuacaggacuaaggaacaucccauccauucaauccagagguuuguuuggagccauugccgguuucauugaagggggguggacuggaaugguagaugguugguaugguuaucaccaucagaaugagcaaggaucuggguaugcugcagaucaaaaaagcacacaaaaugccauuaacgggauuacaaacaaggugaauucuguaauugagaaaaugaacacucaauucacagcugugggcaaagaauucaacaaauuggaaagaaggauggaaaacuuaaauaaaaagguugaugauggguuucuagacauuuggacauauaacgcagaauuguugguucuacuggaaaaugaaaggacuuuggacuuccaugacuccaacgugaagaaucuguaugagaaaguaaaaagccaauuaaagaauaaugccaaagaaauaggaaacggguguuuugaauucuaucacaaguguaacgaugaaugcauggagagugugaaaaauggaacuuaugacuauccaaaauauuccgaagaaucaaaguugaacagggagaaaauugauggagugaaauuggaaucaaugggagucuaucagauucuggcgaucuacucaacagucgccaguucccugguucuuuuggucucccugggggcaaucagcuucuggauguguuccaaugggucuuugcaguguagaauaugcaucuaa

SEQ ID NO: 34101 - RNA, 1698 nt, Artificial Sequence
  derived and/or modified CDS sequence (wt) from hemagglutinin__InfluenzaA__ABW71294
augaaaguaaaacuacuuguucuguuauguacauuuacagcuacauaugcagacacaauauguauaggcuaccaugccaacaacucgaccgacacuguugacacaguacuugagaagaaugugacagugacacacucugucaaccuacuugaggacagucacaauggaaaacuaugucuacuaaaaggaauagccccacuacaauuggguaauugcagcguugccggauggaucuuaggaaacccagaaugcgaauuacugauuuccaaggaaucaugguccuacauuguagaaacaccaaauccugagaauggaacauguuacccaggauauuucgccgacuaugaggagcugagggagcaauugaguucaguaucuucauuugagagguucgaaauauuccccaaagagagcucauggcccaaccacaccguaaccggaguaucagcaucaugcucccauaacgggaaaagcaguuuuuacagaaauuugcuauggcugacggggaagaaugguuuguauccaaaccugagcaaguccuaugcaaacaacaaagagaaagaaguccuuguaaugugggguguucaucacccgccuaacauaggggaccaaagggcccucuaucauacagaaaaugcuuaugucucuguagugucuucacauuauagcagaagauucaccccagaaauagccaaaagacccaaggugagagaucaggaaggaagaaucaacuacuacuggacucugcuggaacccggggauacaauaauauuugaggcaaauggaaaucuaauagcgccaagguuugcuuucgcacugaguagaggcuuuggaucaggaaucaucaccucaaaugcaccaaugggugaaugugaugcgaagugucaaacaccucagggagcuauaaacaguagucuuccuuuccagaauguacacccagucacaauaggagaguguccaaaguaugucaggagugcaaaauuaagaaugguuacaggacuaaggaacaucccauccauucaauccagagguuuguuuggagccauugccgguuucauugaagggggguggacuggaaugguagaugguugguaugguuaucaccaucagaaugagcaaggaucuggguaugcugcagaucaaaaaagcacacaaaaugccauuaacgggauuacaaacaaggugaauucuguaauugagaaaaugaacacucaauucacagcugugggcaaagaauucaacaaauuggaaagaaggauggaaaacuuaaauaaaaagguugaugauggguuucuagacauuuggacauauaacgcagaauuguugguucuacuggaaaaugaaaggacuuuggacuuccaugacuccaacgugaagaaucuguaugagaaaguaaaaagccaauuaaagaauaaugccaaagaaauaggaaacggguguuuugaauucuaucacaaguguaacgaugaaugcauggagagugugaaaaauggaacuuaugacuauccgaaauauuccgaagaaucaaaguugaacagggagaaaauugauggagugaaauuggaaucaaugggagucuaucagauucuggcgaucuacucaacagucgccaguucccugguucuuuuggucucccugggggcaaucagcuucuggauguguuccaaugggucuuugcaguguagaauaugcaucuaa

SEQ ID NO: 34102 - RNA, 1698 nt, Artificial Sequence
  derived and/or modified CDS sequence (wt) from hemagglutinin__InfluenzaA__ABW71305
augaaagugaaacuacugguucuguuauguacauuuacagcuacauaugcagacacaauauguauaggcuaccaugccaacaacucgaccgacacuguugacacaguacuugagaagaaugugacagugacacacucugucaaccuacuugaggaccgucacaauggaaaacuaugucuacuaaaaggaauagccccacuacaauuggguaauugcagcguugccggauggaucuuaggaaacccagaaugcgaauuacugauuuccaaggaaucaugguccuacauuguagaaacaccaaauccugagaauggaacauguuacccaggguauuucgccgacuaugaggagcugagggagcaauugaguucaguaucuucauuugagagguucgaaauauuccccaaagagagcucauggcccaaccacaccguaaccggaguaucagcaucuugcucccauaacgggaaaagcaguuuuuacagaaauuugcuauggcugacgggaaagaaugguuuguacccaaaccugagcagauccuaugcaaacaacaaagagaaagaaguccuuguacugugggguguucaucacccgccuaacauaggggaccaaagggcccucuaucauacagaaaaugcuuaugucucuguagugucuucacauuauagcagaagauucaccccagaaauagccaaaagacccaaggugagagaucaggaaggaagaaucaauuacuacuggacucuacuggaacccggggauacaauaauauuugaggcaaaugggaaucuaauagcgccaagguuugcuuucgcacugaguagaggcuuuggaucaggaaucaucaccucaaaugcaccaauggaugaaugugaugcgaagugucaaacaccucagggagcuauaaacagcagucuuccuuuccagaauguacacccagucacaauaggagaguguccaaaguaugucaggagugcaaaauuaagaaugguuacaggacuaaggaacaucccauccauucaauccagagguuuguuuggagccauugccgguuucauugaagggggguggacuggaaugguagaugguugguaugguuaucaccaccagaaugagcaaggaucuggguaugcugcagaucaaaaaagcacacaaaaugccauuaacgggauuacaaacaaggugaauucugugauugagaaaaugaacacucaauucacagcugugggcaaagaauucaacaaauuggaaagaagaauggaaaacuuaaauaaaaaaguugaugauggguuucuagacauuuggacguauaacgcagaauuguugguucuacuggaaaaugaaaggacuuuggacuuccaugacuccaacgugaagaaucuguaugagaaaguaaaaagccaauuaaagaauaaugccaaagaaauaggaaacggguguuuugaauucuaucacaaguguaacgaugaaugcauggagagugugaaaaauggaacuuaugacuauccaaaauauuccgaagaaucaaaguuaaacagggagaaaauugauggagugaaauuggaaucaaugggagucuaucagauucuggcgaucuacucaacagucgccaguucccugguucuuuuggucucccugggggcaaucagcuucuggauguguuccaaugggucuuugcaguguagaauaugcaucuaa

SEQ ID NO: 34103 - RNA, 1698 nt, Artificial Sequence
  derived and/or modified CDS sequence (wt) from hemagglutinin__InfluenzaA__ABW71316
augaaaguaaaacuacugauucuguuauguacauuuacagcuacauaugcagacacaauauguauaggcuaccaugccaacaacucgaccgacacuguugacacaguacuugagaagaaugugacagugacacacucugucaaccuacuugaggacagucacaauggaaaacuaugucuacuaaaaggaauagccccacuacaauuggguaauugcagcguugccggauggaucuuaggaaacccagaaugcgaauugcugauuuccaaggaaucaugguccuacauuguagagacaccaaauccugagaauggaacauguuacccaggguauuucgccgacuaugaggagcugagagagcaauugaguucaguaucuucauuugagagguucgaaauauuccccaaagagagcucauggcccaaccacaccguaaccggaguaucagcaucaugcucccauaacgggaaaagcaguuuuuacagaaauuugcuauggcugacggggaagaaugguuuguauccaaaccugagcaaguccuaugcaaacaacaaagagaaagaaguccuuguacugugggguguucaucacccgccuaacauaggggaccaaagggcccucuaucauacagaaaaugcuuaugucucuguagugucuucacauuauagcagaagauucaccccagaaauagccaaaagacccaaggugagagaucaggaaggaagaaucaacuacuacuggacucugcuugaacccagggauacaauaauauuugaggcaaauggaaaucuaauagcgccaagguuugcuuucgcacugaguagaggcuuuggaucaggaaucaucaccucaaaugcaccaauggaugaaugugaugcgaaaugucaaacaccucagggagcuauaaacagcagucuuccuuuccagaauguacacccagucacaauaggagaguguccaaaguaugucaggaguacaaaauuaagaaugguuacaggacuaaggaacaucccauccauucaauccagagguuuauuuggagccauugccgguuucauugaagggggguggacuggaaugguagaugguugguaugguuaucaccaucagaaugagcaaggaucuggguaugcugcagaucaaaaaagcacacaaaaugccauuaacgggauuacaaacaaggugaauucuguaauugagaaaaugaacacucaauucacagcugugggcaaagaauucaacaaauuggaaagaaggauggaaaacuuaaauaaaaaaguugaugauggguuucuagacauuuggacauauaacgcagaauuguugguucuacuggaaaaugaaaggacuuuggacuuccaugacuccaacgugaagaaucuguaugagaaaguaaaaagccaauuaaagaauaaugccaaagaaauaggaaacggguguuuugaauucuaucacaaguguaacgaugaaugcauggagagugugaaaaauggaacuuaugacuauccaaaauauuccgaagaaucaaaguugaacagggagaaaauugauggagugaaauuggaaucaaugggagucuaucagauuuuggcgaucuacucaacagucgccaguucccugguucuuuuggucucccugggggcaaucagcuucuggauguguuccaaugggucuuugcaguguagaauaugcaucuaa

SEQ ID NO: 34104 - RNA, 1698 nt, Artificial Sequence; identical to SEQ ID NO: 33948
  derived and/or modified CDS sequence (wt) from hemagglutinin__InfluenzaA__ABW71327

SEQ ID NO: 34105 - RNA, 1698 nt, Artificial Sequence
  derived and/or modified CDS sequence (wt) from hemagglutinin__InfluenzaA__ABW71338
augaaaguaaaacuacugguucuguuauguacauuuacagcuacauaugcagacacaauauguauaggcuaccaugccaacaacucgaccgacacuguugacacaguacuugagaagaaugugacagugacacacucugucaaccuacuugaggacagucacaauggaaaacuaugucuacuaaaaggaauagccccacuacaauuggguaauugcagcguugccggauggaucuuaggaaacccagaaugcgaauuacugauuuccaaggaaucaugguccuacauuguagagacaccaaauccugagaauggaacauguuacccaggguauuucgcugacuaugaggagcugagagagcaauugaguucaguaucuucauuugagagguucgaaauauuccccaaagagagcucauggcccaaccacaccguaaccggaguaucagcaucaugcucccauaacgggaaaagcaguuuuuacagaaauuugcuauggcugacggggaagaaugguuuguauccaaaccugagcaaguccuaugcaaacaacaaagagaaagaaguccuuguacugugggguguucaucacccgccuaacauaggggaccaaagggcccucuaucauacagaaaaugcuuaugucucuguagugucuucacauuauagcagaagauucaccccagaaauagccaaaagacccaaggugagagaucaggaaggaagaaucaacuacuacuggacucugcuugaacccggggauacaauaauauuugaggcaaauggaaaucuaauagcgccaagguuugcuuucgcacugaguagaggcuuuggaucaggaaucaucaccucaaaugcaccaauggaugaaugugaugcgaaaugucaaacaccucagggagcuauaaacagcagucuuccuuuccagaauguacacccagucacaauaggagaguguccaaaguaugucaggaguacaaaauuaagaaugguuacaggacuaaggaacaucccauccauucaauccagagguuuguuuggagccauugccgguuucauugaagggggguggacuggaaugguagaugguugguaugguuaucaccaucagaaugagcaaggaucuggguaugcugcugaucaaaaaagcacacaaaaugccauuaacgggauuacaaacaaggugaauucuguaauugagaaaaugaacacucaauucacagcugugggcaaagaauucaacaaauuggaaagaaggauggaaaacuuaaauaaaaaaguugaugauggauuucuagacauuuggacauauaacgcagaauuguugguucuacuggaaaaugaaaggacuuuggacuuccaugacuccaacgugaagaaucuguaugagaaaguaaaaagccaauuaaagaauaaugccaaagaaauaggaaacggguguuuugaauucuaucacaaguguaacgaugaaugcauggagagugugaaaaauggaacuuaugacuauccaaaauauuccgaagaaucaaaguugaacagggagaaaauugauggagugaaauuggaaucaaugggagucuaucagauuuuggcgaucuacucaacagucgccaguucccugguucuuuuggucucccugggggcaaucagcuucuggauguguuccaaugggucuuugcaguguagaauaugcaucuaa

SEQ ID NO: 34106 - RNA, 1701 nt, Artificial Sequence; identical to SEQ ID NO: 33980
  derived and/or modified CDS sequence (wt) from hemagglutinin__InfluenzaA__ABW71349

SEQ ID NO: 34107 - RNA, 1698 nt, Artificial Sequence
  derived and/or modified CDS sequence (wt) from hemagglutinin__InfluenzaA__ABW71360
augaaagugaaacuacugguucuguuauguacauuuacagcuacauaugcagacacaauauguauaggcuaccaugccaacaacucgaccgacacuguugacacaguacuugagaagaaugugacagugacacacucugucaaccuacuugaggaccgucacaauggaaaacuaugucuacuaaaaggaauagccccacuacaauuggguaauugcagcguugccggauggaucuuaggaaacccagaaugcgaauuacugauuuccaaggaaucaugguccuacauuguagaaacaccaaauccugagaauggaacauguuacccaggguauuucgccgacuaugaggagcugagggagcaauugaguucaguaucuucauuugagagguucgaaauauuccccaaagagagcucauggcccaaccacaccguaaccggaguaucagcaucaugcucccauaacgggaaaagcaguuuuuacagaaauuugcuauggcugacgggaaagaaugguuuguacccaaaccugagcagauccuaugcaaacaacaaagagaaagaaguccuuguacugugggguguucaucacccgccuaacauaggggaccaaagggcccucuaucauacagaaaaugcuuaugucucuguagugucuucacauuauagcagaagauucaccccagaaauagccaaaagacccaaggugagagaucaggaaggaagaaucaauuacuacuggacucuacuggaacccggggauacaauaauauuugaggcaaaugggaaucuaauagcgccaagguuugcuuucgcacugaguagaggcuuuggaucaggaaucaucaccucaaaugcaccaauggaugaaugugaugcgaagugucaaacaccucagggagcuauaaacagcagucuuccuuuucagaauguacacccagucacaauaggagaguguccaaaguaugucaggagugcaaaauuaagaaugguuacaggacuaaggaacaucccauccauucaauccagagguuuguuuggagccauugccgguuucauugaagggggauggacuggaaugguagaugguugguaugguuaucaccaccagaaugagcaaggaucuggguaugcugcagaucaaaaaagcacacaaaaugccauuaacgggauuacaaacaaggugaauucugugauugagaaaaugaacacucaauucacagcugugggcaaagaauucaacaaauuggaaagaagaauggaaaacuuaaauaaaaaaguugaugauggguuucuagacauuuggacguauaacgcagaauuguugguucuacuggaaaaugaaaggacuuuggacuuccaugacuccaacgugaagaaucuguaugagaaaguaaaaagccaauuaaagaauaaugccaaagaaauaggaaacggguguuuugaauucuaucacaagugugacgaugaaugcauggagagugugaaaaauggaacuuaugacuauccaaaauauuccgaagaaucaaaguuaaacagggagaaaauugauggagugaaauuggaaucaaugggagucuaucagauucuggcgaucuacucaacagucgccaguucccugguucuuuuggucucccugggggcaaucagcuucuggauguguuccaaugggucuuugcaguguagaauaugcaucuaa

SEQ ID NO: 34108 - RNA, 1698 nt, Artificial Sequence; identical to SEQ ID NO: 34100
  derived and/or modified CDS sequence (wt) from hemagglutinin__InfluenzaA__ABW71371

SEQ ID NO: 34109 - RNA, 1698 nt, Artificial Sequence
  derived and/or modified CDS sequence (wt) from hemagglutinin__InfluenzaA__ABW71382
augaaaguaaaacuacugauucuguuauguacauuuacagcuacauaugcagacacaauauguauaggcuaccaugccaacaacucgaccgacacuguugacacaguacuugagaagaaugugacagugacacacucugucaaccuacuugaggacagucacaauggaaaacuaugucuacuaaaaggaauagccccacuacaauuggguaauugcagcguugccggauggaucuuaggaaacccagaaugcgaauugcugauuuccaaggaaucaugguccuacauuguagagacaccaaauccugagaauggaacauguuacccaggguauuucgccgacuaugaggagcugagagagcaauugaguucaguaucuucauuugagagguucgaaauauuccccaaagagagcucaugguccaaccacaccauaaccggaguaucagcaucaugcucccauaacgggaaaagcaguuuuuacagaaauuugcuauggcugacggggaagaaugguuuguauccaaaccugagcaaguccuaugcaaacaacaaagagaaagaaguccuuguacugugggguguucaucacccgccuaacauaggggaccaaagggcccucuaucauacagaaaaugcuuaugucucuguagugucuucacauuauagcagaagauucaccccagaaauagccaaaagacccaaggugagagaucaggaaggaagaaucaacuacuacuggacucugcuugaacccggggauacaauaauauuugaggcaaauggaaaucuaauagcgccaagguuugcuuucgcacugaguagaggcuuuggaucaggaaucaucaccucaaaugcaccaauggaugaaugugaugcgaaaugucaaacaccucagggagcuauaaacagcagucuuccuuuccagaauguacacccagucacaauaggagaguguccaaaguaugucaggaguacaaaauuaagaaugguuacaggacuaaggaacaucccauccauucaauccagagguuuauuuggagccauugccgguuucauugaagggggguggacuggaaugguagaugguugguaugguuaucaccaucagaaugagcaaggaucuggguaugcugcagaucaaaaaagcacacaaaaugccauuaacgggauuacaaacaaggugaauucuguaauugagaaaaugaacacucaauucacagcugugggcaaagaauucaacaaauuggaaagaaggauggaaaacuuaaauaaaaaaguugaugauggguuucuagacauuuggacauauaacgcagaauuguugguucuacuggaaaaugaaaggacuuuggacuuccaugacuccaacgugaagaaucuguaugagaaaguaaaaagccaauuaaagaauaaugccaaagaaauaggaaacggguguuuugaauucuaucacaaguguaacgaugaaugcauggagagugugaaaaauggaacuuaugacuauccaaaauauuccgaagaaucaaaguugaacagggagaaaauugauggagugaaauuggaaucaaugggagucuaucagauuuuggcgaucuacucaacagucgccaguucccugguucuuuuggucucccugggggcaaucagcuucuggauguguuccaaugggucuuugcaguguagaauaugcaucuaa

SEQ ID NO: 34110 - RNA, 1698 nt, Artificial Sequence
  derived and/or modified CDS sequence (wt) from hemagglutinin__InfluenzaA__ABW71393
augaaaguaaaacuacuuguucuguuauguacauuuacagcuacauaugcagacacaauauguauaggcuaccaugccaacaacucgaccgacacuguugacacaguacuugagaagaaugugacagugacacacucugucaaccuacuugaggacagucacaauggaaaacuaugucuacuaaaaggaauagccccacuacaauuggguaauugcagcguugccggauggaucuuaggaaacccagaaugcgaauuacugauuuccaaggaaucaugguccuacauuguagaaacaccaaauccugagaauggaacauguuacccaggauauuucaccgacuaugaggagcugagggagcaauugaguucaguaucuucauuugagagguucgaaauauuccccaaagagagcucauggcccaaccacaccguaaccggaguaucagcaucaugcucccauaacgggaaaagcaguuuuuacagaaauuugcuauggcugacggggaagaaugguuuguauccaaaccugagcaaguccuaugcaaacaacaaagagaaagaaguccuuguacugugggguguucaucacccgccuaacauaggggaccaaagggcccucuaucauacagaaaaugcuuaugucucuguagugucuucacauuauagcagaagauucaccccagaaauagccaaaagacccaaggugagagaucaggaaggaagaaucaacuacuacuggacucugcuggaacccggggauacaauaauauuugaggcaaauggaaaucuaauagcgccaagguuugcuuucgcacugaguagaggcuuuggaucaggaaucaucaccucaaaugcaccaaugggugaaugugaugcgaagugucaaacaccucagggagcuauaaacaguagucuuccuuuccagaauguacauccagucacaauaggagaguguccaaaguaugucaggagugcaaaauuaagaaugguuacaggacuaaggaacaucccauccauucaauccagagguuuguuuggagccauugccgguuucauugaagggggguggacuggaaugguagaugguugguaugguuaucaccaucagaaugagcaaggaucuggguaugcugcagaucaaaaaagcacacaaaaugccauuaacgggauuacaaacaaggugaauucuguaauugagaaaaugaacacucaauucacagcugugggcaaagaauucaacaaauuggaaagaaggauggaaaacuuaaauaaaaagguugaugauggguuucuagacauuuggacauauaacgcagaauuguugguucuacuggaaaaugaaaggacuuuggacuuccaugacuccaacgugaagaaucuguaugagaaaguaaaaagccaauuaaagaauaaugccaaagaaauaggaaacggguguuuugaauucuaucacaaguguaacgaugaaugcauggagagugugaaaaauggaacuuaugacuauccaaaauauuccgaagaaucaaaguugaacagggagaaaauugauggagugaaauuggaaucaaugggagucuaucagauucuggcgaucuacucaacagucgccaguucccugguucuuuuggucucccugggggcaaucagcuucuggauguguuccaaugggucuuugcaguguagaauaugcaucuaa

SEQ ID NO: 34111 - RNA, 1698 nt, Artificial Sequence
  derived and/or modified CDS sequence (wt) from hemagglutinin__InfluenzaA__ABW71404
augaaaguaaaacuacuuguucuguuauguacauuuacagcuacauaugcagacacaauauguauaggcuaccaugccaacaacucgaccgacacuguugacacaguacuugagaagaaugugacagugacacacucugucaaccuacuugaggacagucacaauggaaaacuaugucuacuaaaaggaauagccccacuacaauuggguaauugcagcguugccggauggaucuuaggaaacccagaaugcgaauuacugauuuccaaggaaucaugguccuacauuguagaaacaccaaauccugagaauggaacauguuacccaggauauuucgccgacuaugaggagcugagggagcaauugaguucaguaucuucauuugagagguucgaaauauuccccaaagagagcucauggcccaaccacaccguaaccggaguaucagcaucaugcucccauaacgggaaaagcaguuuuuacagaaauuugcuauggcugacggggaagaaugguuuguauccaaaccugagcaaguccuaugcaaacaacaaagagaaagaaguccuuguaaugugggguguucaucacccgccuaacauaggggaccaaagggcccucuaucauacagaaaaugcuuaugucucuguagugucuucacauuauagcagaagauucaccccagaaauagccaaaagacccaaggugagagaucaggaaggaagaaucaacuacuacuggacucugcuggaacccggggauacaauaauauuugaggcaaauggaaaucuaauagcgccaagguuugcuuucgcacugaguagaggcuuuggaucaggaaucaucaccucaaaugcaccaaugggugaaugugaugcgaagugucaaacaccucagggagcuauaaacaguagucuuccuuuccagaauguacacccagucacaauaggagaguguccaaaguaugucaggagugcaaaauuaagaaugguuacaggacuaaggaacaucccauccauucaauccagagguuuguuuggagccauugccgguuucauugaagggggguggacuggaaugguagaugguugguaugguuaucaccaucagaaugagcaaggaucuggguaugcugcagaucaaaaaagcacacaaaaugccauuaacgggauuacaaacaaggugaauucuguaauugagaaaaugaacacucaauucacagcugugggcaaagaauucaacaaauuggaaagaaggauggaaaacuuaaauaaaaaaguugaugauggguuucuagacauuuggacauauaacgcagaauuguugguucuacuggaaaaugaaaggacuuuggacuuccaugacuccaacgugaagaaucuguaugagaaaguaaaaagccaauuaaagaauaaugccaaagaaauaggaaacggguguuuugaauucuaucacaaguguaacgaugaaugcauggagagugugaaaaauggaacuuaugacuauccaaaauauuccgaagaaucaaaguugaacagggagaaaauugauggagugaaauuggaaucaaugggagucuaucagauucuggcgaucuacucaacagucgccaguucccugguucuuuuggucucccugggggcaaucagcuucuggauguguuccaaugggucuuugcaguguagaauaugcaucuaa

SEQ ID NO: 34112 - RNA, 1698 nt, Artificial Sequence
  derived and/or modified CDS sequence (wt) from hemagglutinin__InfluenzaA__ABW71415
augaaaguaaaacuacuuguucuguuauguacauuuacagcuacauaugcagacacaauauguauaggcuaccaugccaacaacucgaccgacacuguugacacaguacuugagaagaaugugacagugacacacucugucaaccuacuugaggacagucacaauggaaaacuaugucuacuaaaaggaauagccccacuacaauuggguaauugcagcguugccggauggaucuuaggaaacccagaaugcgaauuacugauuuccaaggaaucaugguccuacauuguagaaacaccaaauccugagaauggaacauguuacccaggauauuucgccgacuaugaggagcugagggagcaauugaguucaguaucuucauuugagagguucgaaauauuccccaaagagagcucauggcccaaccacaccguaaccggaguaucagcaucaugcucccauagugggaaaagcaguuuuuacagaaauuugcuauggcugacggggaagaaugguuuguauccaaaccugagcaaguccuaugcaaacaacaaagagaaagaaguccuuguacugugggguguucaucacccgccuaacauaggggaccaaagggcccucuaucauacagaaaaugcuuaugucucuguagugucuucacauuauagcagaagauucaccccagaaauagccaaaagacccaaggugagagaucaggaaggaagaaucaacuacuacuggacucugcuggaacccggggauacaauaauauuugaggcaaauggaaaucuaauagcgccaagguuugcuuucgcacugaguagaggcuuuggaucaggaaucaucaccucaaaugcaccaaugggugaaugugaugcgaagugucaaacaccucagggagcuauaaacaguagucuuccuuuccagaauguacauccagucacaauaggggaguguccaaaguaugucaggagugcaaaauuaagaaugguuacaggacuaaggaacaucccauccauucaaucccgagguuuguuuggagccauugccgguuucauugaagggggguggacuggaaugguagaugguugguaugguuaucaccaucagaaugagcaaggaucuggguaugcugcagaucaaaaaagcacacaaaaugccauuaacgggauuacaaacaaggugaauucuguaauugagaaaaugaacacucaauucacagcugugggcaaagaauucaacaaauuggaaagaaggauggaaaacuuaaauaaaaagguugaugauggguuucuagacauuuggacauauaacgcagaauuguugguucuacuggaaaaugaaaggacuuuggacuuccaugacuccaacgugaagaaucuguaugagaaaguaaaaagccaauuaaagaauaaugccaaagaaauaggaaacggguguuuugaauucuaucacaaguguaacgaugaaugcauggagagugugaaaaauggaacuuaugacuauccaaaauauuccgaagaaucaaaguugaacagggagaaaauugauggagugaaauuggaaucaaugggagucuaucagauucuggcgaucuacucaacagucgccaguucccugguucuuuuggucucccugggggcaaucagcuucuggauguguuccaaugggucuuugcaguguagaauaugcaucuaa

SEQ ID NO: 34113 - RNA, 1698 nt, Artificial Sequence
  derived and/or modified CDS sequence (wt) from hemagglutinin__InfluenzaA__ABW71426
augaaagcaaaacuacugauucuguuauguacauuuacagcuacauaugcagacacaauauguauagguuaccaugccaacaacucgaccgacacuguugacacaguacuugagaagaaugugacagugacacacucugucaaccuacuugaggacagucacaauggaaaacuaugucuacuaaaaggaauagccccacuacaauuggguaauugcagcguugccggauggaucuuaggaaacccagaaugcgaauuacugauuuccaaggaaucaugguccuacauuguagagacaccaaauccugagaauggaacauguuacccaggguauuucgccgacuaugaggagcugagagagcaauugaguucaguaucuucauuugagagguucgaaauauuccccaaagagagcucauggcccaaccacaccguaaccggaguaucagcaucaugcucccauaacgggaaaagcaguuuuuacagaaauuugcuauggcugacggggaagaaugguuuguauccaaaccugagcaaguccuaugcaaacaacaaagagaaagaaguccuuguacugugggguguucaucacccgccuaacauaggggaccaaagggcccucuaucauacagaaaaugcuuaugucucuguagugucuucacauuauagcagaagauucaccccagaaauagccaaaagacccaaggugagagaucaggaaggaagaaucaacuacuacuggacucugcuugaacccggggauacaauaauauuugaggcaaauggaaaucuaauagcgccaagguuugcuuucgcacugaguagaggcuuuggaucaggaaucaucaccucaaaugcaccaauggaugaaugugaugcgaaaugucaaacaccucagggagcuauaaacagcagucuuccuuuccagaauguacacccagucacaauaggagaguguccaaaguaugucaggaguacaaaauuaagaaugguuacaggacuaaggaacaucccauccauucaauccagagguuuauuuggagccauugccgguuucauugaagggggguggacuggaaugguagaugguugguaugguuaucaccaucagaaugagcaaggaucuggguaugcugcagaucaaaaaagcacacaaaaugccauuaacgggauuacaaacaaggugaauucuguaauugagaaaaugaacacucaauucacagcugugggcaaagaauucaacaaauuggaaagaaggauggaaaacuuaaauaaaaaaguugaugauggguuucuagacauuuggacauauaacgcagaauuguugguucuacuagaaaaugaaaggacuuuggacuuccaugacuccaacgugaagaaucuguaugagaaaguaaaaagccaauuaaagaauaaugccaaagaaauaggaaacggguguuuugaauucuaucacaaguguaacgaugaaugcauggagagugugaaaaauggaacuuaugacuauccaaaauauuccgaagaaucaaaguugaacagggagaaaauugauggagugaaauuggaaucaaugggagucuaucagauuuuggcgaucuacucaacagucgccaguucccugguucuuuuggucucccugggggcaaucagcuucuggauguguuccaaugggucuuugcaguguagaauaugcaucuaa

SEQ ID NO: 34114 - RNA, 1698 nt, Artificial Sequence
  derived and/or modified CDS sequence (wt) from hemagglutinin__InfluenzaA__ABW71448
augaaaguaaaacuacugguucuguuauguacauuuacagcuacauaugcagacacaauauguauaggcuaccaugccaacaacucgaccgacacuguugacacaguacuugagaagaaugugacagugacacacucugucaaccuacuugaggacagucacaauggaaaacuaugucuacuaaaaggaauagccccacuacaauuggguaauugcagcguugccggauggaucuuaggaaacccagaaugcgaauuacugauuuccaaggaaucaugguccuacauuguagagacaccaaauccugagaauggaacauguuacccaggguauuucgccgacuaugaggagcugagagagcaauugaguucaguaucuucauuugagagguucgaaauauuccccaaagagagcucauggcccaaccacaccguaaccggaguaucagcaucaugcucccauaacgggaaaagcaguuuuuacagaaauuugcuauggcugacggggaagaaugguuuguauccaaaccugagcaaguccuaugcaaacaacaaagagaaagaaguccuuguacugugggguguucaucacccgccuaacauaggggaccaaagggcccucuaucauacagaaaaugcuuaugucucuguagugucuucacauuauagcagaagauucaccccagaaauagccaaaagacccaaggugagagaucaggaaggaagaaucaacuacuacuggacucugcuugaacccggggauacaauaauauuugaggcaaauggaaaucuaauagcgccaagguuugcuuucgcacugaguagaggcuuuggaucaggaaucaucaccucaaaugcaccaauggaugaaugugaugcgaaaugucaaacaccucagggagcuauaaacagcagucuuccuuuccagaauguacacccagucacaauaggagaguguccaaaguaugucaggaguacaaaauuaagaaugguuacaggacuaaggaacaucccauccauucaauccagagguuuguuuggagccauugccgguuucauugaagggggguggacuggaaugguagaugguugguaugguuaucaccaucagaaugagcaaggaucuggguaugcugcugaucaaaaaagcacacaaaaugccauuaacgggauuacaaacaaggugaauucuguaauugagaaaaugaacacucaauucacagcugugggcaaagaauucaacaaauuggaaagaaggauggaaaacuuaaauaaaaaaguugaugauggguuucuagacauuuggacauauaacgcagaauuguugguucuacuggaaaaugaaaggacuuuggacuuccaugacuccaacgugaagaaucuguaugagaaaguaaaaagccaauuaaagaauaaugccaaagaaauaggaaacggguguuuugaauucuaucacaaguguaacgaugaaugcauggagagugugaaaaauggaacuuaugacuauccaaaauauuccgaagaaucaaaguugaacagggagaaaauugauggagugaaauuggaaucaaugggagucuaucagauuuuggcgaucuacucaacaaucgccaguucccugguucuuuuggucucccugggggcaaucagcuucuggauguguuccaaugggucuuugcaguguagaauaugcaucuaa

SEQ ID NO: 34115 - RNA, 1698 nt, Artificial Sequence; identical to SEQ ID NO: 34079
  derived and/or modified CDS sequence (wt) from hemagglutinin__InfluenzaA__ABW71459

SEQ ID NO: 34116 - RNA, 1698 nt, Artificial Sequence
  derived and/or modified CDS sequence (wt) from hemagglutinin__InfluenzaA__ABW71470
augaaaguaaaacuacugguucuguuauguacauuuacagcuacauaugcagacacaauauguauaggcuaccaugccaacaacucgaccgacacuguugacacaguacuugagaagaaugugacagugacacacucugucaaccuacuugaggacagucacaauggaaaacuaugucuacuaaaaggaauagccccacuacaauuggguaauugcagcguugccggauggaucuuaggaaacccagaaugcgaauuacugauuuccaaggaaucaugguccuacauuguagagacaccaaauccugagaauggaacauguuacccaggguauuucgccgacuaugaggagcugagagagcaauugaguucaguaucuucauuugagagguucgaaauauuccccaaagagagcucauggcccaaccacaccguaaccggaguaucagcaucaugcucccauaacgggaaaagcaguuuuuacagaaauuugcuauggcugacggggaagaaugguuuguauccaaaccugagcaaguccuaugcaaacaacaaagagaaagaaguccuuguacugugggguguucaucauccgccuaacauaggggaccaaagggcccucuaucauacagaaaaugcuuaugucucuguagugucuucacauuauagcagaagauucaccccagaaauagccaaaagacccaaggugagagaucaggaaggaagaaucaacuacuacuggacucugcuugaacccggggauacaauaauauuugaggcaaauggaaaucuaauagcgccaagguuugcuuucgcacugaguagaggcuuuggaucaggaaucaucaccucaaaugcaccaauggaugaaugugaugcgaaaugucaaacaccucagggagcuauaaacagcagucuuccuuuccagaauguacacccagucacaauaggagaguguccaaaguaugucaggaguacaaaauuaagaaugguuacaggacuaaggaacaucccauccauucaauccagagguuuguuuggagccauugccgguuucauugaagggggguggacuggaaugguagauggaugguaugguuaccaccaucagaaugagcaaggaucuggguaugcugcugaucaaaaaagcacacaaaaugccauuaacgggauuacaaacaaggugaauucuguaauugagaaaaugaacacucaauucacagcugugggcaaagaauucaacaaauuggaaagaaggauggaaaacuuaaauaaaaaaguugaugauggguuucuagacauuuggacauauaacgcagaauuguugguucuacuggaaaaugaaaggacuuuggacuuccaugacuccaacgugaagaaucuguaugagaaaguaaaaagccaauuaaagaauaaugccaaagaaauaggaaacggguguuuugaauucuaucacaaguguaacgaugaaugcauggagagugugaaaaauggaacuuaugacuauccaaaauauuccgaagaaucaaaguugaacagggagaaaauugauggagugaaauuggaaucaaugggagucuaucagauuuuggcgaucuacucaacagucgccaguucccugguucuuuuggucucccugggggcaaucagcuucuggauguguuccaaugggucuuugcaguguagaauaugcaucuaa

SEQ ID NO: 34117 - RNA, 1707 nt, Artificial Sequence
  derived and/or modified CDS sequence (wt) from hemagglutinin__InfluenzaA__ABW74702
auggagaaaauagugcuucuucuugcaauagucagucuuguuaaaagugaucagauuugcauugguuaccaugcaaacaauucaacagagcagguugacacaaucauggaaaagaacguuacuguuacacaugcccaagacauauuggaaaagacacacaacgggaagcucugcgaucuagauggagugaagccucuaauuuuaagagauuguaguguagcuggauggcuccucgggaacccaaugugugacgaauucaucaauguaccggaauggucuuacauaguggagaaggccaauccaaccaaugaccucuguuacccagggaguuucaacgacuaugaagaacugaaacaccuauugagcagaauaaaccauuuugagaaaauucagaucauccccaaaaguucuugguccgaucaugaagccucaucaggagugaguucagcauguccauaccuggguaguuccuccuuuuuuagaaaugugguauggcuuaucaaaaagaacaguacauacccaacaauaaagaaaagcuacaauaauaccaaccaagaagaucuuuugguacugugggggauucaccauccuaaugaugcggcagagcagacaaggcuauaucaaaacccaaccaccuauauuuccauugggacaucaacacuaaaccagagauugguaccaaaaauagcuacuagauccaaaguaaaugggcaaaguggaaggauggaguucuucuggacaauuuuaaaaccuaaugaugcaaucaacuucgagaguaauggaaauuucauugcuccagaauaugcauacaaaauugucaagaaaggggacucagcaauuaugaagagugaauuggaauaugguaacugcaacaccaagugucaaacuccaaugggggcgauaaacucuaguaugccauuccacaacauacacccucucaccaucggggaaugccccaaauaugugaaaucaaacagauuaguccuugcaacagggcucagaaauagcccucaaagagaaagcagaagaaaaaagagaggacuauuuggagcuauagcagguuuuauagagggaggauggcagggaaugguagaugguugguauggguaccaccauagcaaugagcaggggaguggguacgcugcagacaaagaauccacucaaaaggcaauagauggagucaccaauaaggucaacucaaucauugacaaaaugaacacucaguuugaggccguuggaagggaauuuaacaacuuagaaaggagaauagagaauuuaaacaagaagauggaagacggguuucuagaugucuggacuuauaaugccgaacuucugguucucauggaaaaugagagaacucuagacuuucaugacucaaauguuaagaaccuauacgacaagguccgacuacagcuuagggauaaugcaaaggagcugggcaacgguuguuucgaguucuaucacaaaugugauaaugaauguauagaaaguauaagaaauggaacauauaacuacccgcaguauucagaagaagcaagauuaaaaagagaggaaauaaguggaguaaaauuggaaucaauaggaacuuaccaaauacugucaauuuauucaacaguggcgaguucccuagcacuggcaaucaugauggcuggucuaucuuuauggaugugcuccaauggaucguuacaaugcagaauuugcauuuaa

SEQ ID NO: 34118 - RNA, 1707 nt, Artificial Sequence
  derived and/or modified CDS sequence (wt) from hemagglutinin__InfluenzaA__ABW74703
auggagaaaauagugcuucuucuugcaauagucagucuuguuaaaagugaucagauuugcauugguuaccaugcaaacaauucaacagagcagguugacacaaucauggaaaagaacguuacuguuacacaugcccaagacauacuggaaaagacacacaacgggaagcucugcgaucuagauggagugaagccucuaauuuuaaaagauuguaguguagcuggauggcuccucgggaacccaaugugugacgaauucaucaauguaccggaauggucuuacauaguggagaaggccaauccaaccaaugaccucuguuacccagggaguuucaacgacuaugaagaacugaaacaccuauugagcagaauaaaccauuuugagaaaauucaaaucauccccaaaaguucuugguccgaucaugaagccucaucaggagugagcucagcauguccauaccugggaagucccuccuuuuuuagaaaugugguauggcuuaucaaaaagaacaguacauacccaacaauaaagaaaagcuacaauaauaccaaccaagaagaucuuuugguacuguggggaauucaccacccuaaugaugcggcagagcagacaaggcuauaucaaaacccaaccaccuauauuuccauugggacaucaacacuaaaccagagauugguaccaaaaauagcuacuagauccaaaguaaacgggcaaaguggaaggauggaguucuucuggacaauuuuaaaaccuaaugaugcagucaacuucgagaguaauggaaauuucauugcuccagaauaugcauacaaaauugucaagaaaggggacucagcaauuaugaaaagugaauuggaauaugguaacuguaacaccaagugucaaacuccaaugggggcgauaaacucuaguaugccauuccacaacauacacccucucaccaucggggaaugccccaaauaugugaaaucaaacagauuaguccuugcaacagggcucagaaauagcccucaaagagagagcagaagaaaaaagagaggacuauuuggagcuauagcagguuuuauagagggaggauggcaggguaugguagaugguugguauggguaccaccauagcaaugagcaggggaguggguacgcugcagacaaagaauccacucaaaaggcaauagauggagucaccaauaaggucaacucaaucauugacaaaaugaacacucaguuugaggccguuggaagggaauuuaauagcuuagaaaggagaauagagaauuuaaacaagaagauggaagacggguuucuagauguuuggacuuauaaugccgaacuucugguucucauggaaaaugagagaacucuagacuuucaugacucaaauguuaagaaccucuacgacaagguccgacuacagcuuagggauaaugcaaaggagcuggguaacgguuguuucgaguucuaucacaaaugugauaaugaauguauggaaaguauaagaaacggaacguacaacuauccgcaguauucagaagaagcaagauuaaaaagagaggaaauaagugggguaaaauuggaaucaauaggaacuuaccaaauacugucaauuuauucaacaguggcgaguucccuagcacuggcaaucaugauagcuggucuaucuuuauggaugugcuccaauggaucguuacagugcagaauuugcauuuaa

SEQ ID NO: 34119 - RNA, 1707 nt, Artificial Sequence
  derived and/or modified CDS sequence (wt) from hemagglutinin__InfluenzaA__ABW74705
auggagaaaauagugcuucuucuugcaauagucagucuuguuaaaagugaucagauuugcauugguuaccaugcaaacaauucaacagagcagguugacacaaucauggaaaagaacguuacuguuacacaugcccaagacauacuggaaaagacacacaacgggaagcucugcgaucuagauggagugaagccucuaauuuuaagagauuguaguguagcuggauggcuccucgggaacccaaugugugacgaauucaucaauguaccggaauggucuuacauaguggagaaggccaauccaaccaaugaccucuguuacccagggaguuucaacgacuaugaagaacugaaacaucuauugagcagaauaaaccauuuugagaaaauucaaaucauccccaaaaguucuugguccgaucaugaagccucaucaggagugagcucagcauguccauaccugggaagucccuccuuuuuuagaaaugugguauggcuuaucaaaaagaacaguacauacccaacaauaaagaaaagcuacaauaauaccaaccaagaagaucuuuugguacuguggggaauucaccauccuaaugaugcggcagagcagacaaggcuauaucaaaacccaaccaccuauauuuccauugggacaucaacacuaaaccagagauugguaccaaaaauagcuacuagauccaaaguaaacgggcaaaguggaaggauggaguucuucuggacaauuuuaaaaccuaaugaugcaaucaacuucgaaaguaauggaaauuucauugcuccagaauaugcauacaaaauugucaagaaaggggacucagcaauuaugaaaagugaauuggaauaugguaacugcaacaccaagugucaaacuccaaugggggcgauaaacucuaguaugccauuccacaacauacacccucucaccaucggggaaugccccaaauaugugaaaucaaacagauuaguccuugcaacagggcucagaaauagcccucaaagagagagcagaagaaaaaagagaggacuauuuggagcuauagcagguuuuauagagggaggauggcagggaaugguagaugguugguauggguaccaccauagcaaugagcaggggaguggguacgcugcagacaaagaauccacucaaaaggcaauagauggagucaccaauaaggucaacucaauuauugacaaaaugaacacucaguuugaggcuguuggaagggaauuuaauaacuuagaaaggagaauagagaauuuaaacaagaagauggaagacggguuucuagauguuuggacuuauaaugccgaacuucugguucucauggaaaaugagagaacucuagacuuucaugacucaaauguuaagaaccucuacgacaagguccgacuacagcuuagggauaaugcaaaggagcuggguaacgguuguuucgaguucuaucacaaaugugauaaugaauguauggaaaguauaagaaacggaacguacaacuauccgcaguauucagaagaagcaagauugaaaagagaggaaauaagugggguaaaauuggaaucaauaggaacuuaccaaauacugucaauuuauucaacaguggcgaguucccuagcacuggcaaucaugauagcuggucuaucuuuauggaugugcuccaauggaucguuacaaugcagaauuugcauuuaa

SEQ ID NO: 34120 - RNA, 1707 nt, Artificial Sequence
  derived and/or modified CDS sequence (wt) from hemagglutinin__InfluenzaA__ABW74707
auggagaaaauagugcuucuucuugcaauagucagucuuguuaaaagugaucagauuugcauugguuaccaugcaaacaauucaacagagcagguugacacaaucauggaaaagaacguuacuguuacacaugcccaagacauacuggaaaagacacacaacgggaagcucugcgaucuagauggagugaagccucuaauuuuaagagauuguaguguagcuggauggcuccucgggaacccaaugugugacgaauucaucaauguaccggaauggucuuacauaguggagaaggccaauccaaccaaugaccucuguuacccagggaguuucaacgacuaugaagaacugaaacaccuauugagcagaauaaaccauuuugagaaaauucaaaucauccccaaaaguucuugguccgaucaugaagccucaucaggagugagcucagcauguccauaccugggaagucccuccuuuuuuagaaaugugguauggcuuaucaaaaagaacaguacauacccaacaauaaagaaaagcuacaauaauaccaaccaagaagaucuuuugguacuguggggaauucaccauccuaaugaugcggcagagcagacaaggcuauaucaaaacccaaccaccuauauuuccauugggacaucaacacuaaaccagagauugguaccaaaaauggcuacuagauccaaaguaaacgggcaaaguggaaggauggaguucuucuggacaauuuuaaaaccuaaugaugcaaucaacuucgagaguaauggaaauuucauugcuccagaauaugcauacaaaauugucaagaaaggggacucagcaauuaugaaaagugaauuggaauaugguaacugcaacaccaagugucaaacuccaaugggggcgauaaacucuaguaugccauuccacaacauacacccucucaccaucggggaaugccccaaauaugugaaaucaaacagauuaguccuugcaacagggcucagaaauagcccucaaagagagagcagaagaaaaaagagaggacuauuuggagcuauagcagguuuuauagagggaggauggcagggaaugguagaugguugguauggguaccaccauagcaaugagcaggggaguggguacgcugcagacaaagaauccacucaaaaggcaauagauggagucaccaauaaggucaacucaauuauugacaaaaugaacacucaguuugaggccguuggaagggaauuuaauaacuuagaaaggagaauagagaauuuaaacaagaagauggaagacggguuucuagauguuuggacuuauaaugccgaacuucugguucucauggaaaaugagagaacucuagacuuucaugacucaaauguuaagaaccucuacgacaagguccgacuacagcuuagggauaaugcaaaggagcuggguaacgguuguuucgaguucuaucacaaaugugauaaugaauguauggaaaguauaagaaacggaacguacaacuauccgcaguauucagaagaagcaagauuaaaaagagaggaaauaagugggguaaaauuggaaucaauaggaacuuaccaaauacugucaauuuauucaacaguggcgaguucccuagcacuggcaaucaugauagcuggucuaucuuuauggaugugcuccaauggaucguuacaaugcagaauuugcauuuaa

SEQ ID NO: 34121 - RNA, 1707 nt, Artificial Sequence
  derived and/or modified CDS sequence (wt) from hemagglutinin__InfluenzaA__ABW74708
auggagaaaauagugcuucuucuugcaauagucagucuuguuaaaagugaucagauuugcauugguuaccaugcaaacaauucaacagagcagguugacacaaucauggaaaagaacguuacuguuacacaugcccaagacauacuggaaaagacacacaaugggaagcucugcgaucuagauggagugaagccucuaauuuuaagagauuguaguguagcuggauggcuccucgggaacccaaugugugacgaauucaucaauguaccggaauggucuuacauaguggagaaggccaauccaaccaaugaccucuguuacccagggaguuucaacgacuaugaagaacugaaacaccuauugagcagaauaaaccauuuugagaaaauucaaaucauccccaaaaguucuugguccgaccaugaagccucaucaggagugagcucagcauguccauaccugggaagucccuccuuuuuuagaaaugugguauggcuuaucaaaaagaacaguacauacccaacaauaaagaaaagcuacaauaauaccaaccaagaagaucuuuugguacuguggggaauucaccauccuaaugaugcggcagagcagacaaggcuauaucaaaacccaaccaccuauauuuccauugggacaucaacacuaaaccagagauugguaccaaaaauagcuacuagauccaaaguaaacgggcaaaguggaaggauggaguucuucuggacaauuuuaaaaccuaaugaugcaaucaacuucgagaguaauggaaauuucauugcuccagaauaugcauacaaaauugucaagaaaggggacucagcaauuaugaaaagugaauuggaauaugguaacugcaacaccaagugucaaacuccgaugggggcgauaaacucuaguaugccauuccacaacauacacccucucaccaucggggaaugccccaaauaugugaaaucaaacagaucaguccuugcaacagggcucagaaauagcccucaaagagagagcagaagaaaaaagagaggacuauuuggagcuauagcagguuuuauagagggaggauggcagggaaugguagaugguugguauggguaccaccauagcaaugagcaggggaguggauacgcugcagacaaagaauccacucaaaaggcaauagauggagucaccaauaaggucaacucaaucauugacaaaaugaacacucaguuugaggccguuggaagggaauuuaauaacuuagaaaggagaauagagaauuuaaacaagaagauggaagacggguuucuagauguuuggacuuauaaugccgagcuucugguucucauggaaaaugagagaacucuagacuuucaugacucaaauguuaagaaccucuacgacaagguccgacuacagcuuagggauaaugcaaaggagcuggguaacgguuguuucgaguucuaucacaaaugugauaaugaauguauggaaaguauaagaaacggaacguacaacuauccgcaguauucagaagaagcaagauuaaaaagagaggaaauaagugggguaaaauuggaaucaauaggaacuuaccaaauacugucaauuuauucaacaguggcgaguucccuagcacuggcaaucaugauggcuggucuauccuuauggaugugcuccaauggaucguuacaaugcagaauuugcauuuaa

SEQ ID NO: 34122 - RNA, 1707 nt, Artificial Sequence; identical to SEQ ID NO: 34119
  derived and/or modified CDS sequence (wt) from hemagglutinin__InfluenzaA__ABW74710

SEQ ID NO: 34123 - RNA, 1707 nt, Artificial Sequence; identical to SEQ ID NO: 34119
  derived and/or modified CDS sequence (wt) from hemagglutinin__InfluenzaA__ABW74711

SEQ ID NO: 34124 - RNA, 1707 nt, Artificial Sequence
  derived and/or modified CDS sequence (wt) from hemagglutinin__InfluenzaA__ABW74712
auggagaaaauagugcuucuucuuucaauagucagucuuguuaaaagugaucagauuugcauugguuaccaugcaaacaauucaacagagcagguugacacaaucauggaaaagaacguuacuguuacacaugcccaagacauacuggaaaagacacacaacgggaagcucugcgaucuagauggagugaagccucuaauuuuaagagauuguaguguagcuggauggcuccucgggaacccaaugugugacgaauucaucaacguaccggaauggucuuacauaguggaaaaggccaauccaaccaaugaccucuguuacccagggaguuucaacgacuaugaagaacugaaacaccuauugagcagaauaaaccauuuugagaaaauucagaucauccccaaaaguucuugguccgaucaugaagccucaucaggagugagcucagcauguccauaccugggaagucccuccuuuuuuagaaaugugguauggcuuaucaaaaagaacaguacauacccaacaauaaagaaaagcuacaauaauaccaaccaagaagaucuuuugguacuguggggaauucaccauccuaauaaugaggaagagcagacaaggcuauaucaaaacccaaccaccuauauuuccauugggacaucaacacuaaaccagagauugguaccaaaaauagcuacuagauccaaaguaaacgggcaaagugggaggauggaguucuucuggacaauuuuaaaaccaaaugaugcaaucaacuucgagagcaauggaaauuucauugcuccagaauaugcauacaaaauugucaagaaaggggacucagcaauuaugaaaagugaauuggaauauaguaacugcaacaccaagugucaaacuccaaugggggcgauaaacucuaguaugccauuccacaacauacacccucucaccaucggggaaugccccaaauaugugaaaucaagcagauuaguccuugcaacagggcucagaaauagcccucaaagagagagcagaagaaaaaagagaggucuauuuggagcuauagcagguuuuauagagggaggauggcagggaaugguagaugguugguauggguaccaccauagcaaugagcaggggaguggguacgcugcagacaaagaaucuacucaaaaggcaauagauggagucaccaauaaggucaacucaauuauugacaaaaugaacacucaguuugaggccguuggaagggaauuuaauaacuuagaaaggagaauagagaauuuaaacaagaagauggaagacggguuucuagauguuuggacuuauaaugccgaacuucugguccucauggaaaaugagagaacucuagacuuucaugacucaaauguuaagaaccucuaugacaagguccgacuacagcuuagggauaaugcaaaggagcuggguaacgguuguuucgaguucuaucacaaaugugauaaugaauguauggaaaguauaagaaacggaacguacaacuauccgcaguauucagaagaagcaagauuaaaaagagaggaaauaagugggguaaaguuggaaucaauaggaacuuaccaaauacugucaauuuacucaacaguggcgaguucccuagcacuggcaaucaugauagcuggucuaucuuuauggaugugcuccaauggaucguuacaaugcagaauuugcauuuaa

SEQ ID NO: 34125 - RNA, 1701 nt, Artificial Sequence
  derived and/or modified CDS sequence (wt) from hemagglutinin__InfluenzaA__ABW80976
augaagacuaucauugcuuugagcuacauuuuaugccugguuuucgcucaaaaacuucccggaaaugacaacagcacggcaacgcugugccuggggcaccaugcagugccaaacggaacgcuagugaaaacaaucacgaaugaccaaauugaaguaacuaaugcuacugagcugguucagaguucuucaacaaguagaauaugcgacaguccucaccaaauccuugauggagaaaauugcacacuaauagaugcucuauugggagacccucauugugauggcuuccaaaauaaggaaugggaccuuuuuguugaacgcagcaaagccuacagcaacuguuacccuuaugaugugccggauuaugucucccuuaggucacuaguugccucaucaggcacgcuggaguuuaacaaugaaagcuucaauuggacuggagucgcucagaauggaacaagcucugcuugcaaaaggagaucugauaaaaguuucuuuaguagauugaauugguugcaccaauuaaaauacaaauauccagcacugaacgugacuaugccaaacaaugaaaaauuugacaaauuguacauuugggggguucaccacccggguacagacagugaccaaaucagcauauaugcucaagcaucagggagagucacagucucuaccaaaagaagccaacaaacuguaaucccgaauaucggaucuagacccuggguaaggggugucuccagcggaauaagcaucuauuggacaauaguaaaaccgggagacauacuuuugauuaacagcacagggaaucuaauugcuccucgggguuacuucaaaauacgaagugggaaaagcucaauaaugaggucagaugcacccauuggcaaaugcaauucugaaugcaucacuccaaauggaagcauucccaaugacaaaccauuucaaaauguaaacaggaucacauauggggccugucccagauauguuaagcaaaacacucugaaauuggcaacagggaugcggaauguaccagagaaacaaacuagaggcauauucggugcaaucgcgggcuucauagaaaaugguugggagggaaugauggacgguugguacgguuucaggcaucaaaauucugagggcacagggcaagcagcagaucuuaaaagcacucaagcagcaaucaaccaaaucaacgggaaacugaauagguuaaucgagaaaacgaacgagaaauuccaucaaauugaaaaagaauucucagaaguagaagggagaauucaggaccucgagaaauauguugaggacacuaaaauagaucucuggucguacaaugcggagcuucuuguugcccuggagaaccaacauacaauugaucuaacugacucagaaaugaacaaacuguuugaaagaacaaagaagcaacugagggaaaaugcugaggauaugggcaaugguuguuucaaaauauaccacaaaugugacaaugccugcauagggucaaucagaaauggaacuuaugaccaugauguauacagagacgaagcauugaacaaccgguuccagaucaaagguguugagcugaagucaggauacaaagauuggauccuauggauuuccuuugccauaucauguuuuuugcuuuguauuguuuugcugggguucaucaugugggccugccaaaaaggcaacauuaggugcaacauuugcauuuga

SEQ ID NO: 34126 - RNA, 1701 nt, Artificial Sequence
  derived and/or modified CDS sequence (wt) from hemagglutinin__InfluenzaA__ABW80977
augaagacuaucauugcuuugagcuacauucuaugucugguuuucgcucaaaaacuucccggaaaugacaacagcacggcaacgcugugccuugggcaccaugcaguaccaaacggaacgauagugaaaacaaucacgaaugaccaaauugaaguuacuaaugcuacugagcugguucagaguuccucaacagguggaauaugcgacaguccucaucagauccuugauggagaaaacugcacacuaauagaugcucuauugggagacccucagugugauggcuuccaaaauaagaaaugggaccuuuuuguugaacgcagcaaagccuacagcaacuguuacccuuaugaugugccggauuaugccucccuuaggucacuaguugccucauccggcacacuggaguuuaacaaugaaagcuucaauuggacuggagucacucaaaauggaacaagcucugcuugcaaaaggagaucuaauaaaaguuucuuuaguagauugaauugguugacccacuuaaaauucaaauacccagcauugaacgugacuaugccaaacaaugaaaaauuugacaaauuguacauuugggggguucaccacccggguacggacaaugaccaaaucaaccuauaugcucaagcaucaggaagaaucacagucucuaccaaaagaagccaacaaacuguaaucccgaauaucggaucuagacccagaguaagggauguccccagcagaauaagcaucuauuggacaauaguaaaaccgggagacauacuuuugauuagcagcacagggaaucuaauugcuccucgggguuacuucaaaauacgaagugggaaaagcucaauaaugagaucagaugcacccauuggcaaaugcaauucugaaugcaucacuccaaauggaagcauucccaaugacaaaccauuucaaaauguaaacaggaucacauauggggccugucccagauauguuaagcaaaacacucugaaauuggcaacagggaugcgaaauguaccagagaaacaaacuagaggcauauuuggcgcaaucgcggguuucauagaaaaugguugggagggaaugguggacgguugguacgguuucaggcaucaaaauucugagggaacaggacaagcagcagaucucaaaagcacucaagcagcaaucaaccaaaucaaugggaagcugaauagguugaucgggaaaacaaacgagaaauuccaucagauugaaaaagaauucucagaaguagaagggagaauucaggaccucgagaaauauguugaggacacuaaaauagaucucuggucauacaacgcggagcuucuuguugcccuggagaaccaacauacaauugaucuaacugacucagaaaugaacaaacuguuugaaagaacaaagaagcaacugagggaaaaugcugaggauaugggcaaugguuguuucaaaauauaccacaaaugugacaaugccugcauagggucaaucagaaauggaacuuaugaccaugauguauacagagaugaagcauuaaacaaccgguuccagaucaaagguguugagcugaagucaggauacaaagauuggauccuauggauuuccuuugccauaucauguuuuuugcuuuguguugcuuuguugggguucaucaugugggccugccaaaaaggcaacauuaggugcaacauuugcauuuga

SEQ ID NO: 34127 - RNA, 1698 nt, Artificial Sequence
  derived and/or modified CDS sequence (wt) from hemagglutinin__InfluenzaA__ABW80979
augaaagcaaaacuacugguccuguuauguacauuuacagcuacauaugcagacacaauauguauaggcuaccaugccaacaacucaaccgacacuguugacacaguacuugagaagaaugugacagugacacacucugucaaccuacuugaggacagucacaauggaaaacuaugucuacuaaaaggaauagccccacuacaauuggguaauugcagcguugccggauggaucuuaggaaacccagaaugcgaauuacugauuuccaaggaaucaugguccuacauuguagaaacaccaaauccugagaauggaacauguuacccaggguauuucgccgacuaugaggaacugagggagcaauugaguucaguaucuucauuugagagauucgaaauauuccccaaagaaagcucauggcccaaccacaccguaaccggaguaucagcaucaugcucccauaaugggaaaagcaguuuuuacagaaauuugcuauggcugacggggaagaaugguuuguacccaaaccugagcaaguccuauguaaacaacaaagagaaagaaguccuuguacuaugggguguucaucacccgccuaacauagggaaccaaagggcccucuaucauacagaaaaugcuuaugucucuguagugucuucacauuauagcagaagauucaccccagaaauagccaaaagacccaaaguaagagaucaggaaggaagaaucaacuacuacuggacucugcuggaaccuggggauacaauaauauuugaggcaaauggaaaucuaauagcgccaugguaugcuuuugcacugaguagaggcuuuggaucaggaaucaucaccucaaaugcaccaauggaugaaugugaugcgaagugucaaacaccucagggagcuauaaacagcagucuuccuuuccagaauguacacccagucacaauaggagaguguccaaaguaugucaggagugcaaaauuaaggaugguuacaggacuaaggaacaucccauccauucaauccagagguuuguuuggagccauugccgguuucauugaagggggguggacuggaaugguagaugggugguaugguuaucaucaucagaaugagcaaggaucuggcuaugcugcagaucaaaaaaguacacaaaaugccauuaacgggauuacaaacaaggugaauucuguaauugagaaaaugaacacucaauucacagcugugggcaaagaauucaacaaauuggaaagaaggauggaaaacuuaaauaaaaaaguugaugauggguuucuagacauuuggacauauaaugcagaauuguugguucuacuggaaaaugaaaggacuuuggauuuccaugacuccaaugugaagaaucuguaugagaaaguaaaaagccaauuaaagaauaaugccaaagaaauaggaaacggguguuuugaauucuaucacaaguguaacaaugaaugcauggagagugugaaaaauggaacuuaugacuauccaaaauauuccgaagaaucaaaguuaaacagggagaaaauugauggagugaaauuggaaucaaugggagucuaucagauucuggcgaucuacucaacugucgccaguucccugguucuuuuggucucccugggggcaaucagcuucuggauguguuccaaugggucuuugcaguguagaauaugcaucuga

SEQ ID NO: 34128 - RNA, 1701 nt, Artificial Sequence
  derived and/or modified CDS sequence (wt) from hemagglutinin__InfluenzaA__ABW81505
augaaagcaaaacuacuaguucuguuguguacauuuacagcuacauaugcagacacaauauguauaggcuaccaugcgaacaacucaacugacacuguugacacaguacuugagaagaacgugacagugacacacucugucaaccuacuugaggacagucacaauggaaaacuaugccgacuaaaaggaacagccccacuacaauuggguaauugcagcauugccggauggaucuuaggaaauccagaaugcgaaucacuguuuucuaaggaaucauggucuuacauugcagaaacaccaaacccuaaaaauggaacauguuacccaggguauuucgccgacuaugaggaacugagggagcaauugagcucaguaucaucauucgagagauuugaaauauuccccaaggauagcucauggcccaaccacacuguaaccaaaggagugacggcaucaugcucccauaaugggaaaagcagcuuuuacaaaaauuugcuauggcugacggagaagaauggcuuguacccaaaucugagcaaguccuauguaaacaaaaagggaaaagaaguccuugugcuaugggguguucaucacccgucuaacaugggggaccaacgggccaucuaucauaaagaaaaugcuuauguuucuguguugucuucacauuauagcagaagauucaccccagaaauagcaaaaagaccaaaaguaagagaucaagaagggagaauuaacuacuacuggacucugcuggaacccggggacacaauaauauuugaggcaaauggaaaucuaauagcgccgugguacgcuuucgcacugaguagaggcuuugggucaggaaucaucaucucaaaugcaucaaugggugaaugugacgcuaagugucaaacaccccaaggagcuauaaacaguagucuccccuuccagaauguacacccagucacaauaggagaguguccaaaguaugucaggaguacaaaauuaaggaugguuacaggacuaaggaacgucccauccauucaauccagagguuuguuuggagccauugccgguuucauugaaggaggguggacuggaaugauagauggaugguaugguuaucaucaucaaaaugaacaaggaucuggcuaugcugcggaccaaaaaagcacacaaaaugccauuaaugggauuacaaacaaggugaauucuauaaucgagaaaaugaacacucaauucacagcuguaggcaaagaauucaacaaauuagaaagaaggauggaaaacuuaaauaagaaaguugaugauggauuucuggacauuuggacauauaaugcagaauuguuaguucuccuggaaaaugaaagaacuuuggauuuucaugacucaaaugugaagaaccuguaugagaaagugaaaacccaauugaagaauaaugccaaagaaauagggaacggguguuuugaauucuaucacaaguguaacaaugaaugcauggaaagugugaaaaauggaacuuaugacuauccaaaauauuccaaagaaucaaaguuaaacagggaaaaaauugauggagugaaauuggaaucaaugggagucuaucagauucuggcgaucuacucaacugucgccaguucgcuggugcuuuuggucucccugggggcaaucagcuucuggauguguucuaaugggucucugcaguguagaauaugcaucuga

SEQ ID NO: 34129 - RNA, 1698 nt, Artificial Sequence
  derived and/or modified CDS sequence (wt) from hemagglutinin__InfluenzaA__ABW81506
augaaaguaaaacuacugguccuguuauguacauuuacagcuacauaugcagacacaauauguauaggcuaccaugccaacaacucaaccgacacuguugacacaguacuugagaagaaugugacagugacacacucugucaaccuacuugaggacagucacaauggaaaacuaugucuacuaaaaggaauagccccacuacaauuggguaauugcagcguugccggauggaucuuaggaaacccagaaugcgaauuacugauuuccaaggaaucaugguccuacauuguagaaacaccaaauccugagaauggaacauguuacccaggguauuucgccgacuaugaggaacugagggagcaauugaguucaguaucuucauuugagagauucgaaauauuccccaaagaaagcucuuggcccaaccacaccguaaccggaguaucagcaucaugcucccauaaugggaaaagcaguuuuuacagaaauuugcuauggcugacggggaagaaugguuuguacccaaaccugagcaaguccuaugcaaacaacaaagagaaagaaguccuuguacuaugggguguucaucacccgccuaacauagggaaccaaagggcccucuaucauacagaaaaugcuuaugucucuguagugucuucacauuauagcagaagauucaccccagaaauagccaaaagacccaaaguaagagaucaggaaggaagaaucaacuacuacuggacucugcuggaacccggggauacaauaauauuugaggcaaauggaaaucuaauagcgccaugguaugcuuucgcacugaguagaggcuuuggaucaggaaucaucaccucaaaugcaccaauggaugaaugugaugcgaagugucaaacaccucagggagcuauaaacagcagucuuccuuuccagaauguacacccagucacaauaggagaguguccaaaguaugucaggagugcaaaauuaaggaugguuacaggacuaaggaacaucccauccauucaauccagagguuuguuuggagccauugccgguuucauugaagggggguggacuggaaugguagaugggugguaugguuaucaucaucagaaugagcaaggaucuggcuaugcugcagaucaaaaaagcacacaaaaugccauuaacgggauuacaaacaaggugaauucuguaauugagaaaaugaacacucaauucacagcugugggcaaagaauucaacaaauuggaaagaaggauggaaaacuuaaauaaaaaaguugaugauggguuucuagacauuuggacauauaaugcagaauuguugguucuacuggaaaaugaaaggacuuuggauuuccaugacuccaaugugaagaaucuguaugagaaaguaaaaagccaauuaaagaauaaugccaaagaaauaggaaacggguguuuugaauucuaucacaaguguaacaaugaaugcauggagagugugaaaaauggaacuuaugacuauccaaaauauuccgaagaaucaaaguuaaacagggagaaaauugauggagugaaauuggaaucaaugggaaucuaucagauucuggcgaucuacucaacugucgccaguucccugguucuuuuggucucccugggggcaaucagcuucuggauguguuccaaugggucuuugcaguguagaauaugcaucuga

SEQ ID NO: 34130 - RNA, 1701 nt, Artificial Sequence
  derived and/or modified CDS sequence (wt) from hemagglutinin__InfluenzaA__ABW81507
augaaagcaaaacuacuaguucuguuguguacauuuacagcuacauaugcagacacaauauguauaggcuaccaugcgaacaacucaacugacacuguugacacaguacuugagaagaacgugacagugacacacucugucaaccuacuugaggacagucacaauggaaaacuaugccgacuaaaaggaacagucccacuacaauuggguaauugcagcauugccggauggaucuuaggaaauccagaaugcgaaucacuguuuucuaaggaaucauggucuuacauugcagaaacaccaaacccuaaaaauggaacauguuacccaggguauuucgccgacuaugaggaacugagggagcaauugagcucaguaucaucauucgagagauuugaaauauuccccaaggauagcucauggcccaaccacacuguaaccaaaggagugacggcaucaugcucccauaaugggaaaagcagcuuuuacaaaaauuugcuauggcugacggagaagaauggcuuguacccgaaucugagcaaguccuauguaaacaaaaagggaaaagaaguccuugugcuaugggguguucaucacccgucuaacaugggggaccaacgggccaucuaucauaaagaaaaugcuuauguuucuguguugucuucacauuauagcagaagauucaccccagaaauagcaaaaagaccaaaaguaagagaucaagaagggagaauuaacuacuacuggacucugcuggaacccggggacacaauaauauuugaggcaaauggaaaucuaauagcgccgugguacgcuuucgcacugaguagaggcuuugggucaggaaucaucaucucaaaugcaucaaugggugaaugugacgcuaagugucaaacaccccaaggagcuauaaacaguagucuccccuuccagaauguacacccagucacaauaggagaguguccaaaguaugucaggaguacaaaauuaaggaugguuacaggacuaaggaacgucccauccauucaauccagagguuuguuuggagccauugccgguuucauugaaggaggguggacuggaaugauagauggaugguaugguuaucaucaucaaaaugaacaaggaucuggcuaugcugcggaccaaaaaagcacacaaaaugccauuaaugggauuacaaacaaggugaauucuauaaucgagaaaaugaacacucaauucacagcuguaggcaaagaauucaacaaauuagaaagaaggauggaaaacuuaaauaagaaaguugaugauggauuucuggacauuuggacauauaaugcagaauuguuaguucuccuggaaaaugaaaggacuuuggauuuucaugacucaaaugugaagaaccuguaugagaaagugaaaacccaauugaagaauaaugccaaagaaauagggaacggguguuuugaauucuaucacaaguguaacaaugaaugcauggaaagugugaaaaauggaacuuaugacuauccaaaauauuccaaagaaucaaaguuaaacagggaaaaaauugauggagugaaauuggaaucaaugggagucuaucagauucuggcgaucuacucaacugucgccaguucgcuggugcuuuuggucucccugggggcaaucagcuucuggauguguucuaaugggucuuugcaguguagaauaugcaucuga

SEQ ID NO: 34131 - RNA, 1698 nt, Artificial Sequence
  derived and/or modified CDS sequence (wt) from hemagglutinin__InfluenzaA__ABW81508
augaaaguaaaacuacugguccuguuauguacauuuacagcuacauaugcagacacaauauguauaggcuaccaugccaacaacucaaccgacacuguugacacaguacuugagaagaaugugacagugacacacucugucaaccuacuugaggacagucacaauggaaaacuaugucuacuaaaaggaauagccccacuacaauuggguaauugcagcguugccggauggaucuuaggaaacccagaaugcgaauuacugauuuccaaggaaucaugguccuacauuguagaaacaccaaauccugagaauggaacauguuacccaggguauuucgccgacuaugaggaacugagggagcaauugaguucaguaucuucauuugagagguucgaaauauuccccaaagaaagcucauggcccaaccacaccguaaccggaguaucagcaucaugcucccauaaugggaaaagcaguuuuuacagaaauuugcuauggcugacgaggaagaaugguuuguacccaaaccugagcaaguccuaugcaaacaacaaagagaaagaaguccuuguacuaugggguguucaucacccgccuaacauaggggaccaaagggcccucuaucauacagaaaaugcuuaugucucuguagugucuucacauuauagcagaagauucaccccagaaauagccaaaagacccaaaguaagagaucaggaaggaagaaucaacuacuacuggacucugcuggaacccggggauacaauaauauuugaggcaaauggaaaucuaauagcgccaagguaugcuuucgcacugaguagaggcuuuggaucaggaaucaucaccucaaaugcaccaauggaugaaugugaugcgaagugucaaacaccucagggagcuauaaacagcagucuuccuuuccagaauguacacccagucacaauaggagaguguccaaaguaugucaggagugcaaaauuaaggaugguuacaggacuaaggaacaucccauccauucaauccagagguuuguuuggagccauugccgguuucauugaagggggguggacuggaaugguagaugguugguaugguuaucaucaucagaaugagcaaggaucuggcuaugcugcagaucaaaaaagcacacaaaaugccauuaacgggauuacaaacaaggugaauucuguaauugagaaaaugaacacucaauucacagcugugggcaaagaauucaacaaauuggaaagaaggauggaaaacuuaaauaaaaaaguugaugauggguuucuagacauuuggacauauaaugcagaauuguugguucuacuggaaaaugaaaggacuuuggauuuccaugacuccaaugugaagaaucuguaugagaaaguaaaaagccaauuaaagaauaaugccaaagaaauaggaaacggguguuuugaauucuaucacaaguguaacgaugaaugcauggagagugugaaaaauggaacuuaugacuauccaaaauauuccgaagaaucaaaguuaaacagggagaaaauugauggagugaaauuggaaucaaugggagucuaucagauucuggcgaucuacucaacagucgccaguucccugguucuuuuggucucccugggggcaaucagcuucuggauguguuccaaugggucuuugcaguguagaauaugcaucuaa

SEQ ID NO: 34132 - RNA, 1701 nt, Artificial Sequence
  derived and/or modified CDS sequence (wt) from hemagglutinin__InfluenzaA__ABW81509
augaaagcaaaacuacuaguucuguuguguacauuuacagcuacauaugcagacacaauauguauaggcuaccaugcgaacaacucaacugacacuguugacacaguacuugagaagaacgugacagugacacacucugucaaccuacuugaggacagucacaauggaaaacuaugccgacuaaaaggaacagccccacuacaauuggguaauugcagcauugccggauggaucuuaggaaauccagaaugcgaaucacuguuuucuaaggaaucauggucuuacauugcagaaacaccaaacccuaaaaauggaacauguuacccaggguauuucgccgacuaugaggaacugagggagcaauugagcucaguaucaucauucgagagauuugaaauauuccccaaggauagcucauggcccaaccacacuguaaccaaaggagugacggcaucaugcucccauaaugggaaaagcagcuuuuacaaaaauuugcuauggcugacggagaagaauggcuuguacccaaaucugagcaaguccuauguaaacaaaaagggaaaagaaguccuugugcuaugggguguucaucacccgucuaacaugggggaccaacgggccaucuaucauaaagaaaaugcuuauguuucuguguugucuucacauuauagcagaagauucaccccagaaauagcaaaaagaccaaaaguaagagaucaagaagggagaauuaacuacuacuggacucugcuggaacccggggacacaauaauauuugaggcaaauggaaaucuaauagcgccgugguacgcuuucgcacugaguagaggcuuugggucaggaaucaucaucucaaaugcaucaaugggugaaugugacgcuaagugucaaacaccccaaggagcuauaaacaguagucuccccuuccagaauguacacccagucacaauaggagaguguccaaaguauguuaggaguacaaaauuaaggaugguuacaggacuaaggaacgucccauccauucaauccagagguuuguuuggagccauugccgguuucauugaaggaggguggacuggaaugauagauggaugguaugguuaucaucaucaaaaugaacaaggaucuggcuaugcugcggaccaaaaaagcacacaaaaugccauuaaugggauuacaaacaaggugaauucuauaaucgagaaaaugaacacucaauucacagcuguaggcaaagaauucaacaaauuagaaagaaggauggaaaacuuaaauaagaaaguugaugauggauuucuggacauuuggacauauaaugcagaauuguuaguucuccuggaaaaugaaaggacuuuggauuuucaugacucaaaugugaagaaccuguaugagaaagugaaaacccaauugaagaauaaugccaaagaaauagggaacggguguuuugaauucuaucacaaguguaacaaugaaugcauggaaagugugaaaaauggaacuuaugacuauccaaaauauuccaaagaaucaaaguuaaacagggaaaaaauugauggagugaaauuggaaucaaugggagucuaucagauucuggcgaucuacucaacugucgccaguucgcuggugcuuuuggucucccugggggcaaucagcuucuggauguguucuaaugggucuuugcaguguagaauaugcaucuga

SEQ ID NO: 34133 - RNA, 1698 nt, Artificial Sequence
  derived and/or modified CDS sequence (wt) from hemagglutinin__InfluenzaA__ABW81511
augaaagcaaaacuacugguccuguuauguacauuuacagcuacauaugcagacacaauauguauaggcuaccaugccaacaacucaaccgacacuguugacacaguacuugagaagaaugugacagugacacacucugucaaccuacuugaggacagucacaauggaaaacuaugucuacuaaaaggaauagccccacuacaauuggguaauugcagcguugccggauggaucuuaggaaacccagaaugcgaauuacugauuuccaaggaaucaugguccuacauuguagaaacaccaaauccugagaauggaacauguuacccaggguauuucgccgacuaugaggaacugagggagcaauugaguucaguaucuucauuugagagauucgaaauauuccccaaaggaagcucauggcccaaccacaccguaaccggaguaucagcaucaugcucccauaaugggaaaagcaguuuuuacagaaauuugcuauggcugacggggaagaaugguuuguacccaaaccugagcauguccuauguaaacaacaaagagaaagaaguccuugugcuaugggguguucaucacccaccuaacauagggaaccaaagggcccucuaccauacagaaaaugcuuaugucucuguagugucuucacauuauagcagaagauucaccccagaaauagccaaaagacccaaaguaagagaucaggaaggaagaaucaacuacuacuggacucugcuggaacccggggacucaauaauauuugaggcaaauggaaaucuaauagcgccaugguaugcuuucgcacugaguagaggcuuuggaucaggaaucaucaccucaaaugcaccaauggaugaaugugaugcgaagugucaaacaccucagggagcuauaaacaguagucuuccuuuccagaauguacacccaguuacaauaggagaguguccaaaguaugucaggagugcaaaauuaaggaugguuacaggacuaaggaacaucccauccauucaauccagagguuuguuuggagccauugccgguuucauugaagggggguggacuggaaugguagaugggugguaugguuaucaucaucagaaugagcaaggaucuggcuaugcugcagaucaaaaaagcacacaaaaugccauuaacgggauuacaaacaaggugaauucuguaauugagaaaaugaacacucaauucacagcugugggcaaagaauucaacaaauuagaaagaaggauggaaaacuuaaauaaaaaaguugaugauggguuucuagacauuuggacauauaaugcagaauuguugguucuacuggaaaaugaaaggacuuuggauuuccaugacuccaaugugaagaaucuguaugagaaaguaaaaagccaauuaaagaauaaugccaaagaaauaggaaacggguguuuugaauucuaucacaaguguaacaaugaaugcauggaaagugugaaaaauggaacuuaugacuauccaaaauauuccgaagaaucaaaguuaaacagggagaaaauugauggaguaaaauuggaaucaaugggagucuaucagauucuggcgaucuacucaacugucgccaguucccugguucuuuuggucucccugggggcaaucagcuucuggauguguuccaaugggucuuugcaguguagaauaugcaucuga

SEQ ID NO: 34134 - RNA, 1698 nt, Artificial Sequence
  derived and/or modified CDS sequence (wt) from hemagglutinin__InfluenzaA__ABW81512
augaaagcaaaacuacugguccuguuauguacauuuacagcuacauacgcagacacaauauguauaggcuaccaugccaacaacucaaccgacacuguugacacaguacuugagaagaaugugacagugacacacucugucaaccuacuugaggacagucacaauggaaaacuaugucuacuaaaaggaauagccccacuacaauuggguaauugcagcguugccggauggaucuuaggaaacccagaaugcgaauuacugauuuccaaggaaucaugguccuacauuguagaaacaccaaaucccgagaauggaacauguuacccaggguauuucgccgacuaugaggaacugagggagcaauugaguucaguaucuucauuugagagauucgaaauauuccccaaaggaagcucauggcccaaccacaccguaaccggaguaucagcaucaugcucccauaaugggaaaagcaguuuuuacagaaauuugcuauggcugacggggaagaaugguuuguacccaaaccugagcauguccuauguaaacaacaaagagaaagaaguccuugugcuaugggguguucaucacccaccuaacauaggggaccaaagggcccucuaccauacagaaaaugcuuaugucucuguagugucuucacauuauagcagaagauucaccccagaaauagccaaaagacccaaaguaagagaucaggaaggaagaaucaacuacuacuggacucugcuggaacccggggacacaauaauauuugaggcaaauggaaaucuaauagcgccaugguaugcuuucgcacugaguagaggcuuuggaucaggaaucaucaccucaaaugcaccaauggaugaaugugaugcgaagugucaaacaccucagggagcuauaaacaguagucuuccuuuccagaauguacacccaguuacaauaggagaguguccaaaguaugucaggagugcaaaauuaaggaugguuacaggacuaaggaacaucccauccauucaauccagagguuuguuuggagccauugccgguuucauugaagggggguggacuggaaugguagaugggugguaugguuaucaucaucagaaugagcaaggaucuggcuaugcugcagaucaaaaaagcacacaaaaugccauuaacgggauuacaaacaaggugaauucuguaauugagaaaaugaacacucaauucacagcugugggcaaagaauucaacaaauuagaaagaaggauggaaaacuuaaauaaaaaaguugaugauggguuucuagacauuuggacauauaaugcagaauuguugguucuacuggaaaaugaaaggacuuuggauuuccaugacuccaaugugaagaaucuguaugagaaaguaaaaagccaauuaaagaauaaugccaaagaaauaggaaacggguguuuugaauucuaucacaaguguaacaaugaaugcauggaaagugugaaaaauggaacuuaugacuauccaaaauauuccgaagaaucaaaguuaaacagggagaaaauugauggaguaaaauuggaaucaaugggagucuaucagauucuggcgaucuacucaacugucgccaguucccugguucuuuuggucucccugggggcaaucagcuucuggauguguuccaaugggucuuugcaguguagaauaugcaucuga

SEQ ID NO: 34135 - RNA, 1698 nt, Artificial Sequence
  derived and/or modified CDS sequence (wt) from hemagglutinin__InfluenzaA__ABW81513
augaaaguaaaacuacugguccuguuauguacauuuacagcuacauaugcagacacaauauguauaggcuaccaugccaacaacucaaccgacacuguugacacaguacuugagaagaaugugacagugacacacucugucaaccuacuugaggacagucacaauggaaaacuaugucuacuaaaaggaauagccccauuacaauuggguaauugcagcguugccggauggaucuuaggaaacccagaaugcgaauuacugauuuccaaggaaucaugguccuacauuguagaaacaccaaauccugagaauggaacauguuacccaggguauuucgccgacuaugaggaacugagggagcaauugaguucaguaucuucauuugagagguucgaaauauuccccaaagagagcucauggcccaaccacaccguaaccggaguaucagcaucaugcucccauaacgggaaaagcaguuuuuacagaaauuugcuauggcugacggggaagaaugguuuguacccaaaccugagcaaguccuaugcaaacaacaaagagaaagaaguccuuguacuaugggguguucaucacccgccuaacauaggggaccaaagggcccucuaucauacagaaaaugcuuaugucucuguaguaucuucacauuauagcagaagauucaccccagaaauagccaaaagacccaaggugagagaucaggaaggaagaaucaacuacuacuggacucugcuggaacccggggauacaauaauauuugaggcaaauggaaaucuaauagcgccaagguuugcuuucgcacugaguagaggcuuuggaucaggaaucaucaccucaaaugcaccaauggaugaaugugaugcgaagugucaaacaccucaaggagcuauaaacagcagucuuccuuuccagaauguacacccagucacaauaggggaguguccaaaguaugucaggagugcaaaauuaaggauggcuacaggacuaaggaacaucccauccauucaauccagagguuuguuuggagccauugccgguuucauugaagggggguggacuggaaugguagaugguugguaugguuaucaucaucagaaugagcaaggaucuggguaugcugcagaucaaaaaagcacacaaaaugccauuaacgggauuacaaacaaggugaauucuguaauugagaaaaugaacacucaauucacagcugugggcaaagaauucagcaaauuggagagaaggauggaaaacuuaaauaaaaaaguugaugauggguuucuagacauuuggacauauaaugcagaauuguugguucuacuggaaaaugaaaggacuuuggauuuccaugacuccaacgugaagaaucuguaugagaaagugaaaagccaauuaaagaauaaugccaaagaaauaggaaacggguguuuugaauucuaucacaaauguaacgaugaaugcauggagagugugaaaaauggaacuuaugacuauccaaaauauuccgaagaaucaaaguuaaacagggagaaaauugauggagugaaauuggaaucaaugggagucuaucagauucuggcgaucuacucaacagucgccaguucccugguucuuuuggucucccugggggcaaucagcuucuggauguguuccaaugggucuuugcaguguagaauaugcaucuaa

SEQ ID NO: 34136 - RNA, 1698 nt, Artificial Sequence
  derived and/or modified CDS sequence (wt) from hemagglutinin__InfluenzaA__ABW81514
augaaaguaaaacuacugguucuguuauguacauuuacagcuacauaugcagacacaauauguauaagcuaccaugccaacaacucaaccgacacuguugacacaguacuugagaagaaugugacagugacacacucugucaaccuacuugaggacagucacaauggaaaacuaugucuacuaaaaggaauagccccacuacaauuggguaauugcagcguugccggauggaucuuaggaaacccagaaugcgaauuacugauuuccaaggaaucaugguccuacauuguagaaacaccaaauccugagaauggaacauguuacccaggguauuucgccgacuaugaggaacugagggagcaauugaguucaguaucuucauuugagagguucgaaauauuccccaaagagagcucauggcccaaccacaccguaaccggaguaucagcaucaugcucccauaacgggaaaagcaguuuuuacagaaauuugcuauggcugacggggaagaauggcuuguacccaaaccugagcaaguccuaugcaaacaacaaagagaaagaaguccuuguacuaugggguguucaucacccgccuaacauaggggaccaaagggcccucuaucauacagaaaaugcuuaugucucugucgugucuucacauuauagcagaagauucaccccagaaauagccaaaagacccaaggugagagaucaggaaggaagaaucaacuacuacuggacucugcuggaacccggggauacaauaauauuugaggcaaauggaaaucuaauagcgccaagguuugcuuucgcacugaguagaggcuuuggaucaggaaucaucaccucaaaugcaccaauggaugaaugugaugcgaagugucaaacaccucaaggagcuauaaacagcagucuuccuuuccagaauguacacccagucacaauaggagaguguccaaaguaugucaggagugcaaaauuaaggauggcuacaggacuaaggaacaucccauccauucaauccagagguuuguuuggagccauugccgguuucauugaagggggguggacuggaaugguagaugguugguaugguuaucaucaucagaaugagcaaggaucuggguaugcugcagaucaaaaaagcacacaaaaugccauuaacgggauuacaaacaaggugaauucuguaauugagaaaaugaacacucaauucacagcugugggcaaagaauucagcaaauuggagagaaggauggaaaacuuaaauaaaaaaguugaugauggguuucuagacauuuggacauauaaugcagaauuguugguucuacuggaaaaugaaaggacuuuggauuuccaugacuccaacgugaagaaucuguaugagaaagugaaaagccaauuaaagaauaaugccaaagaaauaggaaacggguguuuugaauucuaucacaaguguaacgaugaaugcauggagagugugaaaaauggaacuuaugacuauccaaaauauuccgaagaaucaaaguuaaacagggagaaaauugauggagugaaauuggaaucaaugggagucuaucagauucuggcgaucuacucaacagucgccaguucccugguucuuuuggucucccugggggcaaucagcuucuggauguguuccaaugggucuuugcaguguagaauaugcaucuaa

SEQ ID NO: 34137 - RNA, 1698 nt, Artificial Sequence
  derived and/or modified CDS sequence (wt) from hemagglutinin__InfluenzaA__ABW81515
augaaaguaaaacuacugguucuguuauguacauuuacagcuacauaugcagacacaauauguauaggcuaccaugccaacaacucaaccgacacuguugacacaguacuugagaagaaugugacagugacacacucugucaaccuacuugaggacagucacaauggaaaacuaugucuacuaaaaggaauagccccacuacaauuggguaauugcagcguugccggauggaucuuaggaaacccagaaugcgaauuacugauuuccaaggaaucaugguccuacauuguagaaacaccaaauccugagaauggaacauguuacccaggguauuucgccgacuaugaggaacugagggagcaauugaguucaguaucuucauuugagagguucgaaauauuccccaaagagagcucauggcccaaccacaccguaaccggaguaucagcaucaugcucccauaacgggaaaagcaguuuuuacagaaauuugcuauggcugacggggaagaaugguuuguacccaaaccugagcaaguccuaugcaaacaacaaagagaaagaaguccuuguacuaugggguguucaucacccgccuaacauaggggaccaaagggcccucuaucauacagaaaaugcuuaugucucuguagugucuucacauuauagcagaagauucaccccagaaauagccaaaagacccaaggugagagaucaggaaggaagaaucaacuacuacuggacucugcuggaacccggggauacaauaauauuugaggcaaauggaaaucuaauagcgccaagguuugcuuucgcacugaguagaggcuuuggaucaggaaucaucaccucaaaugcaccaauggaugaaugugaugcgaagugucaaacaccucaaggagcuauaaacagcagucuuccuuuccagaauguacacccagucacaauaggagaguguccaaaguaugucaggagugcaaaauuaaggauggcuacaggacuaaggaacaucccauccauucaauccagagguuuguuuggagccauugccgguuucauugaagggggguggacuggaaugguagaugguugguaugguuaucaucaucagaaugagcaaggaucuggguaugcugcagaucaaaaaagcacacaaaaugccauuaacgggauuacaaacaaggugaauucuguaauugagaaaaugaacacucaauucacagcugugggcaaagaauucagcaaauuggagagaaggauggaaaacuuaaauaaaaaaguugaugauggguuucuagacauuuggacauauaaugcagaauuguugguucuacuggaaaaugaaaggacuuuggauuuccaugacuccaacgugaagaaucuguaugagaaagugaaaagccaauuaaagaauaaugccaaagaaauaggaaacggguguuuugaauucuaucacaaguguaacgaugaaugcauggagagugugaaaaauggaacuuaugacuauccaaaauauuccgaagaaucaaaguuaaacagggagaaaauugauggagugaaauuggaaucaaugggagucuaucagauucuggcgaucuacucaacagucgccaguucccugguucuuuuggucucccugggggcaaucagcuucuggauguguuccaaugggucuuugcaguguagaauaugcaucuaa

SEQ ID NO: 34138 - RNA, 1698 nt, Artificial Sequence
  derived and/or modified CDS sequence (wt) from hemagglutinin__InfluenzaA__ABW81516
augaaaguaaaacuacugguucuguuauguacauuuacagcuacauaugcagacacaauauguauaggcuaccaugccaacaacucaaccgacacuguugacacaguacuugagaagaaugugacagugacacacucugucaaccuacuugaggacagucacaauggaaaacuaugucuacuaaaaggaauagccccacuacaauuggguaauugcagcguugccggauggaucuuaggaaacccagaaugcgaauuauugauuuccaaggaaucaugguccuacauuguagaaacaccaaauccugagaauggaacauguuacccaggguauuucgccgacuaugaggaacugagggagcaauugaguucaguaucuucauuugagagguucgaaauauuccccaaagagagcucauggcccaaccacaccguaaccggaguaucagcaucaugcucccauaacgggaaaagcaguuuuuacagaaauuugcuauggcugacggggaagaauggcuuguacccaaaccugagcaaguccuaugcaaacaacaaagagaaagaaguccuuguacuaugggguguucaucacccgccuaacauaggggaccaaagggcccucuaucauacagaaaaugcuuaugucucuguagugucuucacauuauagcagaagauucaccccagaaauagccaaaagacccaaggugagagaucaggaaggaagaaucaacuacuacuggacucugcuggaacccggggauacaauaauauuugaggcaaauggaaaucuaauagcgccaagguuugcuuucgcacugaguagaggcuuuggaucaggaaucaucaccucaaaugcaccaauggaugaaugugaugcgaagugucaaacaccucaaggagcuauaaacagcagucuuccuuuccagaauguacacccagucacaauaggagaguguccaaaguaugucaggagugcaaaauuaaggauggcuacaggacuaaggaacaucccauccauucaauccagagguuuguuuggagccauugccgguuucauugaagggggguggacuggaaugguagaugguugguaugguuaucaucaucagaaugagcaaggaucuggguaugcugcagaucaaaaaagcacacaaaaugccauuaacgggauuacaaacaaggugaauucuguaauugagaaaaugaacacucaauucacagcugugggcaaagaauucagcaaauuggagagaaggauggaaaacuuaaauaaaaaaguugaugauggguuucuagacauuuggacauauaaugcagaauuguugguucuacuggaaaaugaaaggacuuuggauuuccaugacuccaacgugaagaaucuguaugagaaagugaaaagccaauuaaagaauaaugccaaagaaauaggaaacggguguuuugaauucuaucacaaguguaacgaugaaugcauggagagugugaaaaauggaacuuaugacuauccaaaauauuccgaagaaucaaaguuaaacagggagaaaauugauggagugaaauuggaaucaaugggagucuaucagauucuggcgaucuacucaacagucgccaguucccugguucuuuuggucucccugggggcaaucagcuucuggauguguuccaaugggucuuugcaguguagaauaugcaucuaa

SEQ ID NO: 34139 - RNA, 1698 nt, Artificial Sequence
  derived and/or modified CDS sequence (wt) from hemagglutinin__InfluenzaA__ABW81517
augaaaguaaaacuacugguucuguuauguacauuuacagcuacauaugcagacacaauauguauaggcuaccaugccaacaacucaaccgacacuguugacacaguacuugagaagaaugugacagugacacacucugucaaccuacuugaggacagucacaauggaaaacuaugucuacuaaaaggaauagccccacuacaauuggguaauugcagcguugccggauggaucuuaggaaacccagaaugcgaauuacugauuuccaaggaaucaugguccuacauuguagaaacaccaaauccugagaauggaacauguuacccaggguauuucgccgacuaugaggaacugagggagcaauugaguucaauaucuucauuugagagguucgaaauauuccccaaagagagcucauggcccaaccacaccguaaccggaguaucagcaucaugcucccauaacgggaaaagcaguuuuuacagaaauuugcuauggcugacgggaaagaauggcuuguacccaaaccugagcaaguccuaugcaaacaacaaagagaaagaaguccuuguacuaugggguguucaucacccgccuaacauaggggaccaaagggcccucuaucauacagaaaaugcuuaugucucuguagugucuucacauuauagcagaagauucaccccagaaauagccaaaagacccaaggugagagaucaggaaggaagaaucaacuacuacuggacucugcuggaacccggggauacaauaauauuugaggcaaauggaaaucuaauagcgccaagguuugcuuucgcacugaguagaggcuuuggaucaggaaucaucaccucaaaugcaccaauggaugaaugugaugcgaagugucaaacaccucaaggagcuauaaacagcagucuuccuuuccagaauguacacccagucacaauaggagaguguccaaaguaugucaggagugcaaaauuaaggauggcuacaggacuaaggaacaucccauccauucaauccagagguuuguuuggagccauugccgguuucauugaagggggguggacuggaaugguagaugguugguaugguuaucaucaucagaaugagcaaggaucuggguaugcugcagaucaaaaaagcacacaaaaugccauuaacgggauuacaaacaaggugaauucuguaauugagaaaaugaacacucaauucacagcugugggcaaagaauucagcaaauuggagagaaggauggaaaacuuaaauaaaaaaguugaugauggguuucuagacauuuggacauauaaugcagaauuguugguucuacuggaaaaugaaaggacuuuggauuuccaugacuccaacgugaagaaucuguaugagaaagugaaaagccaauuaaagaauaaugccaaagaaauaggaaacggguguuuugaauucuaucacaaguguaacgaugaaugcauggagagugugaaaaauggaacuuaugacuauccaaaauauuccgaagaaucaaaguuaaacagggagaaaauugauggagugaaauuggaaucaaugggagucuaucagauucuggcgaucuacucaacagucgccaguucccugguucuuuuggucucccugggggcaaucagcuucuggauguguuccaaugggucuuugcaguguagaauaugcaucuaa

SEQ ID NO: 34140 - RNA, 1698 nt, Artificial Sequence
  derived and/or modified CDS sequence (wt) from hemagglutinin__InfluenzaA__ABW81518
augaaaguaaaacuacugguucuguuauguacauauacagcuacauaugcagacacaauauguauaggcuaccaugccaacaacucaaccgacacuguugacacaguacuugagaagaaugugacagugacacacucugucaaccuacuugaggacagucacaauggaaaacuaugucuacuaaaaggaauagccccauuacaauuggguaauugcagcguugccggauggaucuuaggaaacccagaaugcgaauuacugauuuccaaggaaucaugguccuacauuguagaaacaccaaauccugagaauggaacauguuacccaggguauuucgccgacuaugaggaacugagggagcaauugaguucaguaucuucauuugagagguucgaaauauuccccaaagagagcucauggcccaaccacaccguaaccggaguaucagcaucaugcucccauaacgggaaaagcaguuuuuacagaaauuugcuauggcugacggggaagaaugguuuguacccaaaccugagcaaguccuaugcaaacaacaaagagaaagaaguccuuguacuaugggguguucaucacccgccuaacauaggggaccaaagggcccucuaucauacagaaaaugcuuaugucucuguaguaucuucacauuauagcagaagauucaccccagaaauagccaaaagacccaaggugagagaucaggaaggaagaaucaacuacuacuggacucugcuggaacccggggauacaauaauauuugaggcaaauggaaaucuaauagcgccaagguuugcuuucgcacugaguagaggcuuuggaucaggaaucaucaccucaaaugcaccaauggaugaaugugaugcgaagugucaaacaccucaaggagcuauaaacagcagucuuccuuuccagaauguacacccagucacaauaggggaguguccaaaguaugucaggagugcaaaauuaaggauggcuacaggacuaaggaacaucccauccauucaauccagagguuuguuuggagccauugccgguuucauugaagggggguggacuggaaugguagaugguugguaugguuaucaucaucagaaugagcaaggaucuggguaugcugcagaucaaaaaagcacacaaaaugccauuaacgggauuacaaacaaggugaauucuguaauugagaaaaugaacacucaauucacagcugugggcaaagaauucagcaaauuggagagaaggauggaaaacuuaaauaaaaaaguugaugauggguuucuagacauuuggacauauaaugcagaauuguugguucuacuggaaaaugaaaggacuuuggauuuccaugacuccaacgugaagaaucuguaugagaaagugaaaagccaauuaaagaauaaugccaaagaaauaggaaacggguguuuugaauucuaucacaaauguaacgaugaaugcauggagagugugaaaaauggaacuuaugacuauccaaaauauuccgaagaaucaaaguuaaacagggagaaaauugauggagugaaauuggaaucaaugggagucuaucagauucuggcgaucuacucaacagucgccaguucccugguucuuuuggucucccugggggcaaucagcuucuggauguguuccaaugggucuuugcaguguagaauaugcaucuaa

SEQ ID NO: 34141 - RNA, 1698 nt, Artificial Sequence
  derived and/or modified CDS sequence (wt) from hemagglutinin__InfluenzaA__ABW81519
augaaaguaaaacuacugguucuguuauguacauuuacagcuacauaugcagacacaauauguauaggcuaccaugccaacaacucaaccgacacuguugacacaguacuugagaagaaugugacagugacacacucugucaaccuacuugaggacagucacaauggaaaacuaugucuacuaaaaggaauagccccacuacaauuggguaauugcagcguugccggauggaucuuaggaaacccagaaugcgaauuacugauuuccaaggaaucaugguccuacauuguagaaacaccaaauccugagaauggaacauguuacccaggguauuucgccgacuaugaggaacugagggagcaauugaguucaguaucuucauuugagagguucgaaauauuccccaaagagagcucauggcccaaccacaccguaaccggaguaucagcaucaugcucccauaacgggaaaagcaguuuuuacagaaauuugcuauggcugacggggaagaaugguuuguacccaaaccugagcaaguccuaugcaaacaacaaagagaaagaaguccuuguacuaugggguguucaucacccgccuaacauaggggaccaaagggcccucuaucauacagaaaaugcucaugucucuguagugucuucacauuauagcagaagauucaccccagaaauagccaaaagacccaaggugagagaucaggaaggaagaaucaacuacuacuggacucugcuggaacccggggauacaauaauauuugaggcaaauggaaaucuaauagcgccaagguuugcuuucgcacugaguagaggcuuuggaucaggaaucaucacuucaaaugcaccaauggaugaaugugaugcgaagugucaaacaccucaaggagcuauaaacagcagucuuccuuuccagaauguacacccagucacaauaggagaguguccaaaguaugucaggagugcaaaauuaaggauggcuacaggacuaaggaacaucccauccauucaauccagagguuuguuuggagccauugccgguuucauugaagggggguggacuggaaugguagaugguugguaugguuaucaucaucagaaugagcaaggaucuggguaugcugcagaucaaaaaagcacacaaaaugccauuaacgggauuacaaacaaggugaauucuguaauugagaaaaugaacacucaauucacagcugugggcaaagaauucagcaaauuggagagaaggauggaaaacuuaaauaaaaaaguugaugauggguuucuagacauuuggacauauaaugcagaauuguugguucuacuggaaaaugaaaggacuuuggauuuccaugacuccaacgugaagaaucuguaugagaaagugaaaagccaguugaagaauaaugccaaagaaauaggaaacggguguuuugaauucuaucacaaguguaacgaugaaugcauggagagugugaaaaauggaacuuaugacuauccaaaauauuccgaagaaucaaaguuaaacagggagaaaauugauggagugaaauuggaaucaaugggagucuaucagauucuggcgaucuacucaacagucgccaguucccugguucuuuuggucucccugggggcaaucagcuucuggauguguuccaaugggucuuugcaguguagaauaugcaucuaa

SEQ ID NO: 34142 - RNA, 1698 nt, Artificial Sequence
  derived and/or modified CDS sequence (wt) from hemagglutinin__InfluenzaA__ABW81520
augaaaguaaaacuacugguucuguuauguacauuuacagcuacauaugcagacacaauauguauaggcuaccaugccaacaacucaaccgacacuguugacacaguacuugagaagaaugugacagugacacacucugucaaccuacuugaggacagucacaauggaaaacuaugucuacuaaaaggaauagccccauuacaauuggguaguugcagcguugccggauggaucuuaggaaacccagaaugcgaauuacugauuuccaaggaaucaugguccuacauuguagaaacaccaaauccugagaauggaacauguuacccaggguauuucgccgacuaugaggaacugagggagcaauugaguucaguaucuucauuugagagguucgaaauauuccccaaagagagcucauggcccaaccacaccguaaccggaguaucagcaucaugcucccauaacgggaaaagcaguuuuuacagaaauuugcuauggcugacggggaagaaugguuuguacccaaaccugagcaaguccuaugcaaacaacaaagagaaagaaguccuuguacuaugggguguucaucacccgccuaacauaggggaccaaagggcccucuaucauacagaaaaugcuuaugucucuguaguaucuucacauuauagcagaagauucaccccagaaauagccaaaagacccaaggugagagaucaggaaggaagaaucaacuacuacuggacucugcuggaacccggggauacaauaauauuugaggcaaauggaaaucuaauagcgccaagguuugcuuucgcacugaguagaggcuuuggaucaggaaucaucaccucaaaugcaccaauggaugaaugugaugcgaagugucaaacaccucaaggagcuauaaacagcagucuuccuuuccagaauguacacccagucacaauaggggaguguccaaaguaugucaggagugcaaaauuaaggauggcuacaggacuaaggaacaucccauccauucaauccagagguuuguuuggagccauugccgguuucauugaagggggguggacuggaaugguagaugguugguaugguuaucaucaucagaaugagcaaggaucuggguaugcugcagaucaaaaaagcacacaaaaugccauuaacgggauuacaaacaaggugaauucuguaauugagaaaaugaacacucaauucacagcugugggcaaagaauucagcaaauuggagagaaggauggaaaacuuaaauaaaaaaguugaugauggguuucuagacauuuggacauauaaugcagaauuguugguucuacuggaaaaugaaaggacuuuggauuuccaugacuccaacgugaagaaucuguaugagaaagugaaaagccaauuaaagaauaaugccaaagaaauaggaaacggguguuuugaauucuaucacaaauguaacgaugaaugcauggagagugugaaaaauggaacuuaugacuauccaaaauauuccgaagaaucaaaguuaaacagggagaaaauugauggagugaaauuggaaucaaugggagucuaucagauucuggcgaucuacucaacagucgccaguucccugguucuuuuggucucccugggggcaaucagcuucuggauguguuccaaugggucuuugcaguguagaauaugcaucuaa

SEQ ID NO: 34143 - RNA, 1698 nt, Artificial Sequence
  derived and/or modified CDS sequence (wt) from hemagglutinin__InfluenzaA__ABW81521
augaaaguaaaacuacugguucuguuauguacauuuacagcuacauaugcagacacaauauguauaggcuaccaugccaacaacucaaccgacacuguugacacaguacuugagaagaaugugacagugacacacucugucaaccuacuugaggacagucacaauggaaaacuaugucuacuaaaaggaauagccccacuacaauuggguaauugcagcguugccggauggaucuuaggaaacccagaaugcgaauuacugauuuccaaggaaucaugguccuacauuguagaaacaccaaauccugagaauggaacauguuacccaggguauuucgccgacuaugaggaacugagggagcaauugaguucaguaucuucauuugagagguucgaaauauuccccaaagagagcucauggcccaaccacaccguaaccggaguaucagcaucaugcucccauaacgggaaaagcaguuuuuacagaaauuugcuauggcugacggggaagaauggcuuguacccaaaccugagcaaguccuaugcaaacaacaaagagaaagaaguccuuguacuaugggguguucaucacccgccuaacauaggggaccaaagggcccucuaucauacagaaaaugcuuaugucucuguagugucuucacauuauagcagaagauucaccccagaaauagccaaaagacccaaggugagagaucaggaaggaagaaucaacuacuacuggacucugcuggaacccggggauacaauaauauuugaggcaaauggaaaucuaauagcgccaagguuugcuuucgcacugaguagaggcuuuggaucaggaaucaucuccucaaaugcaccaauggaugaaugugaugcgaagugucaaacaccucaaggagcuauaaacagcagucuuccuuuccagaauguacacccagucacaauaggagaguguccaaaguaugucaggagugcaaaauuaaggauggcuacaggacuaaggaacaucccauccauucaauccagagguuuguuuggagccauugccgguuucauugaagggggguggacuggaaugguagaugguugguaugguuaucaucaucagaaugagcaaggaucuggguaugcugcagaucaaaaaagcacacaaaaugccauuaacgggauuacaaacaaggugaauucuguaauugagaaaaugaacacucaauucacagcugugggcaaagaauucagcaaauuggagagaaggauggaaaacuuaaauaaaaaaguugaugauggguuucuagacauuuggacauauaaugcagaauuguugguucuacuggaaaaugaaaggacuuuggauuuccaugacuccaacgugaagaaucuguaugagaaagugaaaagccaauuaaagaauaaugccaaagaaauaggaaacggguguuuugaauucuaucacaaguguaacgaugaaugcauggagagugugaaaaauggaacuuaugacuauccaaaauauuccgaagaaucaaaguuaaacagggagaaaauugauggagugaaauuggaaucaaugggagucuaucagauucuggcgaucuacucaacagucgccaguucccugguucuuuuggucucccugggggcaaucagcuucuggauguguuccaaugggucuuugcaguguagaauaugcaucuaa

SEQ ID NO: 34144 - RNA, 1698 nt, Artificial Sequence
  derived and/or modified CDS sequence (wt) from hemagglutinin__InfluenzaA__ABW81522
augaaaguaaaacuacugguucuguuauguacauuuacagcuacauaugcagacacaauauguauaggcuaccaugccaacaacucaaccgacacuguugacacaguacuugagaagaaugugacagugacacacucugucaaccuacuugaggacagucacaauggaaaacuaugucuacuaaaaggaauagccccacuacaauuggguaauugcagcguugccggauggaucuuaggaaacccagaaugcgaauuacugauuuccaaggaaucaugguccuacauuguagaaacaccaaauccugagaauggaacauguuacccaggguauuucgccgacuaugaggaacugagggagcaauugaguucaguaucuucauuugagagguucgaaauauuccccaaagagagcucauggcccaaccacaccguaaccggaguaucagcaucaugcucccauaacgggaaaagcaguuuuuacagaaauuugcuauggcugacggggaagaauggcuuguacccaaaccugagcaaguccuaugcaaacaacaaagagaaagaaguccuuguacuaugggguguucaucacccgccuaacauaggggaccaaagggcccucuaucauacagaaaaugcuuaugucucuguagugucuucacauuauagcagaagauucaccccagaaauagccaaaagacccaaggugagagaucaggaaggaagaaucaacuacuacuggacucugcuggaacccggggauacaauaauauuugaggcaaauggaaaucuaauagcgccaagguuugcuuucgcacugaguagaggcuuuggaucaggaaucaucaccucaaaugcaccaauggaugaaugugaugcgaagugucaaacaccucaaggagcuauaaacagcagucuuccuuuccagaauguacacccagucacaauaggggaguguccaaaguaugucaggagugcaaaauuaaggauggcuacaggacuaaggaacaucccauccauucaauccagagguuuguuuggagccauugccgguuucauugaagggggguggacuggaaugguagaugguugguaugguuaucaucaucagaaugagcaaggaucuggguaugcugcagaucaaaaaagcacacaaaaugccauuaacgggauuacaaacaaggugaauucuguaauugagaaaaugaacacucaauucacagcugugggcaaagaauucagcaaauuggagagaaggauggaaaacuuaaauaaaaaaguugaugauggguuucuagacauuuggacauauaaugcagaauuguugguucuacuggaaaaugaaaggacuuuggauuuccaugacuccaacgugaagaaucuguaugagaaagugaaaagccaauuaaagaauaaugccaaagaaauaggaaacggguguuuugaauucuaucacaaguguaacgaugaaugcauggagagugugaaaaauggaacuuaugacuauccaaaauauuccgaagaaucaaaguuaaacagggagaaaauugauggagugaaauuggaaucaaugggagucuaucagauucuggcgaucuacucaacagucgccaguucccugguucuuuuggucucccugggggcaaucagcuucuggauguguuccaaugggucuuugcaguguagaauaugcaucuaa

SEQ ID NO: 34145 - RNA, 1698 nt, Artificial Sequence
  derived and/or modified CDS sequence (wt) from hemagglutinin__InfluenzaA__ABW81523
augaaaguaaaacuacugguucuguuauguacauuuacagcuacauaugcagacacaauauguauaggcuaccaugccaacaacucaaccgacacuguugacacaguacuugagaagaaugugacagugacacacucugucaaccuacuugaggacagucacaauggaaaacuaugucuacuaaaaggaauagccccauuacaauuggguaauugcagcguugccggauggaucuuaggaaacccagaaugcgaauuacugauuuccaaggaaucaugguccuacauuguagaaacaccaaauccugagaauggaacauguuacccaggguauuucgccgacuaugaggaacugagggagcaauugaguucaguaucuucauuugagagguucgaaauauuccccaaagagagcucauggcccaaccacaccguaaccggaguaucagcaucaugcucccauaacgggaaaagcaguuuuuacagaaauuugcuauggcugacggggaagaaugguuuguacccaaaccugagcaaguccuaugcaaacaacaaagagaaagaaguccuuguacuaugggguguucaucacccgccuaacauaggggaccaaagggcccucuaucauacagaaaaugcuuaugucucuguaguaucuucacauuauagcagaagauucaccccagaaauagccaaaagacccaaggugagagaucaggaaggaagaaucaacuacuacuggacucugcuggaacccggggauacaauaauauuugaggcaaauggaaaucuaauagcgccaagguuugcuuucgcacugaguagaggcuuuggaucaggaaucaucaccucaaaugcaccaauggaugaaugugaugcgaagugucaaacaccucaaggagcuauaaacagcagucuuccuuuccagaauguacacccagucacaauaggggaguguccaaaguaugucaggagugcaaaauuaaggauggcuacaggacuaaggaacaucccauccauucaauccagagguuuguuuggagccauugccgguuucauugaagggggguggacuggaaugguagaugguugguaugguuaucaucaucagaaugagcaaggaucuggguaugcugcagaucaaaaaagcacacaaaaugccauuaacgggauuacaaacaaggugaauucuguaauugagaaaaugaacacucaauucacagcugugggcaaagaauucagcaaauuggagagaaggauggaaaacuuaaauaaaaaaguugaugauggguuucuagacauuuggacauauaaugcagaauuguugguucuacuggaaaaugaaaggacuuuggauuuccaugacuccaacgugaagaaucuguaugagaaagugaaaagccaauuaaagaauaaugccaaagaaauaggaaacggguguuuugaauucuaucacaaauguaacgaugaaugcauggagagugugaaaaauggaacuuaugacuauccaaaauauuccgaagaaucaaaguuaaacagggagaaaauugauggagugaaauuggaaucaaugggagucuaucagauucuggcgaucuacucaacagucgccaguucccugguucuuuuggucucccugggggcaaucagcuucuggauguguuccaaugggucuuugcaguguagaauaugcaucuaa

SEQ ID NO: 34146 - RNA, 1698 nt, Artificial Sequence
  derived and/or modified CDS sequence (wt) from hemagglutinin__InfluenzaA__ABW81524
augaaaguaaaacuacugguucuguuauguacauuuacagcuacauaugcagacacaauauguauaggcuaccaugccaacaacucaaccgacacuauugacacaguacuugagaagaaugugacagugacacacucugucaaccuacuugaggacagucacaauggaaaacuaugucuacuaaaaggaauagccccacuacaauuggguaauugcagcguugccggauggaucuuaggaaacccagaaugcgaauuacugauuuccaaggaaucaugguccuacauuguagaaacaccaaauccugagaauggaacauguuauccaggguauuucgccgacuaugaggaacugagggagcaauugaguucaguaucuucauuugagagguucgaaauauuccccaaagagagcucauggcccaaccacaccguaaccggaguaucagcaucaugcucccauaacgggaaaagcaguuuuuacagaaauuugcuauggcugacggggaagaauggcuuguacccaaaccugagcaaguccuaugcaaacaacaaagagaaagaaguccuuguacuaugggguguucaucacccgccuaacauaggggaccaaagggcccucuaucauacagaaaaugcuuaugucucuguagugucuucacauuauagcagaagauucaccccagaaauagccaaaagacccaaggugagagaucaggaaggaagaaucaacuacuacuggacucugcuggaacccggggauacaauaauauuugaggcaaauggaaaucuaauagcgccaagguuugcuuucgcacugaguagaggcuuuggaucaggaaucaucaccucaaaugcaccaauggaugaaugugaugcgaagugucaaacaccucaaggagcuauaaacagcagucuuccuuuccagaauguacacccagucacaauaggagaguguccaaaguaugucaggagugcaaaauuaaggauggcuacaggacuaaggaacaucccauccauucaauccagagguuuguuuggagccauugccgguuucauugaagggggguggacuggaaugguagaugguugguaugguuaucaucaucagaaugagcaaggaucuggguaugcugcagaucaaaaaagcacacaaaaugccauuaacgggauuacaaacaaggugaauucuguaauugagaaaaugaacacucaauucacagcugugggcaaagaauucagcaaauuggagagaaggauggaaaacuuaaauaaaaaaguugaugauggguuucuagacauuuggacauauaaugcagaauuguugguucuacuggaaaaugaaaggacuuuggauuuccaugacuccaacgugaagaaucuguaugagaaagugaaaagccaauuaaagaauaaugccaaagaaauaggaaacggguguuuugaauucuaucacaaguguaacgaugaaugcauggagagugugaaaaauggaacuuaugacuauccaaaauauuccgaagaaucaaaguuaaacagggagaaaauugauggagugaaauuggaaucaaugggagucuaucagauucuggcgaucuacucaacagucgccaguucccugguucuuuuggucucccugggggcaaucagcuucuggauguguuccaaugggucuuugcaguguagaauaugcaucuaa

SEQ ID NO: 34147 - RNA, 1698 nt, Artificial Sequence
  derived and/or modified CDS sequence (wt) from hemagglutinin__InfluenzaA__ABW81526
augaaaguaaaacuacugguccuguuaugcacauuuacagcuacauaugcagacacaauauguauaggcuaccaugccaacaacucaaccgacacuguugacacaguacuugaaaagaaugugacagugacacacucugucaaccugcuugaggacagucacaauggaaaacuaugucuauuaaaaggaauagccccacuacaauuggguaauugcagcguugccggguggaucuuaggaaacccagaaugcgaauuacugauuuccaaggagucaugguccuacauuguagaaaaaccaaauccugagaauggaacauguuacccagggcauuucgcugacuaugaggaacugagggagcaauugaguucaguaucuucauuugagagguucgaaauauuccccaaagaaagcucauggcccaaccacaccguaaccggaguaucagcaucaugcucccauaaugggaaaagcaguuuuuacaaaaauuugcuauggcugacggggaagaaugguuuguacccaaaccugagcaaguccuaugcaaacaacaaagagaaagaaguccuuguacuaugggguguucaucacccgccaaacauaggugaccaaaaggcccucuaucauacagaaaaugcuuaugucucuguagugucuucacauuauagcagaaaauucaccccagaaauagccaaaagacccaaaguaagagaucaagaaggaagaaucaacuacuacuggacucugcuugaacccggggauacaauaauauuugaggcaaauggaaaucuaauagcgccaagauaugcuuucgcacugaguagaggcuuuggaucaggaaucaucaacucaaaugcaccaauggguaaaugugaugcgaagugccaaacaccucagggagcuauaaacagcagucuuccuuuccagaauguacacccagucacaauaggagaguguccaaaguaugucaggagugcaaaauuaaggaugguuacaggacuaaggaacaucccauccauucaauccagagguuuguuuggagccauugccgguuucauugaagggggguggacuggaaugguagaugguugguaugguuaucaucaucagaaugagcaaggaucuggcuaugcugcagaucaaaaaagcacacaaaaugccauuaaugggauuacaaacaaggugaauuccguaauugagaaaaugaacacucaauucacagcagugggcaaagaauucaacaaauuggaaagaaggauggaaaacuuaaauaaaaaaguugaugauggguuuauagacauuuggacauauaaugcagaacuguugguucuacuggaaaaugaaaggacuuuggaucuccaugacuccaaugugaagaaucuguaugagaaaguaaaaagccaguuaaagaauaaugccaaagaaauaggaaauggguguuuugaauucuaucacaaguguaacgaugaaugcauggagaguguaaaaaauggaacuuaugacuauccaaaauauuccgaagaaucaaaguuaaacagggagaaaauugauggagugaaauuggaaucaaugggagucuaucagauucuggcgaucuacucaacagucgccaguucucugguucuuuuggucucccugggggcaaucagcuucuggauguguuccaaugggucuuugcaguguagaauaugcaucuaa

SEQ ID NO: 34148 - RNA, 1698 nt, Artificial Sequence
  derived and/or modified CDS sequence (wt) from hemagglutinin__InfluenzaA__ABW81527
augaaaguaaaacuacugguucuguuauguacauuuacagcuacauaugcagacacaauauguauaggcuaccaugccaacaacucaaccgacacuguugacacaguacuugagaagaaugugacagugacacacucugucaaccuacuugaggacagucacaaugggaaacuaugucuacuaaaaggaauagccccacuacaauuggguaauugcagcguugccggauggaucuuaggaaacccagaaugcgaauuacugauuuccaaggaaucaugguccuacauuguagaaacaccaaauccugagaauggaacauguuacccaggguauuucgccgacuaugaggaacugagggagcaauugaguucaguaucuucauuugagagguucgaaauauuccccaaagagagcucauggcccaaccacaccguaaccggaguaucagcaucaugcucccauaacgggaaaagcaguuuuuacagaaauuugcuauggcugacggggaagaaugguuuguauccaaaccugagcaaguccuaugcaaacaacaaagagaaagaaguccuuguacuaugggguguucaucacccgccuaacauaggggaccaaagggcccucuaucauacagaaaaugcuuaugucucuguagugucuucacauuauagcagaagauucaccccagaaauagccaaaagacccaaggugagaaaucaggaaggaagaaucaacuacuacuggacucugcuggaacccggggauacaauaauauucgaggcaaauggaaaucuaauagcaccaagguuugcuuucgcacugaguagaggcuuuggaucaggaaucaucaccucaaaugcaccaauggaugaaugugaugcgaagugucaaacaccucagggagcuauaaacagcagccuuccuuuccagaauguacacccagucacaauaggagaguguccaaaguaugucaggagugcaaaauuaaggauggcuacaggacuaaggaacaucccauccauucaauccagagguuuguuuggagccauugccgguuucauugaaggggguuggacuggaaugguagaugguugguaugguuaucaucaucagaaugagcaagggucuggguaugcugcagaucaaaaaagcacacaaaaugccauuaacgggauuacaaacaaggugaauucuguaauugagaaaaugaacacucaauucacagcugugggcaaagaauucagcaaauuggagagaaggauggaaaacuuaaauaagaaaguugaugauggguuucuagacauuuggacauauaaugcagaauuguugguucuacuggaaaaugaaaggacuuuggauuuccaugacuccaacgugaagaaucuguaugagaaagugaaaagccaauuaaagaauaaugccaaagaaauaggaaacgggugcuuugaauucuaucacaaguguaacgaugaaugcauggagagugugaaaaauggaacuuaugacuauccaaaauauuccgaagaaucaaaguuaaacagggagaaaauugauggagugaaauuggaaucaaugggagucuaucagauucuggcgaucuacucaacagucgccaguucccugguucuuuuggucucccugggggcaaucagcuucuggauguguuccaaugggucuuugcaguguagaauaugcaucuaa

SEQ ID NO: 34149 - RNA, 1698 nt, Artificial Sequence
  derived and/or modified CDS sequence (wt) from hemagglutinin__InfluenzaA__ABW81528
augaaaguaaaacuacugguucuguuauguacauuuacagcuacauaugcagacacaauauguauaggcuaccaugccaacaacucgaccgacacuguugacacaguacuugagaagaaugugacagugacacacucugucaaccuacuugaggacagucacaauggaaaacuaugucuacuaaaaggaauagccccacuacaauuggguaauugcagcguugccggauggaucuuaggaaacccagaaugcgaauuacugauuuccaaggaaucaugguccuacauuguagaaacaccaaauccugagaauggaacauguuacccagggcauuucgccgacuaugaggagcugagggagcaauugaguucaguaucuucauuugagagguucgaaauauuccccaaagagagcucauggcccaaccacaccguaaccggaguaucagcaucaugcucccauaacgggaaaagcaguuucuacagaaauuugcuauggcugacggggaagaaugguuuguauccaaaccugagcaaguccuaugcaaacaacaaagagaaagaaguccuuguacugugggguauucaucacccgccuaacauaggggaccaaagggcccucuaucauacagaaaaugcuuaugucucuguagugucuucacauuauagcagaagauucaccccagaaauagccaaaagacccaagguaagagaucaggaaggaagaaucaacuacuacuggacucuucuggaacccagggauacaauaauauuugaggcaaauggaaaucuaauagcaccaagguuugcuuucgcacugaguagaggcuuuggaucaggaaucaucaccucaaaugcaccaauggaugaaugugaugcgaagugucaaacaccucagggagcuauaaacagcagucuuccuuuccagaauguacacccagucacaauaggagaguguccaaaguaugucaggagugcaaaauuaagaaugguuacaggacuaaggaacaucccauccauucaauccagaggucuguuuggagccauugccgguuucauugaagggggguggacuggaaugguagaugguugguaugguuaucaccaucagaaugagcaaggaucuggguaugcugcagaucaaaaaagcacacaaaaugccauuaacgggauuacaaacaaggugaauucuguaauugagaaaaugaacacucaauucacagcugugggcaaagaauucaacaaauuggaaagaaggauggaaaacuuaaauaaaaaaguugaugauggguuucuagacauuuggacauauaacgcagaauuguugguucuacuagaaaaugaaaggacuuuggacuuccaugacuccaacgugaagaaucuguaugagaaaguaaaaagccaauuaaagaauaaugccaaagaaauaggaaacggguguuuugaauucuaucacaaguguaacgaugaaugcauggagagugugaaaaauggaacuuaugacuauccaaaauauuccgaagaaucaaaguugaacagggagaaaauugauggagugaaauuggaaucaaugggagucuaucagauucuggcgaucuacucaacagucgccaguucccugguucuuuuggucucccugggggcaaucagcuucuggauguguuccaaugggucuuugcaguguagaauaugcaucuaa

SEQ ID NO: 34150 - RNA, 1698 nt, Artificial Sequence
  derived and/or modified CDS sequence (wt) from hemagglutinin__InfluenzaA__ABW81529
augaaaguaaaacuacugauccuguuauguacauuuacagcuacauaugcagacacaauauguauaggcuaccaugccaacaacucaaccgacacuguugacacaguacuugagaagaaugugacagugacacacucugucaaccuacuugaggacagucacaauggaaaacuaugucuacuaaaaggaauagccccccuacaauuggguaauugcagcguugccggauggaucuuaggaaacccagaaugcgaauuacugauuuccagggaaucaugguccuacauuguagaaacaccaaauccugagaauggaacauguuacccaggguauuucgccgacuaugaggagcuaagggagcaauugaguucaguaucuucauuugagagauucgaaauauuccccaaagaaagcucauggcccaaccacaccguaaccggagugucagcaucaugcucccauaaugggaaaagcaguuuuuacagaaauuugcuauggcugacggggaagaaugguuuguacccaaaccugagcaaguccuaugcaaacaacaaagagaaagaaguccuuauacuaugggguguucaccacccgccuaacauaagggaccaaaugacccucuaucauacagaaaaugcuuaugucucgguagugucuucacauuauagcagaagauucaccccagaaauaaccaaaaggcccaaaguaagagaucaggaaggaagaaucaacuacuacuggacucugcuggaacccggggauacaauaauauuugaggcaaauggaaaucuaauagcgccaugguaugcuuucgcacugaguagaggcuuuggaucaggaaucaucaccucaaaugcaccaauggaugaaugugaugcgaagugucaaacaccuaagggagcuauaaacagcagucuuccuuuccagaauguacauccagucacaauaggagaguguccaaaguaugucaggagugcaaaauuaaggaugguuacaggacuaaggaacaucccauccauucaauccagagguuuguuuggagccauugccgguuucauugaagggggguggacuggaaugguagaugggugguaugguuaucaucaucagaaugagcaaggaucuggcuaugcugcagaucaaaaaagcacacaaaaugccauuaacgggauuacaaacaaggugaauucuguaauugagaaaaugaacacucaauucacagcugugggcaaagaauucaacaaauuggaaagaaggauggaaaauuuaaauaaaaaagucgaugauggguuucuagacauuuggacauauaaugcugaauuguugguucuacuggaaaaugaaaggacuuuggauuuccacgacuccaaugugaagaaucuguaugagaaaguaaaaagccaauuaaagaauaaugccaaagaaauaggaaauggguguuuugaauucuaucacaaguguaacaacgaaugcauggagaguguuaaaaauggaacuuaugacuauccaaaauauuccgaagaaucaaaguuaaacagggaaaaaauugauggagugaaauuggaaucaaugggggucuaucagauucuggcgaucuacucaacugucgccaguucccugguucuuuuggucucccugggggcaaucagcuucuggauguguuccaaugggucuuugcaguguagaauaugcaucuga

SEQ ID NO: 34151 - RNA, 1698 nt, Artificial Sequence
  derived and/or modified CDS sequence (wt) from hemagglutinin__InfluenzaA__ABW81530
augaaaguaaaacuacugauccuguuauguacauuuacagcuacauaugcagacacaauauguauaggcuaccaugccaacaacucaaccgacacuguugacacaguacuugagaagaaugugacagugacacacucugucaaccuacuugaggacagucacaauggaaaacugugccuacuaaaaggaauagccccccuacaauuggguaauugcagcguugccggauggaucuuaggaaacccagaaugcgaauuacugauuuccaaggaaucaugguccuacauuguagaaacaccaaauccugagaauggagcauguuacccaggguauuucgccgacuaugaggagcuaagggagcaauugaguucaguaucuucauuugagagauucgaaauauuccccaaagaaagcucauggcccaaccacaccguaaccggaguaucagcaucaugcucccauaaugggaaaagcaguuuuuacagaaauuugcuauggcugacggggaagaaugguuuguacccaaaccugagcaaguccuaugcaaacaacaaagagaaagaaguccuuauacuaugggguguucaucacccgccuaacauaggggaccaaaggacccucuaucacacagaaaaugcuuaugucucuguagugucuucacauuauagcagaagauucaccccagaaauaaccaaaaggcccaaaguaagagaucaggaaggaagaaucaacuacuacuggacucugcuggaacccggggauacaauaauauuugaggcaaauggaaaucuaauagcgccaugguaugcuuucgcacugaguagaggcuuuggaucaggaaucaucaccucaaaugcaccaauggaugaaugugaugcgaagugucaaacaccucagggagcuauaaacagcagucuuccuuuccagaauguacacccagucacaauaggagaguguccaaaguaugucaggagugcaaaauuaaggaugguuacaggacuaaggaacaucccauccauucaauccagagguuuguuuggagccauugccgguuucauugaagggggguggacuggaaugguagaugggugguaugguuaucaucaucagaaugagcaaggaucuggcuaugcugcagaucaaaaaagcacacaaaaugccauuaacaggauuacaaacaaggugaauucuguaauugagaaaaugaacacucaauucacagcugugggcaaagaauucaacaaauuggaaagaaggauggaaaacuuaaauaaaaagguugaugauggguuucuagacauuuggacauauaaugcagaauuguugguucuacuggaaaaugaaaggacuuuggauuuccacgacuccaaugugaagaaucuguacgagaaaguaaaaagccaauuaaagaauaaugccaaagaaauaggaaauggguguuuugaauucuaucacaaguguaacaaugaaugcauggagagugugaaaaauggaacuuaugacuauccaaaauauuccgaagaaucaaaguuaaacagggaaaaaauugauggagugaaauuggacucaaugggggucuaucagauucuggcgaucuacucaacugucgccaguucccugguucuuuuggucucccugggggcaaucagcuucuggauguguuccaaugggucuuugcaguguagaauaugcaucuga

SEQ ID NO: 34152 - RNA, 1698 nt, Artificial Sequence; identical to SEQ ID NO: 32338
  derived and/or modified CDS sequence (wt) from hemagglutinin__InfluenzaA__ABW81531

SEQ ID NO: 34153 - RNA, 1698 nt, Artificial Sequence
  derived and/or modified CDS sequence (wt) from hemagglutinin__InfluenzaA__ABW81532
augaaaguaaaacuacugauccuguuauguacauuuacagcuacauaugcagacacaauauguauaggcuaccaugccaacaacucaaccgacacuguugacacaguacuugagaagaaugugacagugacacacucugucaaccuacuugaggacagucacaauggaaaacugugccuacuaaaaggaauagccccccuacaauuggguaauugcagcguugccggauggaucuuaggaaacccagaaugcgaauuacugauuuccaaggaaucaugguccuacauuguagaaacaccaaauccugagaauggagcauguuacccaugguauuucgccgacuaugaggagcuaagggagcaauugaguucaguaucuucauuugagagauucgaaauauuccccaaagaaagcucauggcccaaccacaccguaaccggaguaucagcaucaugcucccauaaugggaaaagcaguuuuuacagaaauuugcuauggcugacggggaagaaugguuuguacccaaaccugagcaaguccuaugcaaacaacaaagagaaagaaguccuuauacuaugggguguucaucacccgccuaacauagggaaccaaaggacccucuaucacacagaaaaugcuuaugucucuguagugucuucacauuauagcagaagauucaccccagaaauaaccaaaaggcccaaaguaagagaucaggaaggaagaaucaacuacuacuggacucugcuggaacccggggauacaauaauauuugaggcaaauggaaaucuaauagcgccaugguaugcuuucgcacugaguagaggcuuuggaucaggaaucaucaccucaaaugcaccaauggaugaaugugaugcgaagugucaaacaccucagggagcuauaaacagcagucuuccuuuccagaauguacacccagucacaauaggagaguguccaaaguaugucaggagugcaaaauuaaggaugguuacaggacuaaggaacaucccauccauucaauccagagguuuguuuggagccauugccgguuucauugaagggggguggacuggaaugguagaugggugguaugguuaucaucaucagaaugagcaaggaucuggcuaugcugcagaucaaaaaagcacacaaaaugccauuaacgggauuacaaacaaggugaauucuguaauugagaaaaugaacacucaauucacagcugugggcaaagaauucaacaaauuggaaagaaggauggaaaacuuaaauaaaaagguugaugauggguuucuagacauuuggacauauaaugcagaauuguugguucuacuggaaaaugaaaggacuuuggauuuccacgacuccaaugugaagaaucuguacgagaaaguaaaaagccaauuaaagaauaaugccaaagaaauaggaaauggguguuuugaauucuaucacaaguguaacaaugaaugcauggagagugugaaaaauggaacuuaugacuauccaaaauauuccgaagaaucaaaguuaaacagggaaaaaauugauggagugaaauuggacucaaugggggucuaucagauucuggcgaucuacucaacugucgccaguucccugguucuuuuggucucccugggggcaaucagcuucuggauguguuccaaugggucuuugcaguguagaauaugcaucuga

SEQ ID NO: 34154 - RNA, 1698 nt, Artificial Sequence; identical to SEQ ID NO: 33971
  derived and/or modified CDS sequence (wt) from hemagglutinin__InfluenzaA__ABW86321

SEQ ID NO: 34155 - RNA, 1698 nt, Artificial Sequence
  derived and/or modified CDS sequence (wt) from hemagglutinin__InfluenzaA__ABW86332
augaaaguaaaacuacuuguucuguuauguacauuuacagcuacauaugcagacacaauauguauaggcuaccaugccaacaacucgacugacacuguugacacaguacuugagaagaaugugacagugacacacucugucaaccuacuugaggacagucacaauggaaaacuaugucuacuaaaaggaauagccccacuacaauuggguaauugcagcguugccggauggaucuuaggaaacccagaaugcgaauuacugauuuccaaggaaucaugguccuacauuguagaaacaccaaauccugagaauggaacauguuacccaggguauuucgccgacuaugaggagcugagggagcaauugaguucaguaucuucauuugagagguucgaaauauuccccaaagagagcucauggcccaaccacaccguaaccggaguaucagcaucaugcucccauaacggggaaagcaguuuuuacagaaauuuguuauggcugacggggaagaaugguuuguauccaaaccugagcaaguccuaugcaaacaacaaagagaaagaaguccuuguacugugggguguucaucacccgccuaacauaggagaccaaagggcccucuaucauacagaaaaugcuuaugucucuguagugucuucacauuauagcagaagauucaccccagaaauagccaaaagacccaaggugagagaucaggaaggaagaaucaacuacuacuggacucugcuggaacccggggauacaauaauauuugaggcaaauggaaaucuaauagcgccaagguuugcuuucgcacugaguagaggcuuuggaucaggaaucaucaccucaaaugcaccaauggauaaaugugaugcaaaaugucaaacaccucagggagcuauaaacagcagucuuccuuuccagaauguacacccagucacaauaggagaguguccaaaguaugucaggaguacaaaauuaagaaugguuacaggacuaaggaacaucccauccauucaauccagagguuuguuuggagccauugccgguuucauugaagggggguggacuggaaugguagaugguugguaugguuaucaccaucagaaugagcaaggaucuggguaugcugcagaucaaaaaagcacacaaaaugccauuaacgggauuacaaacaaggugaauucuguaauugagaaaaugaacacucaauucacagcugugggcaaagaauucaacaaauuggaaagaaggauggaaaauuuaaauaaaaagguugaugauggguuucuagacauuuggacauauaacgcagaauuguugguucuacuggaaaaugaaaggacuuuggacuuccaugacuccaacgugaagaaucuguaugagaaaguaaaaagccaauuaaagaauaaugccaaagaaauaggaaacggguguuuugaauucuaucacaaguguaacgaugaaugcauggagagugugaaaaauggaacuuaugacuauccaaaauauuccgaagaaucaaaguugaacagggagaaaauugauggagugaaauuggaaucaaugggagucuaucagauucuggcgaucuacucaacagucgccaguuccuugguucuuuuggucucccugggggcaaucagcuucuggauguguuccaaugggucuuugcaguguagaauaugcaucuaa

SEQ ID NO: 34156 - RNA, 1698 nt, Artificial Sequence; identical to SEQ ID NO: 33938
  derived and/or modified CDS sequence (wt) from hemagglutinin__InfluenzaA__ABW86343

SEQ ID NO: 34157 - RNA, 1698 nt, Artificial Sequence; identical to SEQ ID NO: 33926
  derived and/or modified CDS sequence (wt) from hemagglutinin__InfluenzaA__ABW86354

SEQ ID NO: 34158 - RNA, 1698 nt, Artificial Sequence; identical to SEQ ID NO: 34002
  derived and/or modified CDS sequence (wt) from hemagglutinin__InfluenzaA__ABW86365

SEQ ID NO: 34159 - RNA, 1698 nt, Artificial Sequence
  derived and/or modified CDS sequence (wt) from hemagglutinin__InfluenzaA__ABW86376
augaaaguaaaacuacuuguucuguuauguacauuuacagcuacauaugcagacacaauauguauaggcuaccaugccaacaacucgaccgacacuguugacacaguacuugagaagaaugugacagugacacacucugucaaccuacuugaggacagucacaauggaaaacuaugucuacuaaaaggaauagccccacuacaauuggguaauugcagcguugccggauggaucuuaggaaacccagaaugcgaauuacugauuuccaaggaaucaugguccuacauuguagaaacaccaaauccugagaauggaacauguuacccaggauauuucgccgacuaugaggagcugagggagcaauugaguucaguaucuucauuugagagguucgaaauauuccccaaagagagcucauggcccaaccacaccguaaccggaguaucagcaucaugcucccauaacgggaaaagcaguuuuuacagaaauuugcuauggcugacggggaagaaugguuuguauccaaaccugagcaaguccuaugcaaacaacaaagagaaagaaguccuuguacugugggguguucaucacccgccuaacauaggggaccaaagggcccucuaucauacagaaaaugcuuaugucucuguagugucuucacauuauagcagaagauucaccccagaaauagccaaaagacccaaggugagagaucaggaaggaagaaucaacuacuacuggacucugcuggaacccggggauacaauaauauuugaggcaaauggaaaucuaauagcgccaagguuugcuuucgcacugaguagaggcuuuggaucaggaaucaucaccucaaaugcaccaaugggugaaugugaugcgaagugucaaacaccucagggagcuauaaacaguagucuuccuuuccagaauguacauccagucacaauaggagaguguccaaaguaugucaggagugcaaaauuaagaaugguuacaggacuaaggaacaucccaucaauucaauccagagguuuguuuggagccauugccgguuucauugaagggggguggacuggaaugguagaugguugguaugguuaucaccaucagaaugagcaaggaucuggguaugcugcagaucaaaaaagcacacaaaaugccauuaacgggauuacaaacaaggugaauucuguaauugagaaaaugaacacucaauucacagcugugggcaaagaauucaacaaauuggaaagaaggauggaaaacuuaaauaaaaagguugaugauggguuucuagacauuuggacauauaacgcagaauuguugguucuacuggaaaaugaaaggacuuuggacuuccaugacuccaacgugaagaaucuguaugagaaaguaaaaagccaauuaaagaauaaugccaaagaaauaggaaacggguguuuugaauucuaucacaaguguaacgaugaaugcauggagagugugaaaaauggaacuuaugacuauccaaaauauuccgaagaaucaaaguugaacagggagaaaauugauggagugaaauuggaaucaaugggagucuaucagauucuggcgaucuacucaacagucgccaguucccugguucuuuuggucucccugggggcaaucagcuucuggauguguuccaaugggucuuugcaguguagaauaugcaucuaa

SEQ ID NO: 34160 - RNA, 1698 nt, Artificial Sequence; identical to SEQ ID NO: 34002
  derived and/or modified CDS sequence (wt) from hemagglutinin__InfluenzaA__ABW86387

SEQ ID NO: 34161 - RNA, 1698 nt, Artificial Sequence; identical to SEQ ID NO: 33938
  derived and/or modified CDS sequence (wt) from hemagglutinin__InfluenzaA__ABW86409

SEQ ID NO: 34162 - RNA, 1698 nt, Artificial Sequence; identical to SEQ ID NO: 33997
  derived and/or modified CDS sequence (wt) from hemagglutinin__InfluenzaA__ABW86431

SEQ ID NO: 34163 - RNA, 1698 nt, Artificial Sequence; identical to SEQ ID NO: 33926
  derived and/or modified CDS sequence (wt) from hemagglutinin__InfluenzaA__ABW86442

SEQ ID NO: 34164 - RNA, 1698 nt, Artificial Sequence
  derived and/or modified CDS sequence (wt) from hemagglutinin__InfluenzaA__ABW86453
augaaaguaaaacuacuuguucuguuauguacauuuacagcuacauaugcagacacaauauguauaggcuaccaugccaacaacucgaccgacacuguugacacagugcuugagaagaaugugacagugacacacucugucaaccuacuugaggacagucacaauggaaaacuaugucuacuaaaaggaauagccccacuacaauuggguaauugcagcguugccggauggaucuuaggaaacccagaaugcgaauuacugauuuccaaggaaucaugguccuacauuguagaaacaccaaauccugagaauggaacauguuacccaggauauuucgccgacuaugaggagcugagggagcaauugaguucaguaucuucauuugagagguucgaaauauuccccaaagagagcucauggcccaaccacaccguaaccggaguaucagcaucaugcucccauaacgggaaaagcaguuuuuacagaaauuugcuauggcugacggggaagaaugguuuguauccaaaccugagcaaguccuaugcaaacaacaaagagaaagaaguccuuguacugugggguguucaucacccgccuaacauaggggaccaaagggcccucuaucauacagaaaaugcuuaugucucuguagugucuucacauuauagcagaagauucaccccagaaauagccaaaagacccaaggugagagaucaggaaggaagaaucaacuacuacuggacucugcuggaacccggggauacaauaauauuugaggcaaauggaaaucuaauagcgccaagguuugcuuucgcacugaguagaggcuuuggaucaggaaucaucaccucaaaugcaccaaugggugaaugugaugcgaagugucaaacaccucagggagcuauaaacaguagucuuccuuuccagaauguacacccagucacaauaggagaguguccaaaguaugucaggagugcaaaauuaagaaugguuacaggacuaaggaacaucccauccauucaauccagagguuuguuuggagccauugccgguuucauugaagggggguggacuggaaugguagaugguugguaugguuaucaccaucagaaugagcaaggaucuggguaugcugcagaucaaaaaagcacacaaaaugccauuaacgggauuacaaacaaggugaauucuguaauugagaaaaugaacacucaauucacagcugugggcaaagaauucaacaaauuggaaagaaggauggaaaacuuaaauaaaaagguugaugauggguuucuagacauuuggacauauaacgcagaauuguugguucuacuggaaaaugaaaggacuuuggacuuccaugacuccaacgugaagaaucuguaugagaaaguaaaaagccaauuaaagaauaaugccaaagaaauaggaaacggguguuuugaauucuaucacaaguguaacgaugaaugcauggagagugugaaaaauggaacuuaugacuauccaaaauauuccgaagaaucaaaguugaacagggagaaaauugauggagugaaauuggaaucaaugggagucuaucagauccuggcgaucuacucaacagucgccaguucccugguucuuuuggucucccugggggcaaucagcuucuggauguguuccaaugggucuuugcaguguagaauaugcaucuaa

SEQ ID NO: 34165 - RNA, 1698 nt, Artificial Sequence
  derived and/or modified CDS sequence (wt) from hemagglutinin__InfluenzaA__ABW86464
augaaaguaaaacuacugguucuguuauguacauuuacagcuacauaugcagacacaauauguauaggcuaccaugccaacaacucgaccgacacuguugacacaguacuugagaagaaugugacagugacacacucugucaaccuacuugaggacagucacaauggaaaacuaugucuacuaaaaggaauagccccacuacaauuggguaauugcagcguugccggauggaucuuaggaaacccagaaugcgaauuacugauuuccaaggaaucaugguccuacauuguagagacaccaaauccugagaauggaacauguuacccaggguauuucgccgacuaugaggagcugagagagcaauugaguucaguaucuucauuugagagguucgaaauauuccccaaagagagcucauggcccaaccacaccguaaccggaguaucagcaucaugcucccauaacgggaaaagcaguuuuuacagaaauuugcuauggcugacggggaagaaugguuuguauccaaaccugagcaaguccuaugcaaacaacaaagagaaagaaguccuuguacugugggguguucaucacccgccuaacauaggggaccaaagggcccucuaucauacagaaaaugcuuaugucucuguagugucuucacauuauagcagaagauucaccccagaaauagccaaaagacccaaggugagagaucaggaaggaagaaucaacuacuacuggacucugcuugaacccggggauacaauaauauuugaggcaaauggaaaucuaauagcgccaagguuugcuuucgcacugaguagaggcuuuggaucaggaaucaucaccucaaaugcaccaauggaugaaugugaugcgaaaugucaaacaccucagggagcuauaaacagcagucuuccuuuccagaauguacacccagucacaauaggagaguguccaaaguaugucaggaguacaaaauuaagaaugguuacaggacuaaggaacaucccaucaauucaauccagaggcuuguuuggagccauugccgguuucauugaagggggguggacuggaaugguagaugguugguaugguuaucaccaucagaaugagcaaggaucuggguaugcugcagaucaaaaaagcacacaaaaugccauuaacgggauuacaaacaaggugaauucuguaauugagaaaaugaacacucaauucacagcugugggcaaagaauucaacaaauuggaaagaaggauggaaaacuuaaauaaaaaaguugaugauggguuucuagacauuuggacauauaacgcagaauuguugguucuacuggaaaaugaaaggacuuuggacuuccaugacuccaacgugaagaaucuguaugagaaaguaaaaagccaauuaaagaauaaugccaaagaaauaggaaacggguguuuugaauucuaucacaaguguaacgaugaaugcauggagagugugaaaaauggaacuuaugacuauccaaaauauuccgaagaaucaaaguugaacagggagaaaauugauggagugaaauuggaaucaaugggagucuaucagauuuuggcgaucuacucaacagucgccaguucccugguucuuuuggucucccugggggcaaucagcuucuggauguguuccaaugggucuuugcaguguagaauaugcaucuaa

SEQ ID NO: 34166 - RNA, 1698 nt, Artificial Sequence; identical to SEQ ID NO: 34079
  derived and/or modified CDS sequence (wt) from hemagglutinin__InfluenzaA__ABW86475

SEQ ID NO: 34167 - RNA, 1698 nt, Artificial Sequence
  derived and/or modified CDS sequence (wt) from hemagglutinin__InfluenzaA__ABW86486
augaaaguaaaacuacugauucuguuauguacauuuaccgcuacauaugcagacacaauauguauaggcuaccaugccaacaacucgaccgacacuguugacacaguacuugagaagaaugugacagugacacacucugucaaccuacuugaggacagucacaauggaaaacuaugucuacuaaagggaauagccccacuacaauuggguaauugcagcguugccggauggaucuuaggaaacccagaaugcgaauugcugauuuccaaggaaucaugguccuacauuguagagacaccaaauccugagaauggaacauguuacccaggguauuucgccgacuaugaggagcugagagagcaauugaguucaguaucuucauuugagagguucgaaauauuccccaaagagagcucauggcccaaccacaccguaaccggaguaucagcaucaugcucccauaacgggaaaagcaguuuuuacagaaauuugcuauggcugacggggaagaaugguuuguauccaaaccugagcaaguccuaugcaaacaacaaagagaaagaaguccuuguacugugggguguucaucacccgccuaacauaggggaccaaagggcccucuaucauacagaaaaugcuuaugucucuguagugucuucacauuauagcagaagauucaccccagaaauagccaaaagacccaaggugagagaucaggaaggaagaaucaacuacuacuggacucugcuugaacccggggauacaauaauauuugaggcaaauggaaaucuaauagcgccaagguuugcuuucgcacugaguagaggcuuuggaucaggaaucaucaccucaaaugcaccaauggaugaaugugaugcgaaaugucaaacaccucagggagcuauaaacagcagucuuccuuuccagaauguacacccagucacaauaggagaguguccaaaguaugucaggaguacaaaauuaagaaugguuacaggacuaaggaacaucccauccauucaaucaagagguuuauuuggagccauugcugguuucauugaagggggguggacuggaaugguagaugguugguaugguuaucaccaucagaaugagcaaggaucuggguaugcugcagaucaaaaaagcacacaaaaugccauuaacgggauuacaaacaaggugaauucuguaauugagaaaaugaacacucaauucacagcugugggcaaagaauucaacaaauuggaaagaaggauggaaaacuuaaauaaaaaaguugaugauggguuucuagacauuuggacauauaacgcagaauuguugguucuacuggaaaaugaaaggacuuuggacuuccaugacuccaacgugaagaaucuguaugagaaaguaaaaagccaauuaaagaauaaugccaaagaaauaggaaacggguguuuugaauucuaucacaaguguaacgaugaaugcauggagagugugaaaaauggaacuuaugacuauccaaaauauuccgaagaaucaaaguugaacagggagaaaauugauggagugaaauuggaaucaaugggagucuaucagauuuuggcgaucuacucaacagucgccaguucccugguucuuuuggucucccugggggcaaucagcuucuggauguguuccaaugggucuuugcaguguagaauaugcaucuaa

SEQ ID NO: 34168 - RNA, 1698 nt, Artificial Sequence
  derived and/or modified CDS sequence (wt) from hemagglutinin__InfluenzaA__ABW86497
augaaagugaaacuacugguucuguuauguacauuuacagcuacauaugcggacacaauauguauaggcuaccaugccaacaacucgaccgacacuguugacacaguacuugagaagaaugugacagugacacacucugucaaccuacuugaggaccgucacaauggaaaacuaugucuacuaaaaggaauagccccacuacaauuggguaauugcagcguugccggauggaucuuaggaaacccagaaugcgaauuacugauuuccaaggaaucaugguccuacauuguagaaacaccaaauccugagaacggaacauguuacccaggguauuucgccgacuaugaggagcugagggagcaauugaguucaguaucuucauuugagagguucgaaauauuccccaaagagagcucauggcccaaccacaccguaaccggaguaucagcaucaugcucccauaacgggaaaagcaguuuuuacagaaauuugcuauggcugacgggaaagaaugguuuguacccaaaccugagcagauccuaugcaaacaacaaagagaaagaaguccuuguacugugggguguucaucacccgccuaacauaggggaccaaagggcccucuaucauacagaaaaugcuuaugucucuguagugucuucacauuauagcagaagauucaccccagaaauagccaaaagacccaaggugagagaucaggaaggaagaaucaauuacuacuggacucuacuggaacccggggauacaauaauauuugaggcaaaugggaaucuaauagcgccaagguuugcuuucgcacugaguagaggcuuuggaucaggaaucaucaccucaaaugcaccaauggaugaaugugaugcgaagugucaaacaccucagggagcuauaaacagcagucuuccuuuccagaauguacacccagucacaauaggagaguguccaaaguaugucaggagugcaaaauuaagaaugguuacaggacuaaggaacauuccauccauucaauccagagguuuguuuggagccauugccgguuucauugaagggggguggacuggaaugguagaugguugguaugguuaucaccaccagaaugagcaaggaucuggguaugcugcagaucaaaaaagcacacaaaaugccauuaacgggauuacaaacaaggugaauucugugauugagaaaaugaacacucaauucacagcugugggcaaagaauucaacaaauuggaaagaagaauggaaaacuuaaauaaaaaaguugaugauggguuucuagacauuuggacguauaacgcagaauuguugguucuacuggaaaaugaaaggacuuuggacuuccaugacuccaacgugaagaaucuguaugagaaaguaaaaagccaauuaaagaauaaugccaaagaaauaggaaacggguguuuugaauucuaucacaaguguaacgaugaaugcauggagagugugaaaaauggaacuuaugacuauccaaaauauuccgaagaaucaaaguuaaacagggagaaaauugauggagugaaauuggaaucaaugggagucuaucagauucuggcgaucuacucaacagucgccaguucccugguucuuuuggucucccugggggcaaucagcuucuggauguguuccaaugggucuuugcaguguagaauaugcaucuaa

SEQ ID NO: 34169 - RNA, 1698 nt, Artificial Sequence; identical to SEQ ID NO: 33937
  derived and/or modified CDS sequence (wt) from hemagglutinin__InfluenzaA__ABW86508

SEQ ID NO: 34170 - RNA, 1698 nt, Artificial Sequence
  derived and/or modified CDS sequence (wt) from hemagglutinin__InfluenzaA__ABW86519
augaaaguaaaacuacuuguucuguuauguacauuuacagcuacauaugcagacacaauauguauaggcuaccaugccaacaacucgaccgacacuguugacacaguacuugagaagaaugugacagugacacacucugucaaccuacuugaggacagucacaauggaaaacuaugucuacuaaaaggaauagccccacuacaauuggguaauugcagcguugccggauggaucuuaggaaacccagaaugcgaauuacugauuuccaaggaaucaugguccuacauuguagaaacaccaaauccugagaauggaacauguuacccaggauauuucgccgacuaugaggagcugagggagcaauugaguucaguaucuucauuugagagguucgaaauauuccccaaagagagcucauggcccaaccacaccguaaccggaguaucagcaucaugcucccauaacgggaaaagcaguuuuuacagaaauuugcuauggcugacggggaagaaugguuuguauccaaaccugagcaaguccuaugcaaacaacaaggagaaagaaguccuuguacugugggguguucaucacccgccuaacauaggggaccaaagggcccucuaucauacagaaaaugcuuaugucucuguagugucuucacauuauagcagaagauucaccccagaaauagccaaaagacccaaggugagaaaucaggaaggaagaaucaacuacuacuggacucugcuggaacccggggauacaauaauauuugaggcaaauggaaaucuaauagcgccaagguuugcuuucgcacugaguagaggcuuuggaucaggaaucaucaccucaaaugcaccaaugggugaaugugaugcgaagugucaaacaccucagggagcuauaaacaguagucuuccuuuccagaauguacauccagucacaauaggggaguguccaaaguaugucaggagugcaaaauuaagaaugguuacaggacuaaggaacaucccauccauucaauccagagguuuguuuggagccauugccgguuucauugaagggggguggacuggaaugguagaugguugguaugguuaucaccaucagaaugagcaaggaucuggguaugcugcagaucaaaaaagcacacaaaaugccauuaacgggauuacaaacaaggugaauucuguaauugagaaaaugaacacucaauucacagcugugggcaaagaauucaacaaauuggaaagaaggauggaaaacuuaaauaaaaagguugaugauggguuucuagacauuuggacauauaacgcagaauuguugguucuacuggaaaaugaaaggacuuuggacuuccaugacuccaacgugaagaaucuguaugagaaaguaaaaagccaauuaaagaauaaugccaaagaaauaggaaacggguguuuugaauucuaucacaaguguaacgaugaaugcauggagagugugaaaaauggaacuuaugacuauccaaaauauuccgaagaaucaaaguugaacagggagaaaauugauggagugaaauuggaaucaaugggagucuaucagauucuggcgaucuacucaacagucgccaguucccugguucuuuuggucucccugggggcaaucagcuucuggauguguuccaaugggucuuugcaguguagaauaugcaucuaa

SEQ ID NO: 34171 - RNA, 1698 nt, Artificial Sequence; identical to SEQ ID NO: 33932
  derived and/or modified CDS sequence (wt) from hemagglutinin__InfluenzaA__ABW86530

SEQ ID NO: 34172 - RNA, 1698 nt, Artificial Sequence
  derived and/or modified CDS sequence (wt) from hemagglutinin__InfluenzaA__ABW86541
augaaaguaaaacuacuuguucuguuauguacauuuacagcuacauaugcagacacaauauguauaggcuaccaugccaacaacucgaccgacacuguugacacaguacuugagaagaaugugacagugacacacucugucaaccuacuugaggacagucacaauggaaaacuaugucugcuaaaaggaauagccccacuacaauuggguaauugcagcguugccggauggaucuuaggaaacccagaaugcgaauuacugauuuccaaggaaucaugguccuacauuguagaaacaccaaauccugagaauggaacauguuacccaggauauuucgccgacuaugaggagcugagggagcaauugaguucaguaucuucauuugagagguucgaaauauuccccaaagagagcucauggcucaaccacaccguaaccggaguaucagcaucaugcucccauaacgggaaaagcaguuuuuacagaaauuugcuauggcugacggggaagaaugguuuguauccaaaccugagcaaguccuaugcaaacaacaaagagaaagaaguccuuguacugugggguguucaucacccgccuaacauaggggaccaaagggcccucuaucauacagaaaaugcuuaugucucuguagugucuucacauuauagcagaagauucaccccagaaauagccaaaagacccaaggugagagaucaggaaggaagaaucaacuacuacuggacucugcuggaacccggggauacaauaauauuugaggcaaauggaaaucuaauagcgccaagguuugcuuucgcacugaguagaggcuuuggaucaggaaucaucaccucaaaugcaccaaugggugaaugugaugcgaagugucaaacaccucagggagcuauaaacaguagucuuccuuuccagaauguacacccagucacaauaggagaguguccaaaguaugucaggagugcaaaauuaagaaugguuacaggacuaaggaacaucccauccauucaauccagagguuuguuuggagccauugccgguuucauugaagggggguggacuggaaugguagaugguugguaugguuaucaccaucagaaugagcaaggaucuggguaugcugcagaucaaaaaagcacacaaaaugccauuaacgggauuacaaacaaggugaauucuguaauugagaaaaugaacacucaauucacagcugugggcaaagaauucaacaaauuggaaaggaggauggaaaacuuaaauaaaaagguugaugauggguuucuagacauuuggacauauaacgcagaauuguugguucuacuggaaaaugaaaggacuuuggacuuccaugacuccaacgugaagaaucuguaugagaaaguaaaaagccaauuaaagaauaaugccaaagaaauaggaaacggguguuuugaauucuaucacaaguguaacgaugaaugcauggagagugugaaaaauggaacuuaugacuauccaaaauauuccgaagaaucaaaguugaacagggagaaaauugauggagugaaauuggaaucaaugggagucuaucagauucuggcgaucuacucaacagucgccaguucccugguucuuuuggucucccugggggcaaucagcuucuggauguguuccaaugggucuuugcaguguagaauaugcaucuaa

SEQ ID NO: 34173 - RNA, 1698 nt, Artificial Sequence
  derived and/or modified CDS sequence (wt) from hemagglutinin__InfluenzaA__ABW86552
augaaaguaaaacuacugauucuguuauguacauuuacagcuacauaugcagacacaauauguauaggcuaccaugccaacaacucgaccgacacuguugacacaguacuugagaagaaugugacagugacacacucugucaaccuacuugaggacagucacaauggaaaacuaugucuacuaaaaggaauagccccacuacaauuggguaauugcagcguugccggauggaucuuaggaaacccagaaugcgaauuacugauuuccaaggaaucaugguccuacauuguagagacaccaaauccugagaauggaacauguuacccaggguauuucgccgacuaugaggagcugagagagcaauugaguucaguaucuucauuugagagguucgaaauauuccccaaagagagcucauggcccaaccacaccguaaccggaguaucagcaucaugcucccauaacgggaaaagcaguuuuuacagaaauuugcuauggcugacggggaagaaugguuuguauccaaaccugagcaaguccuaugcaaacaacaaagagaaagaaguccuuguacugugggguguucaucacccgccuaacauaggggaccaaagggcccucuaucauacagaaaaugcuuaugucucuguagugucuucacauuauagcagaagauucaccccagaaauagccaaaagacccaaggugagagaucaggaaggaagaaucaacuacuacuggacucugcuugaacccggggauacaauaauauuugaggcaaauggaaaucuaauagcgccaagguuugcuuucgcacugaguagaggcuuuggaucaggaaucaucaccucaaaugcaccaauggaugaaugugaugcgaaaugucaaacaccucagggagcuauaaacagcagucuuccuuuccagaauguacacccagucacaauaggagaguguccaaaguaugucaggaguacaaaauuaagaaugguuacaggacuaaggaacaucccauccauucaauccagagguuuauuuggagccauugccgguuucauugaagggggguggacuggaaugguagaugguugguaugguuaucaccaucagaaugagcaaggaucuggguaugcugcagaucaaaaaagcacacaaaaugccauuaacgggauuacaaacaaggugaauucuguaauugagaaaaugaacacucaauucacagcugugggcaaagaauucaacaaauuggaaagaaggauggaaaacuuaaauaaaaaaguugaugauggguuucuagacauuuggacauauaacgcagaauuguugguucuacuggaaaaugaaaggacuuuggacuuccaugacuccaacgugaagaaucuguaugaaaaaguaaaaagccaauuaaagaauaaugccaaagaaauaggaaacggguguuuugaauucuaucacaaguguaacgaugaaugcauggagagugugaaaaauggaacuuaugacuauccaaaauauuccgaagaaucaaaguugaacagggagaaaauugauggagugaaauuggaaucaaugggagucuaucagauuuuggcgaucuacucaacagucgccaguucccugguucuuuuggucucccugggggcaaucagcuucuggauguguuccaaugggucuuugcaguguagaauaugcaucuaa

SEQ ID NO: 34174 - RNA, 1701 nt, Artificial Sequence
  derived and/or modified CDS sequence (wt) from hemagglutinin__InfluenzaA__ABW86563
augaagacuaucauugcuuugagcuacauucuaugucugguuuucgcucaaaaacuuccuggaaaugacaacagcacggcaacgcugugccuugggcaccaugcaguaccaaacggaacgauagugaaaacaaucacgaaugaccaaauugaaguuacuaaugcuacugagcugguucagaguuccucaacaggugaaauaugcgacaguccucaucagauccuugauggagaaaacugcacacuaauagaugcucuauugggagacccucagugugauggcuuccaaaauaagaaaugggaccuuuuuguugaacgcagcaaagccuacagcaacuguuacccuuaugaugugccggauuaugccucccuuaggucacuaguugccucauccggcacacuggaguuuaacaaugaaagcuucaauuggacuggagucacucaaaacggaacaagcucugcuugcauaaggagaucuaauaacaguuucuuuaguagauugaauugguugacccacuuaaaauucaaauacccagcauugaacgugacuaugccaaacaaugaaaaauuugacaaauuguacauuugggggguucaccacccggguacggacaaugaccaaaucuuccuguaugcucaagcaucaggaagaaucacagucucuaccaaaagaagccaacaaacuguaaucccgaauaucggaucuagacccagaguaaggaauauccccagcagaauaagcaucuauuggacaauaguaaaaccgggagacauacuuuugauuaacagcacagggaaucuaauugcuccuagggguuacuucaaaauacgaagugggaaaagcucaauaaugagaucagaugcacccauuggcaaaugcaauucugaaugcaucacuccaaauggaagcauucccaaugacaaaccauuccaaaauguaaacaggaucacauacggggccugucccagauauguuaagcaaaacacucugaaauuggcaacagggaugcgaaauguaccagagaaacaaacuagaggcauauuuggcgcaaucgcggguuucauagaaaaugguugggagggaaugguggaugguugguacgguuucaggcaucaaaauucugagggaauaggacaagcagcagaucucaaaagcacucaagcagcaaucgaucaaaucaaugggaagcugaauagguugaucgggaaaaccaacgagaaauuccaucagauugaaaaagaauucucagaagucgaagggaggauucaggaccuugagaaauauguugaggacaccaaaauagaucucuggucauacaacgcggagcuucuuguugcccuggagaaccaacauacaauugaucuaacugacucagaaaugaacaaacuguuugaaaaaacaaagaagcaacugagggaaaaugcugaggauaugggcaaugguuguuucaaaauauaccacaaaugugacaaugccugcauaggaucaaucagaaauggaacuuaugaccacgauguauacagagaugaagcauuaaacaaccgguuccagaucaagggcguugagcugaagucaggacacaaagauuggauccuauggauuuccuuugccauaucauguuucuugcuuuguguugcuuuguugggguucaucaugugggccugccaaaaaggcaacauuaggugcaacauuugcaucuga

SEQ ID NO: 34175 - RNA, 1698 nt, Artificial Sequence; identical to SEQ ID NO: 33959
  derived and/or modified CDS sequence (wt) from hemagglutinin__InfluenzaA__ABW86606

SEQ ID NO: 34176 - RNA, 1701 nt, Artificial Sequence
  derived and/or modified CDS sequence (wt) from hemagglutinin__InfluenzaA__ABW91185
augaaagcaaaacuacugguccuguuaugugcacuuucagcuacagaugcagacacaauauguauaggcuaccaugcgaacaacucaaccgacacuguugacacaguacucgaaaagaacgugacagugacacacucugucaaccuacuugaggacaaucacaacggaaaacuaugcaaacuaaaaggaauagccccacuacaauuggggaaaugcagcauugccggauggaucuuaggaaacccagaaugcgaaucacuguuuucuaagaaaucaugguccuacauugcagaaacaccaaacuccgagaauggaacauguuacccaggguauuucgccgacuaugaggaacugagggaacaauugaguucaguaucaucauucgagagauucgaaauauuccccaaggaaaguucauggcccaaacacaacguaaccaaaggaguaacggcaucaugcucccauaaggggaaaagcaguuuuuacagaaauuugcuauggcugacggagaaaaauggcucguacccaaaucugagcaaguccuaugugaacaacaaagagaaagaaguccuuguacuaugggguguucaucacccgucuaacauagaggaccaaaagaccaucuaucguaaagaaaaugcuuauguaucuguagugucuucacauuauaacaggagauucaccccagaaauagcaaaaagacccaaaguaagaaaucaagaagggagaauuaauuacuacuggacucugcuggaacccggggacacaauaauauuugaggcaaauggaaaucuaauagcgccaugguaugcuuucgcauugaguagaggcuuugggucaggaaucaucaccucaaacgcaucgauggaugaaugugacgcgaagugucaaacaccccagggagcuauaaacaguagucuuccuuuucagaauguacacccagucacaauaggagagugcccaaaguacgucaggaguacaaaauuaaggaugguuacaggacuaaggaacaucccauccauucaauccagagguuuguuuggagccauugccgguuucauugaagggggauggacuggaaugauugauggaugguaugguuaucaucaucagaaugaacagggaucuggcuaugcugcggaucaaaaaagcacacaaaaugccauuaacgggauuacaaacaaggugaacucuauaaucgagaaaaugaauacucaauucacagcuguggguaaagaauucaacaaacuagaaaaaaggauggaaaacuuaaauaaaaaaguugaugauggauuucuggacauuuggacauauaaugcagaauuguugguucuacuggaaaaugaaaggacuuuggauuuccaugacucaaaugugaagaaccuguaugagaaaguaaaaagccaauuaaagaauaaugccaaagaaauaggaaacggguguuuugaauucuaccacaaguguaacaaugaaugcauggaaaguguaaaaaaugggacuuaugacuauccaaaauauucagaagaaucaaaguuaaacagggaaaaaauugauggagugaaauuggaaucaaugggagucuaucagauucuggcgaucuacucaacugucgccaguucacuggugcuuuuggucucccugggggcaaucagcuucuggauguguucuaaugggucuuugcagugcagaauaugcaucuga

SEQ ID NO: 34177 - RNA, 1701 nt, Artificial Sequence
  derived and/or modified CDS sequence (wt) from hemagglutinin__InfluenzaA__ABW91196
augaagacuaucauugcuuugagcuacauucuaugucugguuuucgcucaaaaacuuccuggaaaugacaacagcacggcaacgcugugccuugggcaccaugcaguaccaaacggaacgauagugaaaacaaucacgaaugaccaaauugaaguuacuaaugcuacugagcugguucagaguuccucaacaggugaaauaugcaacaguccucaucagauccuugauggagaaaacugcacacuaauagaugcucuauugggagacccucagugugauggcuuccaaaauaagaaaugggaccuuuuuguugaacgcagcaaagccuacagcaacuguuacccuuaugaugugccggauuaugccucccuuaggucacuaguugccucauccggcacacuggaguuuaacaaugaaagcuucaauuggacuggagucacucaaaacggaacaagcucugcuugcauaaggagaucuaauaacaguuucuuuaguagauugaauugguugacccacuuaaaauucaaauacccagcauugaacgugacuaugccaaacaaugaaaaauuugacaaauuguacauuugggggguucaccacccggguacggacaaugaccaaaucuuccuguaugcucaagcaucaggaagaaucacagucucuaccaaaagaagccaacaaacuguaaucccgaauaucggaucuagacccagaguaaggaauauccccagcagaauaagcaucuauuggacaauaguaaaaccgggagacauacuuuugauuaacagcacagggaaucuaauugcuccuagggguuacuucaaaauacgaagugggaaaagcucaauaaugagaucagaugcacccauuggcaaaugcaauucugaaugcaucacuccaaauggaagcauucccaaugacaaaccauuccaaaauguaaacaggaucacauacggggccugucccagauauguuaagcaaaacacucugaaauuggcaacagggaugcgaaauguaccagagaaacaaacuagaggcauauuuggcgcaaucgcggguuucauagaaaaugguugggagggaaugguggaugguugguacgguuucaggcaucaaaauucugagggaauaggacaagcagcagaucucaaaagcacucaagcagcaaucgaucaaaucaaugggaagcugaauagguugaucgggaaaaccaacgagaaauuccaucagauugaaaaagaauucucagaagucgaagggagaauucaggaccuugagaaauauguugaggacaccaaaauagaucucuggucauacaacgcggagcuucuuguugcccuggagaaccaacauacaauugaucuaacugauucagaaaugaacaaacuguuugaaaaaacaaagaagcaacugagggaaaaugcugaggauaugggcaaugguuguuucaaaauauaccacaaaugugacaaugccugcauaggaucaaucagaaauggaacuuaugaccacgauguauacagagaugaagcauuaaacaaccgguuccagaucaagggcguugagcugaagucaggauacaaagauuggauccuauggauuuccuuugccauaucauguuuuuugcuuuguguugcuuuguugggguucaucaugugggccugccaaaaaggcaacauuaggugcaacauuugcauuuga

SEQ ID NO: 34178 - RNA, 1701 nt, Artificial Sequence; identical to SEQ ID NO: 34177
  derived and/or modified CDS sequence (wt) from hemagglutinin__InfluenzaA__ABW91207

SEQ ID NO: 34179 - RNA, 1698 nt, Artificial Sequence
  derived and/or modified CDS sequence (wt) from hemagglutinin__InfluenzaA__ABW91218
augaaaguaaaacuacugauucuguuauguacauuuacagcuacauaugcagacacaauauguauaggcuaccaugccaacaacucgaccgacacuguugacacaguacuugagaagaaugugacagugacacacucugucaaccuacuugaggacagucacaauggaaaacuaugucuacuaaaaggaauagccccacuacaauuggguaauugcagcguugccggauggaucuuaggaaacccagaaugcgaauuacugauuuccaaggaaucaugguccuacauuguagagacaccaaauccugagaauggaacauguuacccaggguauuucgccgacuaugaggaacugagagagcaauugaguucaguaucuucauuugagagguucgaaauauuccccaaagagagcucauggcccaaccacaccguaaccggaguaucagcaucaugcucccauaacgggaaaagcaguuuuuacagaaauuugcuauggcugacggggaagaaugguuuguauccaaaccugagcaaguccuaugcaaacaacaaagagaaagaaguccuuguacugugggguguucaucacccgccuaacauaggggaccaaagggcccucuaucauacagaaaaugcuuaugucucuguagugucuucacauuauagcagaagauucaccccagaaauagccaaaagacccaaggugagagaucaggaaggacgaaucaacuacuacuggacucugcuugaacccggggauacaauaauauuugaggcaaauggaaaucuaauagcgccaagguuugcuuucgcacugaguagaggcuuuggaucaggaaucaucaccucaaaugcaccaauggaugaaugugaugcgaaaugucaaacaccucagggagcuauaaacagcagucuuccuuuccagaacguacacccagucacaauaggagaguguccaaaguaugucaggaguacaaaauuaagaaugguuacaggacuaaggaacaucccauccauucaauccagagguuuauuuggagccauugccgguuucauugaagggggguggacuggaaugguagaugguugguaugguuaucaccaucagaaugagcaaggaucuggguaugcugcagaucaaaaaagcacacaaaaugccauuaacgggauuacaaacaaggugaauucuguaauugagaaaaugaacacucaauucacagcugugggcaaagaauucaacaaauuggaaagaaggauggaaaacuuaaauaaaaaaguugaugauggguuucuagacauuuggacauauaacgcagaauuguugguucuacuggaaaaugaaaggacuuuggacuuccaugacuccaacgugaagaaucuguaugagaaaguaaaaagccaauuaaagaauaaugccaaagaaauaggaaacggguguuuugaauucuaucacaaguguaacgaugaaugcauggagagugugaaaaauggaacuuaugacuauccaaaauauuccgaagaaucaaaguugaacagggagaaaauugauggagugaaauuggaaucaaugggagucuaucagauuuuggcgaucuacucaacagucgccaguucccugguucuuuuggucucccugggggcaaucagcuucuggauguguuccaaugggucuuugcaguguagaauaugcaucuaa

SEQ ID NO: 34180 - RNA, 1701 nt, Artificial Sequence
  derived and/or modified CDS sequence (wt) from hemagglutinin__InfluenzaA__ABW91240
augaagacuaucauugcuuugagcuacauucuaugucugguuuucgcucaaaaacuuccuggaaaugacaacagcacggcaacgcugugccuugggcaccaugcaguaccaaacggaacgauagugaaaacaaucacgaaugaccaaauugaaguuacuaaugcuacugagcugguucagaguuccucaacaggugaaauaugcgacaguccucaucagauccuugauggagaaaacugcacacuaauagaugcucuauugggagacccucagugugauggcuuccaaaauaagaaaugggaccuuuuuguugaacgcagcaaagccuacagcaacuguuacccuuaugaugugccggauuaugccucccuuaggucacuaguugccucauccggcacacuggaauuuaacaaugaaagcuucaauuggacuggagucacucaaaacggaacaagcucugcuugcauaaggagaucuaauaacaguuucuuuaguagauugaauugguugacccacuuaaaauucaaauacccagcauugaacgugacuaugccaaacaaugaaaaauuugacaaauuguacauuugggggguucaccacccggguacggacaaugaccaaaucuuccuguaugcucaagcaucaggaagaaucacagucucuaccaaaagaagccaacaaacuguaaucccgaauaucggaucuagacccagaguaaggaauauccccagcagaauaagcaucuauuggacaauaguaaaaccgggagacauacuuuugauuaacagcacagggaaucuaauugcuccuagggguuacuucaaaauacgaagugggaaaagcucaauaaugagaucagaugcacccauuggcaaaugcaauucugaaugcaucacuccaaauggaagcauucccaaugacaaaccauuccaaaauguaaacaggaucacauacggggccugucccagauauguuaagcaaaacacucugaaauuggcaacagggaugcgaaauguaccagagaaacaaacuagaggcauauuuggcgcaaucgcggguuucauagaaaaugguugggagggaaugguggaugguugguacgguuucaggcaucaaaauucugagggaauaggacaagcagcagaucucaaaagcacucaagcagcaaucgaucaaaucaaugggaagcugaauagguugaucgggaaaaccaacgagaaauuccaucagauugaaaaagaauucucagaagucgaagggaggauucaggaccuugagaaauauguugaggacaccaaaauagaucucuggucauacaacgcggagcuucuuguugcccuggagaaccaacauacaauugaucuaacugacucagaaaugaacaaacuguuugaaaaaacaaagaagcaacugagggaaaaugcugaggauaugggcaaugguuguuucaaaauauaccacaaaugugacaaugccugcauaggaucaaucagaaauggaacuuaugaccacgauguauacagagaugaagcauuaaacaaccgguuccagaucaagggcguugagcugaagucaggauacaaagauuggauccuauggauuuccuuugccauaucauguuuuuugcuuuguguugcuuuguugggguucaucaugugggccugccaaaaaggcaacauuaggugcaacauuugcauuuga

SEQ ID NO: 34181 - RNA, 1701 nt, Artificial Sequence
  derived and/or modified CDS sequence (wt) from hemagglutinin__InfluenzaA__ABW91251
augaagacuaucauugcuuugagcuacauucuaugucugguuuucgcucaaaaacuucccggaaaugacaacagcacggcaacgcugugccuugggcaccaugcaguaccaaacggaacgauagugaaaacaaucacgaaugaccaaauugaaguuacuaaugcuacugagcugguucagaguuccucaacaggugaaauaugcgacaguccucaucagauccuugauggagaaaacugcacacuaauagaugcucuauugggagacccucagugugauggcuuccaaaauaagaaaugggaccuuuuuguugaacgcagcaaagccuacagcaacuguuacccuuaugaugugccggauuaugccucccuuaggucacuaguugccucauccggcacacuggaguuuaacaaugaaagcuucaauuggacuggagucacucaaaacggaacaagcucugcuugcauaaggagaucuaauaacaguuucuuuaguagauugaauugguugacccacuuaaaauucaaauacccagcauugaacgugacuaugccaaacaaugaaaaauuugacaaauuguacauuugggggguucaccacccggguacggacaaugaccaaaucuuccuguaugcucaagcaucaggaagaaucacagucucuaccaaaagaagccaacaaacuguaaucccgaauaucggaucuagacccagaguaaggaauauccccagcagaauaagcauuuauuggacaauaguaaaaucgggagacauacuuuugauuaacagcacagggaaucuaauugcuccuagggguuacuucaaaauacgaagugggaaaagcucaauaaugagaucagaugcacccauuggcaaaugcaauucugaaugcaucacuccaaauggaagcauucccaaugacaaaccauuccaaaauguaaacaggaucacauacggggccugucccagauauguuaagcaaaacacucugaaauuggcaacagggaugcgaaauguaccagaaaaacaaacuagaggcauauuuggcgcaaucgcggguuucauagaaaaugguugggagggaaugguggaugguugguacgguuucaggcaucaaaauucugagggaauaggacaagcagcagaucucaaaagcacucaagcagcaaucgaucaaaucaaugggaagcugaauagguugaucgggaaaaccaacgagaaauuccaucagauugaaaaagaauucucagaagucgaagggagaauucaggaccuugagaaauauguugaggacaccaaaauagaucucuggucauacaacgcggagcuucuuguugcccuggagaaccaacauacaauugaucuaacugacucagaaaugaacaaacuguuugaaaaaacaaagaagcaacugagggaaaaugcugaggauaugggcaaugguuguuucaaaauauaccacaaaugugacaaugccugcauaggaucaaucagaaauggaacuuaugaccacgauguauacagagaugaagcauuaaacaaccgguuccagaucaagggcguugagcugaagucaggauacaaagauuggauccuauggauuuccuuugccauaucauguuuuuugcuuuguguugcuuuguugggguucaucaugugggccugccaaaaaggcaacauuaggugcaacauuugcauuuga

SEQ ID NO: 34182 - RNA, 1701 nt, Artificial Sequence; identical to SEQ ID NO: 33940
  derived and/or modified CDS sequence (wt) from hemagglutinin__InfluenzaA__ABW91262

SEQ ID NO: 34183 - RNA, 1698 nt, Artificial Sequence
  derived and/or modified CDS sequence (wt) from hemagglutinin__InfluenzaA__ABW91273
augaaaguaaaacuacugguucuguuauguacauuuacagcuacauaugcagacacaauauguauaggcuaccaugccaacaacucgaccgacacuguugacacaguacuugagaagaaugugacagugacacacucugucaaccuacuugaggacagucacaauggaaaacuaugucuacuaaaaggaauagccccacuacaauuggguaauugcagcguugccggauggaucuuaggaaacccagaaugcgaauuacugauuuccaaggaaucaugguccuacauuguagagacaccaaauccugagaauggaacauguuacccagggaauuucgccgacuaugaggagcugagagagcaauugaguucaguaucuucauuugagagguucgaaauauuccccaaagagagcucauggcccaaccacaccguaaccggaguaucagcaucaugcucccauaacgggaaaagcaguuuuuacagaaauuugcuauggcugacggggaagaaugguuuguauccaaaccugagcaaguccuaugcaaacaacaaagagaaagaaguccuuguacugugggguguucaucacccgccuaacauaggggaccaaagggcccucuaucauacagaaaaugcuuaugucucuguagugucuucacauuauagcagaagauucaccccagaaauagccaaaagacccaaggugagagaucaggaaggaagaaucaacuacuacuggacucugcuugaacccggggauacaauaauauuugaggcaaauggaaaucuaauagcgccaagguuugcuuucgcacugaguagaggcuuuggaucaggaaucaucaccucaaaugcaccaauggaugaaugugaugcgaaaugucaaacaccucagggagcuauaaacagcagccuuccuuuccagaauguacacccagucacaauaggagaguguccaaaguaugucaggagugcaaaauuaagaaugguuacaggacuaaggaacaucccauccauucaauccagagguuuguuuggagccauugccgguuucauugaagggggguggacuggaaugguagaugguugguaugguuaucaccaucagaaugagcaaggaucuggguaugcugcagaucaaaaaagcacacaaaaugccauuaacgggauuacaaacaaggugaauucuguaauugagaaaaugaacacucaauucacagcugugggcaaagaauucaacaaauuggaaagaaggauggaaaacuuaaacaaaaaaguugaugauggguuucuagacauuuggacauauaacgcagaauuguugguucuacuggaaaaugaaaggacuuuggacuuccaugacuccaacgugaagaaucuguaugagaaaguaaaaagccaauuaaagaauaaugccaaagaaauaggaaacggguguuuugaauucuaucacaaauguaacgaugaaugcauggagagugugaaaaauggaacuuaugacuauccaaaauauuccgaagaaucaaaguugaacagggagaaaauugauggagugaaauuggaaucaaugggagucuaucagauuuuggcgaucuacucaacagucgccaguucccugguucuuuuggucucccugggggcaaucagcuucuggauguguuccaaugggucuuugcaguguagaauaugcaucuaa

SEQ ID NO: 34184 - RNA, 1698 nt, Artificial Sequence
  derived and/or modified CDS sequence (wt) from hemagglutinin__InfluenzaA__ABW91284
augaaaguaaaacuacugguccuguuaugcacauuuacagcuacauaugcagacacaauauguauaggcuaccaugccaacaacucaaccgacacuguugacacaguacuugagaagaaugugacagugacacacucugucaaccugcuugaggacagucacaauggaaaauuaugucuauuaaaaggaauagccccacuacaauuggguaauugcagcguugccggauggaucuuaggaaacccagaaugcgaauuacugauuuccagggaaucaugguccuacauuguagaaaaaccaaauccugagaauggaacauguuacccagggcauuucgccgacuaugaggaacugagggagcaauugaguucaguaucuucauuugagagauucgaaauauuucccaaagaaagcucauggcccaaccacaccacaaccggaguaucagcaucaugcucccauaauggggaaagcaguuuuuacaaaaauuugcuauggcugacggggaagaaugguuuguacccaaaccugagcaaguccuaugcaaacaacaaagagaaagaaguccuuguacuaugggguguucaucacccgccuaacauaggugaccaaagggcccucuaucauacagaaaaugcuuaugucucuguagugucuucacauuauagcagaaaauucaccccagaaauagccaaaagacccaaaguaagagaucaagaaggaagaaucaacuacuacuggacucuacuugaacccggggauacaauaauauuugaggcaaauggaaaucuaauagcgccaagauaugcuuucgcacugaguagaggcuuuggaucaggaaucaucaacucaaaugcaucaaugggugaaugugaugcgaagugccagacaccucagggagcuauaaacagcagucuuccuuuccagaauguacacccagucacaauaggagaguguccaaaguaugucaggagugcaaaauuaaggaugguuacaggacuaaggaacaucccauccauucaauccagagguuuguuuggagccauugccgguuucauugaagggggguggacuggaaugguagaugguugguaugguuaucaucaucagaaugagcaaggaucuggcuaugcugcagaucaaaaaagcacacaaaaugccauuaaugggauuacaaacaaggugaauucuguaauugagaaaaugaacacucaauucacagcugugggcaaagaauucaacaaauuggaaagaaggauggaaaacuuaaauaaaaaaguugaugauggguuuauagacauuuggacauauaaugcagaauuguugguucuacuggaaaaugaaaggacuuuggauuuccaugacuccaaugugaagaaucuguaugagaaaguaaaaagccaauuaaagaauaaugccaaagaaauaggaaauggguguuuugaauucuaucacaaguguaaugaugaaugcauggagaguguaaaaaauggaacuuaugacuauccaaaauauuccgaagaaucaaaguuaaacagggagaaaauugauggagugaaauuggaaucaaugggagucuaucagauucuggcgaucuacucaacagucgccaguucucugguucuuuuggucucccugggggcaaucagcuucuggauguguuccaaugggucuuugcaguguagaauaugcaucuaa

SEQ ID NO: 34185 - RNA, 1698 nt, Artificial Sequence; identical to SEQ ID NO: 34032
  derived and/or modified CDS sequence (wt) from hemagglutinin__InfluenzaA__ABW91295

SEQ ID NO: 34186 - RNA, 1698 nt, Artificial Sequence; identical to SEQ ID NO: 33945
  derived and/or modified CDS sequence (wt) from hemagglutinin__InfluenzaA__ABW91306

SEQ ID NO: 34187 - RNA, 1698 nt, Artificial Sequence; identical to SEQ ID NO: 33973
  derived and/or modified CDS sequence (wt) from hemagglutinin__InfluenzaA__ABW91317

SEQ ID NO: 34188 - RNA, 1698 nt, Artificial Sequence
  derived and/or modified CDS sequence (wt) from hemagglutinin__InfluenzaA__ABW91328
augaaaguaaaacuacugauucuguuauguacauuuacagcuacauaugcagacacaauauguauaggcuaccaugccaacaacucgaccgacacuguugacacaguacuugagaagaaugugacagugacacacucugucaaccuacuugaggacagucacaauggaaaacuaugucuacuaaaaggaauagccccacuacaauuggguaauugcagcguugccggauggaucuuaggaaacccagaaugcgaauuacugauuuccaaggaaucaugguccuacauuguagagacaccaaauccugagaauggaacauguuacccaggguauuucgccgacuaugaggagcugagagagcaauugaguucaguaucuucauuugagagguucgaaauauuccccaaagagagcucauggcccaaccacaccguaaccggaguaucagcaucaugcucccauaacgggaaaagcaguuuuuacagaaauuugcuauggcugacggggaagaaugguuuguauccaaaccugagcaaguccuaugcaaacaacaaagagaaagaaguccuuguacugugggguguucaucacccgccuaacauaggggaccaaagggcccucuaucauacagaaaaugcuuaugucucuguagugucuucacauuauagcagaagauucaccccagaaauagccaaaagacccaaggugagagaucaggaaggaagaaucaacuacuacuggacucugcuugaacccggggauacaauaauauuugaggcaaauggaaaucuaauagcgccaagguuugcuuucgcacugaguagaggcuuuggaucaggaaucaucaccucaaaugcaccaauggaugaaugugaugcgaaaugucaaacaccucagggagcuauaaacagcagucuuccuuuccagaauguacacccagucacaauaggagaguguccaaaguaugucaggaguacaaaauuaagaaugguuacaggacuaaggaacaucccauccauucaauccagagguuuauuuggagccauugccgguuucauugaagggggguggacuggaaugguagaugguugguaugguuaucaccaucagaaugagcaaggaucuggauaugcugcagaucaaaaaagcacacaaaaugccauuaacgggauuacaaacaaggugaauucuguaauugagaaaaugaacacucaauucacagcugugggcaaagaauucaacaaauuggaaagaaggauggaaaacuuaaauaaaaaaguugaugauggguuucuagacauuuggacauauaacgcagaauuguugguucuacuggaaaaugaaaggacuuuggacuuccaugacuccaacgugaagaaucuguaugagaaaguaagaagccaauuaaagaauaaugccaaagaaauaggaaacggguguuuugaauucuaucacaaguguaacgaugaaugcauggagagugugaaaaauggaacuuaugacuauccaaaauauuccgaagaaucaaaguugaacagggagaaaauugauggagugaaauuggaaucaaugggagucuaucagauuuuggcgaucuacucaacagucgccaguucccugguucuuuuggucucccugggggcaaucagcuucuggauguguuccaaugggucuuugcaguguagaauaugcaucuaa

SEQ ID NO: 34189 - RNA, 1698 nt, Artificial Sequence
  derived and/or modified CDS sequence (wt) from hemagglutinin__InfluenzaA__ABW91339
augaaaguaaaacuacugguucuguuauguacauuuacagcuacauaugcagacacaauauguauaggcuaccaugccaacaacucgaccgacacuguugacacaguacuugagaagaaugugacagugacacacucugucaaccuacuugaggacagucacaauggaaaacuaugucuacuaaaaggaauagccccacuacaauuggguaauugcagcguugccggauggaucuuaggaaacccagaaugcgaauuacugauuuccaaggaaucaugguccuacauuguagagacaccaaauccugagaauggaacauguuacccaggguauuucgccgacuaugaggagcugagagagcaauugaguucaguaucuucauuugaaagguucgaaauauuccccaaagagagcucauggcccaaccacaccguaaccggaguaucagcaucaugcucccauaacgggaaaagcaguuuuuacagaaauuugcuauggcugacggggaagaaugguuuguauccaaaccugagcaaguccuaugcaaacaacaaagagaaagaaguccuuguacugugggguguucaucacccgccuaacauaggggaccaaagggcccucuaucauacagaaaaugcuuaugucucuguagugucuucacauuauagcagaagauucaccccagaaauagccaaaagacccaaggugagagaucaggaaggaagaaucaacuacuacuggacucugcuugaacccggggauacaauaauauuugaggcaaauggaaaucuaauagcgccaagguuugcuuucgcacugaguagaggcuuuggaucaggaaucaucaccucaaaugcaccaauggaugaaugugaugcgaaaugucaaacaccucagggagcuauaaacagcagucuuccuuuccagaauguacacccagucacaauaggagaguguccaaaguaugucaggaguacaaaauuaagaaugguuacaggacuaaggaacaucccauccauucaauccagagguuuguuuggagccauugccgguuucauugaagggggguggacuggaaugguagaugguugguaugguuaucaccaucagaaugagcaaggaucuggguaugcugcugaucaaaaaagcacacaaaaugccauuaacgggauuacaaacaaggugaauucuguaauugagaaaaugaacacucaauucacagcugugggcaaagaauucaacaaauuggaaagaaggauggaaaacuuaaauaaaaaaguugaugauggguuucuagacauuuggacauauaacgcagaauuguugguucuacuggaaaaugaaaggacuuuggacuuccaugacuccaacgugaagaaucuguaugagaaaguaaaaagccaauuaaagaauaaugccaaagaaauaggaaacggguguuuugaauucuaucacaaguguaacgaugaaugcauggagagugugaaaaauggaacuuaugacuauccaaaauauuccgaagaaucaaaguugaacagggagaaaauugauggagugaaauuggaaucaaugggagucuaucagauuuuggcgaucuacucaacagucgccaguucccugguucuuuuggucucccugggggcaaucagcuucuggauguguuccaaugggucuuugcaguguagaauaugcaucuaa

SEQ ID NO: 34190 - RNA, 1698 nt, Artificial Sequence
  derived and/or modified CDS sequence (wt) from hemagglutinin__InfluenzaA__ABW91350
augaaaguaaaacuacugguucuguuauguacauuuacagcuacauaugcagacacaauauguauaggcuaccaugccaacaacucgaccgacacuguugacacaguacuugagaagaaugugacagugacacacucugucaaccuacuugaggacagucacaauggaaaacuaugucuacuaaaaggaauagccccacuacaauuggguaauugcagcguugccggauggaucuuaggaaacccagaaugcgaauuacugauuuccaaggaaucaugguccuacauuguagagacaccaaauccugagaauggaacauguuacccaggguauuucgccgacuaugaggagcugagagagcaauugaguucaguaucuucauuugagagguucgaaauauuccccaaagagagcucauggcccaaccacaccguaaccggaguaucagcaucaugcucccauaacgggaaaagcaguuuuuacagaaauuugcuauggcugacggggaagaaugguuuguauccaaaccugagcaaguccuaugcaaacaacaaagagaaagaaguccuuguacugugggguguucaucacccgccuaacauaggggaccaaagggcccucuaucauacagaaaaugcuuaugucucuguagugucuucacauuauagcagaagauucaccccagaaauagccaaaagacccaaggugagagaucaggaaggaagaaucaacuacuacuggacucugcuugaacccggggauacaauaauauuugaggcaaauggaaaucuaauagcgccaagguuugcuuucgcacugaguagaggcuuuggaucaggaaucaucaccucaaaugcaccaauggaugaaugugaugcgaaaugucaaacaccucagggagcuauaaacagcagucuuccuuuccagaauguacacccagucacaauaggagaguguccaaaguaugucaggaguacaaaauuaagaaugguuacaggacuaaggaacaucccauccauucaauccagaggcuuguuuggagccauugccgguuucauugaagggggguggacuggaaugguagaugguugguaugguuaucaccaucagaaugagcaaggaucuggguaugcugcagaucaaaaaagcacacaaaaugccauuaacgggauuacaaacaaggugaauucuguaauugagaaaaugaacacucaauucacagcugugggcaaagaauucaacaaauuggaaagaaggauggaaaacuuaaauaaaaaaguugaugauggguuucuagacauuuggacauauaacgcagaauuguugguucugcuggaaaaugaaaggacuuuggacuuccaugacuccaacgugaagaaucuguaugagaaaguaaaaagccaauuaaagaauaaugccaaagaaauaggaaacggguguuuugaauucuaucacaaguguaacgaugaaugcauggagagugugaaaaauggaacuuaugacuauccaaaauauuccgaagaaucaaaguugaacagggagaaaauugauggagugaaauuggaaucaaugggagucuaucagauuuuggcgaucuacucaacagucgccaguucccugguucuuuuggucucccugggggcaaucagcuucuggauguguuccaaugggucuuugcaguguagaauaugcaucuaa

SEQ ID NO: 34191 - RNA, 1698 nt, Artificial Sequence
  derived and/or modified CDS sequence (wt) from hemagglutinin__InfluenzaA__ABW91361
augaaaguaaaacuacuuguucuguuauguacauuuacagcuacauaugcagacacaauauguauaggcuaccaugccaacaacucgacugacacuguugacacaguacuugagaagaaugugacagugacacacucugucaaccuacuugaggacagucacaauggaaaacuaugucuacuaaaaggaauagccccacuacaauuggguaauugcagcguugccggauggaucuuaggaaacccagaaugcgaauuacugauuuccaaggaaucaugguccuacauuguagaaacaccaaauccugagaauggaacauguuacccaggguauuucgccgacuaugaggagcugagggagcaauugaguucaguaucuucauuugagagguucgaaauauuccccaaagagagcucauggcccaaccacaccguaaccggaguaucagcaucaugcucccauaacggggaaagcaguuuuuacagaaauuuguuauggcugacggggaagaaugguuuguauccaaaccugagcaaguccuaugcaaacaacaaagagaaagaaguccuuguacugugggguguucaucacccgccuaacauaggagaccaaagggcccucuaucauacagaaaaugcuuaugucucuguagugucuucacauuauagcagaagauucaccccagaaauagccaaaagacccaaggugagagaucaggaaggaagaaucaacuacuacuggacucugcuggaacccggggauacaauaauauuugaggcaaauggaaaucuaauagcgccaagguuugcuuucgcacugaguagaggcuuuggaucaggaaucaucaccucaaaugcaccaauggauaaaugugaugcgaagugucaaacaccucagggagcuauaaacagcagucuuccuuuccagaauguacacccagucacaauaggagaguguccaaaguaugucaggaguacaaaauuaagaaugguuacaggacuaaggaacaucccauccauucaaaccagagguuuguuuggagccauugccgguuucauugaagggggguggacuggaaugguagaugguugguaugguuaucaccaucagaaugagcaaggaucuggguaugcugcagaucaaaaaagcacacaaaaugccauuaacgggauuacaaacaaggugaauucuguaauugagaaaaugaacacucaauucacagcugugggcaaagaauucaacaaauuggaaagaaggauggaaaauuuaaauaaaaagguugaugauggguuucuagacauuuggacauauaacgcagaauuguugguucuacuggaaaaugaaaggacuuuggacuuccaugacuccaacgugaagaaucuguaugagaaaguaaaaagccaauuaaagaauaaugccaaagaaauaggaaacggguguuuugaauucuaucacaaguguaacgaugaaugcauggagagugugaaaaauggaacuuaugacuauccaaaauauuccgaagaaucaaaguugaacagggagaaaauugauggagugaaauuggaaucaaugggagucuaucagauucuggcgaucuacucaacagucgccaguuccuugguucuuuuggucucccugggggcaaucagcuucuggauguguuccaaugggucuuugcaguguagaauaugcaucuaa

SEQ ID NO: 34192 - RNA, 1698 nt, Artificial Sequence; identical to SEQ ID NO: 34002
  derived and/or modified CDS sequence (wt) from hemagglutinin__InfluenzaA__ABW91372

SEQ ID NO: 34193 - RNA, 1698 nt, Artificial Sequence; identical to SEQ ID NO: 33959
  derived and/or modified CDS sequence (wt) from hemagglutinin__InfluenzaA__ABW91383

SEQ ID NO: 34194 - RNA, 1701 nt, Artificial Sequence
  derived and/or modified CDS sequence (wt) from hemagglutinin__InfluenzaA__ABW91394
augaagacuaucauugcuuugagcuacauucuaugucugguuuucgcucaaaaacuuccuggaaaugacaacagcacggcaacgcugugccuugggcaccaugcaguaccaaacggaacgauagugaaaacaaucacgaaugaccaaauugaaguuacuaaugcuacugagcugguucagaguuccucaacaggugaaauaugcgacaguccucaucagauccuugauggagaaaacugcacacuaauagaugcucuauugggagacccucagugugauggcuuccaaaauaagaaaugggaccuuuuuguugaacgcagcaaagccuacagcaacuguuacccuuaugaugugccggauuaugccucccuuaggucacuaguugccucauccggcacacuggaguuuaacaaugaaagcuucaauuggacuggagucacucaaaacggaacaagcucugcuugcauaaggagaucuaauaacaguuucuuuaguagauugaauugguugacccacuuaaaauucaaauacccagcauugaacgugacuaugccaaacaaugaaaaauuugacaaauuguacauuugggggguucaccacccggguacggacaaugaccaagucuuccuguaugcucaagcaucaggaagaaucacagucucuaccaaaagaagccaacaaacuguaaucccgaauaucggaucuagacccagaguaaggaauauccccagcagaauaagcaucuauuggacaauaguaaaaccgggagacauacuuuugauuaacagcacagggaaucuaauugcuccuagggguuacuucaaaauacgaagugggaaaagcucaauaaugagaucagaugcacccauuggcaaaugcaauucugaaugcaucacuccaaauggaagcauucccaaugacaaaccauuccaaaauguaaacaggaucacauacggggccugucccagauauguuaagcaaaacacucugaaauuggcaacagggaugcgaaauguaccagagaaacaaacuagaggcauauuuggcgcaaucgcagguuucauagaaaaugguugggagggaaugguggaugguugguacgguuucaggcaucaaaauucugagggaauaggacaagcagcagaucucaaaagcacucaagcagcaaucgaucaaaucaaugggaagcugaauagguugaucgggaaaaccaacgagaaauuccaucagauugaaaaagaauucucagaagucgaagggagaauucaggaccuugagaaauauguugaggacaccaaaauagaucucuggucauacaacgcggagcuucuuguugcccuggagaaccaacauacaauugaucuaacugacucagaaaugaacaaacuguuugaaaaaacaaagaagcaacugagggaaaaugcugaggauaugggcaaugguuguuucaaaauauaccacaaaugugacaaugccugcauaggaucaaucagaaauggaacuuaugaccacgauguauacagagaugaagcauuaaacaaccgguuccagaucaagggcguugagcugaagucaggauacaaagauuggauccuauggauuuccuuugccauaucauguuuuuugcuuuguguugcuuuguugggguucaucaugugggccugccaaaaaggcaacauuaggugcaacauuugcauuuga

SEQ ID NO: 34195 - RNA, 1698 nt, Artificial Sequence; identical to SEQ ID NO: 34093
  derived and/or modified CDS sequence (wt) from hemagglutinin__InfluenzaA__ABW91405

SEQ ID NO: 34196 - RNA, 1698 nt, Artificial Sequence
  derived and/or modified CDS sequence (wt) from hemagglutinin__InfluenzaA__ABW91416
augaaaguaaaacuacuuguucuguuauguacauuuacagcuacauaugcagacacaauauguauaggcuaccaugccaacaacucgaccgacacuguugacacaguacuugagaagaaugugacagugacacacucugucaaccuacuugaggacagucacaauggaaaacuaugucuacuaaaaggaauagccccacuacaauuggguaauugcagcguugccggauggaucuuaggaaacccagaaugcgaauuacugauuuccaaggaaucaugguccuacauuguagaaacaccaaauccugagaauggaacauguuacccaggauauuucgccgacuaugaggagcugagggagcaauugaguucaguaucuucauuugagagguucgaaauauuccccaaagagagcucauggcccaaccacaccguaaccggaguaucagcaucaugcucccauaacgggaaaagcaguuuuuacagaaauuugcuauggcugacggggaagaaugguuuguauccaaaccugagcaaguccuaugcaaacaacaaagagaaagaaguccuuguacugugggguguucaucacccgccuaacauaggggaccaaaaggcccucuaucauacagaaaaugcuuaugucucuguagugucuucacauuauagcagaagauucaccccagaaauagccaaaagacccaaggugagagaucaggaaggaagaaucaacuacuacuggacucugcuggaacccggggauacaauaauauuugaggcaaauggaaaucuaauagcgccaagguuugcuuucgcacugaguagaggcuuuggaucaggaaucaucaccucaaaugcaccaaugggugaaugugaugcgaagugucaaacaccucagggagcuauaaacaguagucuuccuuuccagaauguacacccagucacaauaggagaguguccaaaguaugucaggagugcaaaauuaagaaugguuacaggacuaaggaacaucccauccauucaauccagagguuuguuuggagccauugccgguuucauugaagggggguggacuggaaugguagaugguugguaugguuaucaccaucagaaugagcaaggaucuggguaugcugcagaucaaaaaagcacacaaaaugccauuaacgggauuacaaacaaggugaauucuguaauugagaaaaugaacacucaauucacagcugugggcaaagaauucaacaaauuggaaaggaggauggaaaacuuaaauaaaaagguugaugauggguuucuagacauuuggacauauaacgcagaauuguugguucuacuggaaaaugaaaggacuuuggacuuccaugacuccaacgugaagaaucuguaugagaaaguaaaaagccaauuaaagaauaaugccaaagaaauaggaaacggguguuuugaauucuaucacaaguguaacgaugaaugcauggagagugugaaaaauggaacuuaugacuauccaaaauauuccgaagaaucaaaguugaacagggagaaaauugauggagugaaauuggaaucaaugggagucuaucagauucuggcgaucuacucaacagucgccaguucccugguucuuuuggucucccugggggcaaucagcuucuggauguguuccaaugggucuuugcaguguagaauaugcaucuaa

SEQ ID NO: 34197 - RNA, 1698 nt, Artificial Sequence
  derived and/or modified CDS sequence (wt) from hemagglutinin__InfluenzaA__ABW91427
augaaaguaaaacuacuuguucuguuauguacauuuacagcuacauaugcagacacaauauguauaggcuaccaugccaacaacucgaccgacacuguugacacaguacuugagaagaaugugacagugacacacucugucaaccuacuugaggacagucacaauggaaaacuaugucuacuaaaaggaauagccccacuacaauuggguaauugcagcguugccggauggaucuuaggaaacccagaaugcgaauuacugauuuccaaggaaucaugguccuacauuguagaaacaccaaauccugagaauggaacauguuacccaggauauuucgccgacuaugaggagcugagggagcaauugaguucaguaucuucauuugagagguucgaaauauuccccaaagagagcucauggcccaaccacaccguaaccggaguaucagcaucaugcucccauaacgggaaaagcaguuuuuacagaaauuugcuauggcugacggggaagaaugguuuguauccaaaccugagcaaguccuaugcaaacaacaaagagaaagaaguccuuguaaugugggguguucaucacccgccuaacauaggggaccaaagggcccucuaucauacagaaaaugcuuaugucucuguagugucuucacauuauagcagaagauucaccccagaaauagccaaaagacccaaggugagagaucaggaaggaagaaucaacuacuacuggacucugcuggaacccggggauacaauaauauuugaggcaaauggaaaucuaauagcgccaagguuugcuuucgcacugaguagaggcuuuggaucaggaaucaucaccucaaaugcaccaaugggugaaugugaugcgaagugucaaacaccucagggagcuauaaacaguagucuuccuuuccagaauguacacccagucacaauaggagaguguccaaaguaugucaggagugcaaaauuaagaaugguuacaggacuaaggaacaucccauccauucaauccagagguuuguuuggagccauugccgguuucauugaagggggguggacuggaaugguagaugguugguaugguuaucaccaucagaaugagcaaggaucuggguaugcugcagaucaaaaaagcacacaaaaugccauuaacgggauuacaaacaaggugaauucuguaauugagaaaaugaacacucaauucacagcugugggcaaagaauucaacaaauuggaaagaaggauggaaaacuuaaauaaaaagguugaugauggguuucuagacauuuggacauauaacgcagaauuguuaguucuacuggaaaaugaaaggacuuuggacuuccaugacuccaaugugaagaaucuguaugagaaaguaaaaagccaauuaaagaauaaugccaaagaaauaggaaacggguguuuugaauucuaucacaaguguaacgaugaaugcauggagagugugaaaaauggaacuuaugacuauccaaaauauuccgaagaaucaaaguugaacagggagaaaauugauggagugaaauuggaaucaaugggagucuaucagauucuggcgaucuacucaacagucgccaguucccugguucuuuuggucucccugggggcaaucagcuucuggauguguuccaaugggucuuugcaguguagaauaugcaucuaa

SEQ ID NO: 34198 - RNA, 1701 nt, Artificial Sequence; identical to SEQ ID NO: 33940
  derived and/or modified CDS sequence (wt) from hemagglutinin__InfluenzaA__ABW91438

SEQ ID NO: 34199 - RNA, 1698 nt, Artificial Sequence; identical to SEQ ID NO: 34085
  derived and/or modified CDS sequence (wt) from hemagglutinin__InfluenzaA__ABW91449

SEQ ID NO: 34200 - RNA, 1698 nt, Artificial Sequence
  derived and/or modified CDS sequence (wt) from hemagglutinin__InfluenzaA__ABW91460
augaaagugaaacuacugguucuguuauguacauuuacagcuacauaugcagacacaauauguauaggcuaccaugccaacaacucgaccgacacuguugacacaguacuugagaagaaugugacagugacacacucugucaaccuacuugaggaccgucacaauggaaaacuaugucuacuaaaaggaauagccccacuacaauuggguaauugcagcguugccggauggaucuuaggaaacccagaaugcgaauuacugauuuccaaggaaucaugguccuacauuguagaaacaccaaauccugagaauggaacauguuacccaggguauuucgccgacuaugaggagcugagggagcaauugaguucaguaucuucauuugagagguucgaaauauuccccaaagagagcucauggcccaaccacaccguaaccggaguaucagcaucaugcucccauaacgggaaaagcaguuuuuacagaaauuugcuauggcugacgggaaagaaugguuuguacccaaaccugagcagauccuaugcaaacaacaaagaaaaagaaguccuuguacugugggguguucaucacccgccuaacauaggggaccaaagggcccucuaucauacagaaaaugcuuaugucucuguagugucuucacauuauagcagaagauucaccccagaaauagccaaaagacccaaggugagagaucaggaaggaagaaucaauuacuacuggacucuacuggaacccggggauacaauaauauuugaggcaaaugggaaucuaauagcgccaagguuugcuuucgcacugaguagaggcuuuggaucaggaaucaucaccucaaaugcaccaauggaugaaugugaugcgaagugucaaacaccucagggagcuauaaacaguagucuuccuuuccagaauguacacccagucacaauaggagaguguccaaaguaugucaggagugcaaaauuaagaaugguuacaggacuaaggaacaucccauccauucaauccagagguuuguuuggagccauugccgguuucauugaagggggguggacuggaaugguagaugguugguaugguuaucaccaccagaaugagcaaggaucuggguaugcugcagaucaaaaaagcacacaaaaugccauuaacgggauuacaaacaaggugaauucugugauugagaaaaugaacacucaauucacagcugugggcaaagaauucaacaaauuggaaagaagaauggaaaacuuaaauaaaaaaguugaugauggguuucuagacauuuggacguauaacgcagaauuguugguucuacuggaaaaugaaaggacuuuggacuuccaugacuccaacgugaagaaucuguaugagaaaguaaaaagccaauuaaagaauaaugccaaagaaauaggaaacggguguuuugaauucuaucacaaguguaacgaugaaugcauggagagugugaaaaauggaacuuaugacuauccaaaauauuccgaagaaucaaaguuaaacagggagaaaauugauggagugaaauuggaaucaaugggagucuaucagauucuggcgaucuacucaacagucgccaguucccugguucuuuuggucucccugggggcaaucagcuucuggauguguuccaaugggucuuugcaguguagaauaugcaucuaa

SEQ ID NO: 34201 - RNA, 1698 nt, Artificial Sequence
  derived and/or modified CDS sequence (wt) from hemagglutinin__InfluenzaA__ABW91471
augaaaguaaaacuacugguucuguuauguacauuuacagcuacauaugcagacacaauauguauaggcuaccaugccaacaacucgaccgacacuguugacacaguacuugagaagaaugugacagugacacacucugucaaccuacuugaggacagucacaauggaaaacuaugucuacuaaaaggaguagccccacuacaauuggguaauugcagcguugccggauggaucuuaggaaacccagaaugcgaauuacugauuuccaaggaaucaugguccuacauuguagagacaccaaauccugagaauggaacauguuacccaggguauuucgccgacuaugaggagcugagagagcaauugaguucaguaucuucauuugagagguucgaaauauuccccaaagagagcucauggcccaaccacaccguaaccggaguaucagcaucaugcucccauaacgggaaaagcaguuuuuacagaaauuugcuauggcugacggggaagaaugguuuguauccaaaccugagcaaguccuaugcaaacaacaaagagaaagaaguccuuguacugugggguguucaucacccgccuaacauaggggaccaaagggcccucuaucauacagaaaaugcuuaugucucuguagugucuucacauuauagcagaagauucaccccagaaauagccaaaagacccaaggugagagaucaggaaggaagaaucaacuacuacuggacucugcuugaacccggggauacaauaauauuugaggcaaauggaaaucuaauagcgccaagguuugcuuucgcacugaguagaggcuuuggaucaggaaucaucaccucaaaugcaccaauggaugaaugugaugcgaaaugucaaacaccucagggagcuauaaacagcagucuuccuuuccagaauguacacccagucacaauaggagaguguccaaaguaugucaggaguacaaaauuaagaaugguuacaggacuaaggaacaucccauccauucaauccagagguuuguuuggagccauugccgguuucauugaagggggguggacuggaaugguagaugguugguaugguuaucaccaucagaaugagcaaggaucuggguaugcugcagaucaaaaaagcacacaaaaugccauuaacgggauuacaaacaaggugaauucuguaauugagaaaaugaacacucaauucacagcugugggcaaagaauucaacaaauuggaaagaaggauggaaaacuuaaauaaaaaaguugaugauggguuucuagacauuuggacauauaacgcagaauuguugguucuacuggaaaaugaaaggacuuuggacuuccaugacuccaacgugaagaaucuguaugagaaaguaaaaagccaauuaaagaauaaugccaaagaaauaggaaacggguguuuugaauucuaucacaaguguaacgaugaaugcauggagagugugaaaaauggaacuuaugacuauccaaaauauuccgaagaaucaaaguugaacagggagaaaauugauggagugaaauuggaaucaaugggagucuaucagauuuuggcgaucuacucaacagucgccaguucccugguucuuuuggucucccugggggcaaucagcuucuggauguguuccaaugggucuuugcaguguagaauaugcaucuaa

SEQ ID NO: 34202 - RNA, 1698 nt, Artificial Sequence
  derived and/or modified CDS sequence (wt) from hemagglutinin__InfluenzaA__ABW91482
augaaagugaaacuacugguucuguuauguacauuuacagcuacauaugcagacacaauauguauaggcuaccaugccaacaacucgaccgacacuguugacacaguacuugagaagaaugugacagugacacacucugucaaccuacuugaggaccgucacaauggaaaacuaugucuacuaaaaggaauagccccacuacaauuggguaauugcagcguugccggauggaucuuaggaaacccagaaugcgaauuacugauuuccaaggaaucaugguccuacauuguagaaacaccaaauccugagaauggaacauguuacccaggguauuucgccgacuaugaggagcugagggagcaauugaguucaguaucuucauuugagagguucgaaauauuccccaaagagagcucauggcccaaccacaccguaaccggaguaucagcaucaugcucccauaacgggagaagcaguuuuuacagaaauuugcuauggcugacgggaaagaaugguuuguacccaaaccugagcagauccuaugcaaacaacaaagagaaagaaguccuuguacugugggguguucaucacccgccuaacauaggggaccaaagggcccucuaucauacagaaaaugcuuaugucucuguagugucuucacauuauagcagaagauucaccccagaaauagccaaaagacccaaggugagagaucaggaaggaagaaucaauuacuacuggacucuacuggaacccggggauacaauaauauuugaggcaaaugggaaucuaauagcgccaagguuugcuuucgcacugaguagaggcuuuggaucaggaaucaucaccucaaaugcaccaauggaugaaugugaugcgaagugucaaacaccucagggagcuauaaacagcagucuuccuuuccagaauguacacccagucacaauaggagaguguccaaaguaugucaggagugcaaaauuaagaaugguuacaggacuaaggaacaucccauccauucaauccagagguuuguuuggagccauugccgguuucauugaagggggguggacuggaaugguagaugguugguaugguuaucaccaccagaaugagcaaggaucuggguaugcugcagaucaaaaaagcacacaaaaugccauuaacgggauuacaaacaaggugaauucugugauugagaaaaugaacacucaauucacagcugugggcaaagaauucaacaaauuggaaagaagaauggaaaacuuaaauaaaaaaguugaugauggguuucuagacauuuggacguauaacgcagaauuguugguucuacuggaaaaugaaaggacuuuggacuuccaugacuccaacgugaagaaucuguaugagaaaguaaaaagccaauuaaagaauaaugccaaagaaauaggaaacggguguuuugaauucuaucacaaguguaacgaugaaugcauggagagugugaaaaauggaacuuaugacuauccaaaauauuccgaagaaucaaaguuaaacagggagaaaauugauggagugaaauuggaaucaaugggagucuaucagauucuggcgaucuacucaacagucgccaguucccugguucuuuuggucucccugggggcaaucagcuucuggauguguuccaaugggucuuugcaguguagaauaugcaucuaa

SEQ ID NO: 34203 - RNA, 1698 nt, Artificial Sequence
  derived and/or modified CDS sequence (wt) from hemagglutinin__InfluenzaA__ABW91493
augaaaguaaaacuacugauucuguuauguacauuuacagcuacauaugcagacacaauauguauaggcuaccaugccaacaacucgaccgacacuguugacacaguacuugagaagaaugugacagugacacacucugucaaccuacuugaggacagucacaauggaaaacuaugucuacuaaaaggaauagccccacuacaauuggguaauugcagcguugccggauggaucuuaggaaacccagaaugcgaauuacugauuuccaaggaaucaugguccuacauuguagagacaccaaauccugagaauggaacauguuacccaggguauuucgccgacuaugaggagcugagagagcaauugaguucaguaucuucauuugagagguucgaaauauuccccaaagagagcucauggcccaaccacaccguaaccggaguaucagcaucaugcucccauaacgggaaaagcaguuuuuacagaaauuugcuauggcugacggggaagaaugguuuguauccaaaccugagcaaguccuaugcaaacaacaaagagaaagaaguccuuguacugugggguguucaucacccgccuaacauaggggaccaaagggcccucuaucauacagaaaaugcuuaugucucuguagugucuucacauuauagcagaagauucaccccagaaauagccaaaagacccaaggugagagaucaggaaggaagaaucaacuacuacuggacucugcuugaacccggggauacaauaauauuugaggcaaauggaaaucuaauagcgccaagguuugcuuucgcacugaguagaggcuuuggaucaggaaucaucaccucaaaugcaccaauggaugaaugugaugcgaaaugucaaacaccucagggagcuauaaacagcagucuuccuuuccagaauguacacccagucacaauaggagaguguccaaaguaugucaggaguacaaaauuaagaaugguuacaggacuaaggaacaucccauccauucaauccagagguuuauuuggagccauugccgguuucauugaagggggguggacuggaaugguagaugguugguaugguuaucaccaucagaaugagcaaggaucuggguaugcugcagaucaaaaaagcacacaaaaugccauuaacgggauuacaaacaaggugaauucuguaauugagaaaaugaacacucaauucacagcugugggcaaagaauucaacaaauuggaaaaaaggauggaaaacuuaaauaaaaaaguugaugauggguuucuagacauuuggacauauaacgcagaauuguugguucuacuggaaaaugaaaggacuuuggacuuccaugacuccaacgugaagaaucuguaugagaaaguaaaaagccaauuaaagaauaaugccaaagaaauaggaaacggguguuuugaauucuaucacaaguguaacgaugaaugcauggagagugugaaaaauggaacuuaugacuauccaaaauauuccgaagaaucaaaguugaacagggagaaaauugauggagugaaauuggaaucaaugggagucuaucagauuuuggcgaucuacucaacagucgccaguucccugguucuuuuggucucccugggggcaaucagcuucuggauguguuccaaugggucuuugcaguguagaauaugcaucuaa

SEQ ID NO: 34204 - RNA, 1698 nt, Artificial Sequence
  derived and/or modified CDS sequence (wt) from hemagglutinin__InfluenzaA__ABW91504
augaaaguaaaacuacuuguucuguuauguacauuuacagcuacauaugcagacacaauauguauaggcuaccaugccaacaacucgaccgacacuguugacacaguacuugagaagaaugugacagugacacacucugucaaccuacuugaggacagucacaauggaaaacuaugucuacuaaaaggaauagccccacuacaauuggguaauugcagcguugccggauggaucuuaggaaacccagaaugcgaauuacugauuuccaaggaaucaugguccuacauuguagaaacaccaaauccugagaauggaacauguuacccaggauauuucgccgacuaugaggagcugagggagcaauugaguucaguaucuucauuugagagguucgaaauauuccccaaagagagcucauggcccaaccacaccguaaccggaguaucagcaucaugcucccauaacgggaaaagcaguuuuuacagaaauuugcuauggcugacggggaagaaugguuuguauccaaaccugagcaaguccuaugcaaacaacaaagagaaagaaguccuuguacugugggguguucaucacccgccuaacauaggggaccaaagggcccucuaucauacagaaaaugcuuaugucucuguagugucuucacauuauagcagaagauucaccccagaaauagccaaaagacccaaggugagagaucaggaaggaagaaucaacuacuacuggacucugcuggaacccggggauacaauaauauuugaggcaaauggaaaucuaauagcgccaagguuugcuuucgcacugaguagaggcuuuggaucaggaaucaucaccucaaaugcaccaaugggugaaugugaugcgaagugucaaacaccucagggagcuauaaacaguagucuuccuuuccagaauguacauccagucacaauaggggaguguccaaaguaugucaggagugcaaaauuaagaaugguuacaggacuaaggaacaucccauccauucaauccagagguuuguuuggagccauugccgguuucauugaagggggguggacuggaaugguagaugguugguaugguuaucaccaucagaaugagcaaggaucuggguaugcugcagaucaaaaaagcacacaaaaugccauuaacgggauuacaaacaaggugaauucuguaauugagaaaaugaacacucaauucacagcugugggcaaagaauucaacaaauuggaaagaaggauggaaaacuuaaauaaaaagguugaugauggguuucuagacauuuggacauauaacgcagaauuguugguucuacuggaaaaugaaaggacuuuggacuuccaugacuccaacgugaagaaucuguaugagaaaguaaaaagccaauuaaagaauaaugccaaagaaauaggaaacggguguuuugaauucuaucacaaguguaacgaugaaugcauggagagugugaaaaauggaacuuaugacuauccaaaauauuccgaagaaucaaaguugaacagggagaaaauugauggagugaaauuggaaucaaugggagucuaucagauucuggcgaucuacucaacagucgccaguucccugguucuuuuggucucccugggggcaaucagcuucuggauguguuccaaugggucuuugcaguguagaauaugcaucuaa

SEQ ID NO: 34205 - RNA, 1698 nt, Artificial Sequence
  derived and/or modified CDS sequence (wt) from hemagglutinin__InfluenzaA__ABW91515
augaaagugaaacuacugguucuguuauguacauuuacagcuacauaugcagacacaauauguauaggcuaccaugccaacaacucgaccgacacuguugacacaguacuugagaagaaugugacagugacacacucugucaaccuacuugaggaccgucacaauggaaaacuaugucuacuaaaaggaauagccccacuacaauuggguaauugcagcguugccggauggaucuuaggaaacccagaaugcgaauuacugauuuccaaggaaucaugguccuacguuguagaaacaccaaauccugagaauggaacauguuacccaggguauuucgccgacuaugaggagcugagggagcaauugaguucaguaucuucauuugagagguucgaaauauuccccaaagagagcucauggcccaaccacaccguaaccggaguaucagcaucaugcucccauaacgggaaaagcaguuuuuacagaaauuugcuauggcugacgggaaagaaugguuuguacccaaaccugagcaaauccuaugcaaacaacaaagagaaagaaguccuuguacugugggguguucaucacccgccuaacauaggggaccaaagggcccucuaucauacagaaaaugcuuaugucucuguagugucuucacauuauagcagaagauucaccccagaaauagccaaaagacccaaggugagagaucaggaaggaagaaucaacuacuacuggacucuacuggaacccggggauacaauaauauuugaggcaaaugggaaucuaauagcgccaagguuugcuuucgcacugaguagaggcuuuggaucaggaaucaucaccucaaaugcaccaauggaugaaugugaugcgaagugucaaacaccucagggagcuauaaacagcagucuuccuuuccagaauguacacccagucacaauaggagaguguccaaaguaugucaggagugcaaaauuaagaaugguuacaggacuaaggaacaucccauccauucaauccagagguuuguuuggagccauugccgguuucauugaagggggguggacuggaaugguagaugguugguaugguuaucaccaccagaaugagcaaggaucuggguaugcugcagaucaaaaaagcacacaaaaugccauuaacgggauuacaaacaaggugaauucugugauugagaaaaugaacacucaauucacagcugugggcaaagaauucaacaaauuggaaagaagaauggaaaacuuaaauaaaaaaguugaugauggauuucuagacauuuggacguauaacgcagaauuguugguucuacuggaaaaugaaaggacuuuggacuuccaugacuccaacgugaagaaucuguaugagaaaguaaaaagccaauuaaagaauaaugccaaagaaauaggaaacggguguuuugaauucuaucacaaguguaacgaugaaugcauggagagugugaaaaauggaacuuaugacuauccaaaauauuccgaagaaucaaaguuaaacagggagaaaauugauggagugaaauuggaaucaaugggagucuaucagauucuggcgaucuacucaacagucgccaguucccugguucuuuuggucucccugggggcaaucagcuucuggauguguuccaaugggucuuugcaguguagaauaugcaucuaa

SEQ ID NO: 34206 - RNA, 1698 nt, Artificial Sequence
  derived and/or modified CDS sequence (wt) from hemagglutinin__InfluenzaA__ABW91526
augaaaguaaaacuacugguucuguuauguacauuuacagcuacauaugcagacacaauauguauaggcuaccaugccaacaacucgaccgacacuguugacacaguacuugagaagaaugugacagugacacacucugucaaccuacuugaggacagucacaauggaaaacuaugucuacuaaaaggaauagccccacuacaauuggguaauugcagcguugccggauggaucuuaggaaacccagaaugcgaauuacugauuuccaaggaaucaugguccuacauuguagaaacaccaaauccugagaauggaacauguuauccaggguauuucgccgacuaugaggagcugagagagcaauugaguucaguaucuucauuugagagguucgaaauauuccccaaagagagcucauggcccaaccacaccguaaccggaguaucagcaucaugcucccauaacgggaaaagcaguuuuuacagaaauuugcuauggcugacggggaagaaugguuuguauccaaaccugagcaaguccuaugcaaacaacaaagagaaagaaguccuuguacugugggguguucaucacccgccuaacauaggggaccaaagggcccucuaucauacagaaaaugcuuaugucucuguagugucuucacauuauagcagaagauucaccccagaaauagccaaaagacccaaggugagagagcaggaaggaagaaucaacuacuacuggacucugcuugaacccggggauacaauaauauuugaggcaaauggaaaucuaauagcgccaagguuugcuuucgcacugaguagaggcuuuggaucaggaaucaucaccucaaaugcaccaauggaugaaugugaugcgaaaugucaaacaccucagggagcuauaaacagcagucuuccuuuccagaauguacacccagucacaauaggagaguguccaaaguaugucaggaguacaagauuaagaaugguuacaggacuaaggaacaucccauccauucaauccagagguuuguuuggagccauugccgguuucauugaagggggguggacuggaaugguagaugguugguaugguuaucaccaucagaaugagcaaggaucuggguaugcugcagaucaaaaaagcacacaaaaugccauuaacgggauuacaaacaaggugaauucuguaauugagaaaaugaacacucaauucacagcugugggcaaagaauucaacaaauuggaaagaaggauggaaaacuuaaauaaaaaaguugaugauggguuucuagacauuuggacauauaacgcagaauuguugguucuacuggaaaaugaaaggacuuuggacuuccaugacuccaacgugaagaaucuguaugagaaaguaaaaagccaauuaaagaauaaugccaaagaaauaggaaacggguguuuugaauucuaucacaaguguaacgaugaaugcauggagagugugaaaaauggaacuuaugacuauccaaaauauuccgaagaaucaaaguugaacagggagaaaauugauggagugaaauuggaaucaaugggagucuaucagauuuuggcgaucuacucaacagucgccaguucccugguucuuuuggucucccugggggcaaucagcuucuggauguguuccaaugggucuuugcaguguagaauaugcaucuaa

SEQ ID NO: 34207 - RNA, 1698 nt, Artificial Sequence
  derived and/or modified CDS sequence (wt) from hemagglutinin__InfluenzaA__ABW91537
augaaaguaaaacuacugguucuguuauguacauuuacagcuacauaugcagacacaauauguauaggcuaccaugccaacaacucgaccgacacuguugacacaguacuugagaagaaugugacagugacacacucugucaaccuacuugaggacagucacaauggaaaacuaugucuacuaaaaggaauagccccacuacaauuggguaauugcagcguugccggauggaucuuaggaaacccagaaugcgaauuacugauuuccaaggaaucaugguccuacauuguagagacaccaaauccugagaauggaacauguuacccaggguauuucgccgacuaugaggagcugagagagcaauugaguucaguaucuucauuugagagguucgaaauauuccccaaagagagcucauggcccaaccacaccguaaccggaguaucagcaucaugcucccauaacgggaaaagcaguuuuuacagaaauuugcuauggcugacggggaaaaaugguuuguauccaaaccugagcaaguccuaugcaaacaacaaagagaaagaaguccuuguacugugggguguucaucacccgccuaacauaggggaccaaagggcccucuaucauacagaaaaugcuuaugucucuguagugucuucacauuauagcagaagauucaccccagaaauagccaaaagacccaaggugagagaucaggaaggaagaaucaacuacuacuggacucugcuugaacccggggauacaauaauauuugaggcaaauggaaaucuaauagcgccaagguuugcuuucgcacugaguagaggcuuuggaucaggaaucaucaccucaaaugcaccaauggaugaaugugaugcgaaaugucaaacaccucagggagcuauaaacagcagucuuccuuuccagaauguacacccagucacaauaggagaguguccaaaguaugucaggaguacaaaauuaagaaugguuacaggacuaaggaacaucccauccauucaauccagagguuuguuuggagccauugccgguuucauugaagggggguggacuggaaugguagaugguugguaugguuaucaccaucagaaugagcaaggaucuggguaugcugcagaucaaaaaagcacacaaaaugccauuaacgggauuacaaacaaggugaauucuguaauugagaaaaugaacacucaauucacagcugugggcaaagaauucaacaaauuggaaagaaggauggaaaacuuaaauaaaaaaguugaugauggguuucuagacauuuggacauauaacgcagaauuguugguucuacuggaaaaugaaaggacuuuggacuuccaugacuccaacgugaagaaucuguaugagaaaguaaaaagccaauuaaagaauaaugccaaagaaauaggaaacggguguuuugaauucuaucacaaguguaacgaugaaugcauggagagugugaaaaauggaacuuaugacuauccaaaauauuccgaagaaucaaaguugaacagggagaaaauugauggagugaaauuggaaucaaugggagucuaucagauuuuggcgaucuacucaacagucgccaguucccugguucuuuuggucucccugggggcaaucagcuucuggauguguuccaaugggucuuugcaguguagaauaugcaucuaa

SEQ ID NO: 34208 - RNA, 1701 nt, Artificial Sequence; identical to SEQ ID NO: 34092
  derived and/or modified CDS sequence (wt) from hemagglutinin__InfluenzaA__ABW91548

SEQ ID NO: 34209 - RNA, 1698 nt, Artificial Sequence
  derived and/or modified CDS sequence (wt) from hemagglutinin__InfluenzaA__ABW91559
augaaaguaaaacuacugauucuguuauguacauuuacagcuacauaugcagacacaauauguauaggcuaccaugccaacaacucgaccgacacuguugacacaguacuugagaagaaugugacagugacacacucugucaaccuacuugaggacagucacaauggaaaacuaugucuacuaaaaggaauagccccacuacaauuggguaauugcagcguugccggauggaucuuaggaaacccagaaugcgaauugcugauuuccaaggaaucaugguccuacauuguagagacaccaaauccugagaauggaacauguuacccaggguauuucgccgacuaugaggagcugagagagcaauugaguucaguaucuucauuugagagguucgaaauauuccccaaagagagcucauggcccaaccacaccguaaccggaguaucagcaucaugcucccauaacgggaaaagcaguuuuuacagaaauuugcuauggcugacggggaagaaugguuuguauccaaaccugagcaaguccuaugcaaacaacaaagagaaagaaguccuugugcugugggguguucaucacccgccuaacauaggggaccaaagggcccucuaucauacagaaaaugcuuaugucucuguagugucuucacauuauagcagaagauucaccccagaaauagccaaaagacccaaggugagagaucaggaaggaagaaucaacuacuacuggacucugcuugaacccggggauacaauaauauuugaggcaaauggaaaucuaauagcgccaagguuugcuuucgcacugaguagaggcuuuggaucaggaaucaucaccucaaaugcaccaauggaugaaugugaugcgaaaugucaaacaccucagggagcuauaaacagcagucuuccuuuccagaauguacacccagucacaauaggagaguguccaaaguaugucaggaguacaaaauuaagaaugguuacaggacuaaggaacaucccauccauucaauccagagguuuauuuggagccauugccgguuucauugaagggggguggacuggaaugguagaugguugguaugguuaucaccaucagaaugagcaaggaucuggguaugcugcagaucaaaaaagcacacaaaaugccauuaacgggauuacaaacaaggugaauucuguaauugagaaaaugaacacucaauucacagcugugggcaaagaauucaacaaauuggaaagaaggauggaaaacuuaaauaaaaaaguugaugauggguuucuagacauuuggacauauaacgcagaauuguugguucuacuggaaaaugaaaggacuuuggacuuccaugacuccaacgugaagaaucuguaugagaaaguaaaaagccaauuaaagaauaaugccaaagaaauaggaaacggguguuuugaauucuaucacaaguguaacgaugaaugcauggagagugugaaaaauggaacuuaugacuauccaaaauauuccgaagaaucaaaguuguacagggagaaaauugauggagugaaauuggaaucaaugggagucuaucagauuuuggcgaucuacucaacagucgccaguucccugguucuuuuggucucccugggggcaaucagcuucuggauguguuccaaugggucuuugcaguguagaauaugcaucuaa

SEQ ID NO: 34210 - RNA, 1698 nt, Artificial Sequence
  derived and/or modified CDS sequence (wt) from hemagglutinin__InfluenzaA__ABW91570
augaaaguaaaacuacugguucuguuauguacauuuacagcuacauaugcagacacaauauguauaggcuaccaugccaacaacucgaccgacacuguugacacaguacuugagaagaaugugacagugacacacucugucaaccuacuugaggacagucacaauggaaaacuaugucuacuaaaaggaauagccccacuacaauuggguaauugcagcguugccggauggaucuuaggaaacccagaaugcgaauuacugauuuccaaggaaucaugguccuacauuguagagacaccaaauccugagaauggaacauguuacccaggguauuucgccgacuaugaggagcugagagagcaauugaguucaguaucuucauuugagagguucgaaauauuccccaaagagagcucauggcccaaccacaccguaaccggaguaucagcaucaugcucccauaacgggagaagcaguuuuuacagaaauuugcuauggcugacggggaagaaugguuuguauccaaaccugagcaaguccuaugcaaacaacaaagagaaagaaguccuuguacugugggguguucaucacccgccuaacauaggggaccaaagggcccucuaucauacagaaaaugcuuauguuucuguagugucuucacauuauagcagaagauucaccccagaaauagccaaaagacccaaggugagagaucaggaaggaagaaucaacuacuacuggacucugcuugaacccggggauacaauaauauuugaggcaaauggaaaucuaauagcgccaagguuugcuuucgcacugaguagaggcuuuggaucaggaaucaucaccucaaaugcaccaauggaugaaugugaugcgaaaugucaaacaccucagggagcuauaaacagcagucuuccuuuccagaauguacacccagucacaauaggagaguguccaaaguaugucaggaguacaaaauuaagaaugguuacaggacuaaggaacaucccauccauucaauccagagguuuguuuggagccauugccgguuucauugaagggggguggacuggaaugguagaugguugguaugguuaucaccaucagaaugagcaaggaucuggguaugcugcagaucaaaaaagcacacaaaaugccauuaacgggauuacaaacaaggugaauucuguaauugagaaaaugaacacucaauucacagcugugggcaaagaauucaacaaauuggaaagaaggauggaaaacuuaaauaaaaaaguugaugauggguuucuagacauuuggacauauaacgcagaauuguugguucuacuggaaaaugaaaggacuuuggacuuccaugacuccaacgugaagaaucuguaugagaaaguaaaaagccaauuaaagaauaaugccaaagaaauaggaaacggguguuuugaauucuaucacaaguguaacgaugaaugcauggagagugugaaaaauggaacuuaugacuauccaaaauauuccgaagaaucaaaguugaacagggagaaaauugauggagugaaauuggaaucaaugggagucuaucagauuuuggcgaucuauucaacagucgccaguucccugguucuuuuggucucccugggggcaaucagcuucuggauguguuccaaugggucuuugcaguguagaauaugcaucuaa

SEQ ID NO: 34211 - RNA, 1698 nt, Artificial Sequence; identical to SEQ ID NO: 34079
  derived and/or modified CDS sequence (wt) from hemagglutinin__InfluenzaA__ABW91581

SEQ ID NO: 34212 - RNA, 1698 nt, Artificial Sequence; identical to SEQ ID NO: 33932
  derived and/or modified CDS sequence (wt) from hemagglutinin__InfluenzaA__ABW91592

SEQ ID NO: 34213 - RNA, 1698 nt, Artificial Sequence
  derived and/or modified CDS sequence (wt) from hemagglutinin__InfluenzaA__ABW91603
augaaagugaaacuacugguucuguuauguacauuuacagcuacauaugcagacacaauauguauaggcuaccaugccaacaacucgaccgacacuguugacacaguacuugagaagaaugugacagugacacacucugucaaccuacuugaggaccgucacaauggaaaacuaugucuacuaaaaggaauagccccacuacaauuggguaauugcagcguugccggauggaucuuaggaaacccagaaugcgaauuacugauuuccaaggaaucaugguccuacauuguagaaacaccaaauccugagaauggaacauguuacccaggguauuucgccgacuaugaggagcugagggagcaauugaguucaguaucuucauuugagagguucgaaauauuccccaaagagagcucauggcccaaccacaccguaaccggaguaucagcaucaugcucccauaacgggaaaagcaguuuuuacagaaauuugcuauggcugacgggaaagaaugguuuguacccaaaccugagcagauccuaugcaaacaacaaagagaaagaaguccuuguacugugggguguucaucacccgccuaacauaggggaccaaagggcccucuaucauacagaaaaugcuuaugucucuguagugucuucacauuauagcagaagauucaccccagaaauagccaaaagacccaaggugagagaucaggaaggaagaaucaauuacuacuggacucuacuggaacccggggauacaauaauauuugaggcaaaugggaaucuaauagcgccaagguuugcuuucgcacugaguagaggcuuuggaucaggaaucaucaccucaaaugcaccaauggaugaaugugaugcgaagugucaaacaccucagggagcuauaaacagcagucuuccuuuccagaauguacacccagucacaauaggagaguguccaaaguaugucaggagugcaaaauuaagaaugguuacaggacuaaggaacaucccauccauucaauccagagguuuguuuggagccauugccgguuucauugaagggggguggacuggaaugguagaugguugguaugguuaucaccaccagaaugagcaaggaucuggguaugcugcagaucaaaaaagcacacaaaaugccauuaacgggauuacaaacaaggugaauucugugauugagaaaaugaacacucaauucacagcugugggcaaagaauucaacaaauuggaaagaagaauggaaaacuuaaauaaaaaaguugaugauggguuucuagacauuuggacguauaaugcagaauuguugguucuacuggaaaaugaaaggacuuuggacuuccaugacuccaacgugaagaaucuguaugagaaaguaaaaagccaauuaaagaauaaugccaaagaaauaggaaacggguguuuugaauucuaucacaaguguaacgaugaaugcauggagagugugaaaaauggaacuuaugacuauccaaaauauuccgaagaaucaaaguuaaacagggagaaaauugauggagugaaauuggaaucaaugggagucuaucagauucuggcgaucuacucaacagucgccaguucccugguucuuuuggucucccugggggcaaucagcuucuggauguguuccaaugggucuuugcagugcagaauaugcaucuaa

SEQ ID NO: 34214 - RNA, 1698 nt, Artificial Sequence
  derived and/or modified CDS sequence (wt) from hemagglutinin__InfluenzaA__ABW91614
augaaaguaaaacuacuuguucuguuauguacauuuacagcuacauaugcagacacaauauguauaggcuaccaugccaacaacucgaccgacacuguugacacaguacuugagaagaaugugacagugacacacucugucaaccuacuugaggacagucacaauggaaaacuaugucuacuaaaaggaauagccccacuacaauuggguaauugcagcguugccggauggaucuuaggaaacccagaaugcgaauuacugauuuccaaggaaucaugguccuacauuguagaaacaccaaguccugagaauggaacauguuacccaggauauuucgccgacuaugaggagcugagggagcaauugaguucaguaucuucauuugagagguucgaaauauuccccaaagagagcucauggcccaaccacacaguaaccggaguaucagcaucaugcucccauaacgggaaaagcaguuuuuacagaaauuugcuauggcugacggggaagaaugguuuguauccaaaccugagcaaguccuaugcaaacaacaaagagaaagaaguccuuguacugugggguguucaucacccgccuaacauaggggaccaaagggcccucuaucauacagaaaaugcuuaugucucuguagugucuucacauuauagcaggagauucaccccagaaauagccaaaagacccaaggugagagaucaggaaggaagaaucaacuacuacuggacucugcuggaacccggggauacaauaauauuugaggcaaauggaaaucuaauagcgccaagguuugcuuucgcacugaguagaggcuuuggaucaggaaucaucagcucaaaugcaccaaugggugaaugugaugcgaagugucaaacaccucagggagcuauaaacaguagucuuccuuuccagaauguacacccagucacaauaggagaguguccaaaguaugucaggagugcaaaauuaagaaugguuacaggacuaaggaacaucccauccauucaauccagagguuuguuuggagccauugccgguuucauugaagggggguggacuggaaugguagaugguugguaugguuaucaccaucagaaugagcaaggaucuggguaugcugcagaucaaaaaagcacacaaaaugccauuaacgggauuacaaacaaggugaauucuguaauugagaaaaugaacacucaauucacagcugugggcaaagaauucaacaaauuggaaagaaggauggaaaacuuaaauaaaaagguugaugauggguuucuagacauuuggacauauaacgcagaauuguugguucuacuggaaaaugaaaggacuuuggacuuccaugacuccaacgugaagaaucuguaugagaaaguaaaaagccaauuaaagaauaaugccaaagaaauaggaaacggguguuuugaauucuaucacaaguguaacgaugaaugcauggagagugugaaaaauggaacuuaugacuauccaaaauauuccgaagaaucaaaguugaacagggagaaaauugauggagugaaauuggaaucaaugggagucuaucagauucuggcgauuuacucaacagucgccaguucccugguucuuuuggucucccugggggcaaucagcuucuggauguguuccaaugggucuuugcaguguagaauaugcaucuaa

SEQ ID NO: 34215 - RNA, 1698 nt, Artificial Sequence
  derived and/or modified CDS sequence (wt) from hemagglutinin__InfluenzaA__ABW91625
augaaaguaaaacuacugguucuguuauguacauuuacagcuacauaugcagacacaauauguauaggcuaccaugccaacaacucgaccgacacuguugacacaguacuugagaagaaugugacagugacacacucugucaaccuacuugaggacagucacaauggaaaacuaugucuacuaaaaggaauagccccacuacaauuggguaauugcagcguugccggauggaucuuaggaaacccagaaugcgaauuacugauuuccaaggaaucaugguccuacauuguagagacaccaaauccugagaauggaacauguuacccagggaauuucgccgacuaugaggagcugagagagcaauugaguucaguaucuucauuugagagguucgaaauauuccccaaagagagcucauggcccaaccacaccguaaccggaguaucagcaucaugcucccauaacgggaaaagcaguuuuuacagaaauuugcuauggcugacgggaaagaaugguuuguauccaaaccugagcaaguccuaugcaaacaacaaagagaaagaaguccuuguacugugggguguucaucacccgccuaacauaggggaccaaagggcccucuaucauacagaaaaugcuuaugucucuguagugucuucacauuauagcagaagauucaccccagaaauagccaaaagacccaaggugagagaucaggaaggaagaaucaacuacuacuggacucugcuugaacccggggauacaauaauauuugaggcaaauggaaaucuaauagcgccaagguuugcuuucgcacugaguagaggcuuuggaucaggaaucaucaccucaaaugcaccaauggaugaaugugaugcgaaaugucaaacaccucagggagcuauaaacagcagccuuccuuuccagaauguacacccagucacaauaggagaguguccaaaguaugucaggagugcaaaauuaagaaugguuacaggacuaaggaauaucccauccauucaauccagagguuuguuuggagccauugccgguuucauugaagggggguggacuggaaugguagaugguugguaugguuaucaccaucagaaugagcaaggaucuggguaugcugcagaucaaaaaagcacacaaaaugccauuaacgggauuacaaacaaggugaauucuguaauugagaaaaugaacacucaauucacagcugugggcaaagaauucaacaaauuggaaagaaggauggaaaacuuaaauaaaaaaguugaugauggguuucuagacauuuggacauauaacgcagaauuguugguucuacuggaaaaugaaaggacuuuggacuuccaugacuccaacgugaagaaucuguaugagaaaguaaaaagccaauuaaagaauaaugccaaagaaauaggaaacggguguuuugaauucuaucacaaauguaacgaugaaugcauggagagugugaaaaauggaacuuaugacuauccaaaauauuccgaagaaucaaaguugaacagggagaaaauugauggagugaaauuggaaucaaugggagucuaucagauuuuggcgaucuacucaacagucgccaguucccugguucuuuuggucucccugggggcaaucagcuucuggauguguuccaaugggucuuugcaguguagaauaugcaucuaa

SEQ ID NO: 34216 - RNA, 1698 nt, Artificial Sequence; identical to SEQ ID NO: 34189
  derived and/or modified CDS sequence (wt) from hemagglutinin__InfluenzaA__ABW91636

SEQ ID NO: 34217 - RNA, 1701 nt, Artificial Sequence; identical to SEQ ID NO: 33999
  derived and/or modified CDS sequence (wt) from hemagglutinin__InfluenzaA__ABW91647

SEQ ID NO: 34218 - RNA, 1707 nt, Artificial Sequence
  derived and/or modified CDS sequence (wt) from hemagglutinin__InfluenzaA__ABX10515
auggagaaaauagugcuucuuuuugcaauagucagucuuguuaaaagugaucagauuugcauugguuaccaugcaaacaacucgacagagcagguugacacaauaauggaaaagaacguuacuguuacacaugcccaagacauacuggaaaagacacacaacgggaagcucugcgaucuagauggagugaagccucuaauuuugagagauuguaguguagcuggauggcuccucggaaacccaaugugugacgaauucaucaaugugccggaauggucuuacauaguggagaaggccaauccagucaaugaccucuguuacccaggggauuucaaugacuaugaagaauugaaacaccuauugagcagaauaaaccauuuugagaaaauucagaucauccccaaaaguucuugguccagucaugaagucucauuaggggugagcucagcauguccauaccagggaaaguccuccuuuuucagaaaugugguauggcuuaucaaaaagaacaguacauacccaacaauaaagaggagcuacaauaauaccaaccaagaagaucuuuugguacugugggggauucaccauccuaaugaugcggcagagcagacaaagcucuaucaaaacccaaccaccuauauuuccguugggacaucaacacuaaaccagagauugguaccaagaauagcuacuagauccaaaguaaacgggcaaaguggaaggauggaguucuucuggacaauuuuaaaaccgaaugaugcaaucaacuucgagaguaauggaaauuucauugcuccagaauaugcauacaaaauugucaagaaaggggacucaacaauuaugaaaagugaauuggaauaugguaacugcaacaccaagugucaaacuccaaugggggcgauaaacucuaguaugccauuccacaauauacacccucucaccaucggggaaugccccaaauaugugaaaucaaacagauuaguccuugcgacugggcucagaaauagcccucaaagagagagaagaagaaaaaagagaggauuauuuggagcuauagcagguuuuauagagggaggauggcagggaaugguagaugguugguauggguaccaccauagcaaugagcaggggaguggguacgcugcagacaaagaauccacucaaaaggcaauagauggagucaccaauaaggucaacucgaucauugacaaaaugaacacucaguuugaggccguuggaagggaauuuaacaacuuagaaaggagaauagagaauuuaaacaagaagauggaagacggguuccuagaugucuggacuuauaaugcugaacuucugguucucauggaaaaugagagaacucuagacuuucacgacucaaaugucaagaaccuuuacgacaagguccgacuacagcuuaaggauaaugcaaaggagcuggguaacgguuguuucgaguucuaucauaaaugugauaaugaauguauggaaaguguaagaaacggaacguaugacuacccgcaguauucagaagaagcaagacuaaaaagagaggaaauaaguggaguaaaauuggaaucaauaggaauuuaccaaauacugucaauuuauucuacaguggcgaguucccuagcacuggcaaucaugguagcuggucuauccuuauggaugugcuccaaugggucguuacaaugcagaauuugcauuuaa

SEQ ID NO: 34219 - RNA, 1701 nt, Artificial Sequence
  derived and/or modified CDS sequence (wt) from hemagglutinin__InfluenzaA__ABX10525
augaagacuaucauugcuuugagcuacauucuaugucugguuuucgcucaaaagcuucccggaaaugacaacagcacggcaacgcugugccuugggcaccaugcaguaccaaacggaacgauagugaaaacaaucacgaaugaccaaauugaaguuacuaaugcuacugagcugguucagaguuccucaacagguggaauaugcgacaguccucaucagauccuugauggagaaaacugcacacuaauagaugcucuauugggagacccucagugugauggcuuccaaaauaagaaaugggaccuuuuuguugaacgcagcaaagccuacagcaacuguuacccuuaugaugugccggauuaugccucccuuaggucacuaguugccucauccggcacacuggaguuuaacaaugaaagcuucaauugggcuggagucacucagaauggaacaagcucugcuugcaaaaggagaucuaauaaaaguuucuuuaguagauugaauugguugacccacuuaaaauacaaauacccagcauugaacgugacuaugccaaacaaugaaaaauuugacaaauuguacauuugggggguucaccacccggguacggacagugaccaaaucagccuauaugcucaagcaucaggaagaaucacagucucuaccaaaagaagccaacaaacuguaaucccgaauaucggaucuagacccaggguaagggaugucuccagcagaauaagcaucuauuggacaauaguaaaaccgggagacauacuuuugauuaacagcacaggaaaucuaauugcuccucgggguuacuucaaaauacgaagugggaaaagcucaauaaugagaucagaugcacccauuggcaaaugcaauucugaaugcaucacuccaaauggaagcauucccaaugacaaaccauuucaaaauguaaacaggaucacauauggggccugucccagauauguuaagcaaaacacucugaaauuggcaacagggaugcgaaauguaccagagaaacaaacuagaggcauauuuggcgcaaucgcggguuucauagaaaaugguugggagggaaugguggacgguugguacgguuucaggcaucaaaauucugagggcacaggacaagcagcagaucucaaaagcacucaagcagcaaucaaccaaaucaaugggaaacugaauagguuaaucgggaaaacaaacgagaaguuccaucagauugaaaaagaauucucagaaguagaagggagaauucaggaccucgagaaauauguugaggacacuaaaauagaucucuggucauacaacgcggagcuucuuguugcccuggaaaaccaacauacaauugaucuaacugacucagaaaugaacaaacuguuugaaagaacaaagaagcaacugagggaaaaugcugaggauaugggcaaugguuguuucaaaauauaccacaaaugugacaaugccugcauagagucaaucagaaauggaacuuaugaccaugauguauacagagaugaagcauuaaacaaccgguuccagaucaaagguguugagcugaagucaggauacaaagauuggauccuauggauuuccuuugccauaucauguuuuuugcuuuguguugcuuuguugggguucaucaugugggccugccaaaaaggcaacauuaggugcaacauuugcauuuga

SEQ ID NO: 34220 - RNA, 1698 nt, Artificial Sequence; identical to SEQ ID NO: 33950
  derived and/or modified CDS sequence (wt) from hemagglutinin__InfluenzaA__ABX58239

SEQ ID NO: 34221 - RNA, 1698 nt, Artificial Sequence
  derived and/or modified CDS sequence (wt) from hemagglutinin__InfluenzaA__ABX58250
augaaaguaaaacuacugguucuguuauguacauuuacagcuacauaugcagacacaauauguauaggcuaccaugccaacaauucaaccgacacuguugacacagugcuugagaagaaugugacagugacacacucugucaaccuacuugaggacagucacaauggaaaacuaugucuacuaaaaggaauagccccacuacaauuggguaauugcagcguugccggauggaucuuaggaaacccagaaugcgaauuacugauuuccaaggaaucaugguccuacauuguagaaacaccaaauccugagaauggaacauguuacccaggguauuucgccgacuaugaggagcugagggagcaauugaguucaguaucuucauuugagagguucgaaauauuccccaaagagaacucauggcccaaccacaccguaaccggaguaucagcaucaugcucccauaacgggaaaagcaguuuuuacagaaauuugcuauggcugacggggaagaaugguuuguacccaaaccugagcaaguccuaugcaaacaacaaagagaaagaaguccuuguacuaugggguguucaucacccgccuaacauaggggaccaaagggcccucuaucauacagaaaaugcuuaugucucuguagugucuucacauuauagcagaagauucaccccagaaauagccaaaagacccaaggugagagaucaggaaggaagaaucaacuacuacuggacucugcuggaacccggggauacaauaauauuugaggcaaauggaaaucuaauagcgccaagguuugcuuucgcacugaguagaggcuugggaucaggaaucaucaccucaaaugcaccaauggaugaaugugaugcgaaaugucaaacaccucagggagcuauaaacagcagucuuccuuuccagaauguacacccagucacaauaggagagugucccaaguaugucaggagugcaaaauuaaggaugguuacaggacuaaggaacaucccauccauucaauccagagguuuguuuggagccauugccgguuucauugaagggggguggacuggaaugguagaugguugguaugguuaucaucaucagaaugagcaaggaucuggguaugcugcagaucaaaaaagcacacaaaaugccauuaacgggauuacaaacaaggugaauucuguaauugagaaaaugaacacucaauucacagcugugggcaaagaauucaacaaauuggaaagaaggauggaaaacuuaaauaaaaaaguugaugauggguuucuagacauuuggaccuauaaugcagaauuguugguucuacuggaaaaugaaaggacuuuggauuuccaugacuccaacgugaagaaucuguaugagaaaguaaaaagccaauuaaagaauaaugccaaagaaauaggaaacggguguuuugaauucuaucacaaguguaacgaugaaugcauggagagugugaaaaauggaacuuaugacuauccaaaauauuccgaagaaucaaaguugaacagggagaaaauugauggagugaaauuggaaucaaugggagucuaucagauucuggcgaucuacucaacagucgccaguucccugguucuuuuggucucccugggggcaaucagcuucuggauguguuccaaugggucuuugcaguguagaauaugcaucuaa

SEQ ID NO: 34222 - RNA, 1698 nt, Artificial Sequence
  derived and/or modified CDS sequence (wt) from hemagglutinin__InfluenzaA__ABX58261
augaaaguaaaacuacugauucuguuauguacauuuacagcuacauaugcagacacaauauguauaggcuaccaugccaacaacucgaccgacacuguugacacaguacuugagaagaaugugacagugacacacucugucaaccuacuugaggacagucacaauggaaaacuaugucuacuaaaaggaauagccccacuacaauuggguaauugcagcguugccggauggaucuuaggaaacccagaaugcgaauuacugauuuccaaggaaucaugguccuacauuguagagacaccaaauccugagaauggaacauguuacccaggguauuucgccgacuaugaggagcugagagagcaauugaguucaguaucuucauuugagagguucgaaauauuccccaaagagagcucauggcccaaccacaccguaaccggaguaucagcaucaugcucccauaacgggaaaagcaguuuuuacagaaauuugcuauggcugacggggaagaacgguuuguauccaaaccugagcaaguccuaugcaaacaacaaagagaaagaaguccuuguacugugggguguucaucacccgccuaacauaggggaccaaagggcccucuaucauacagaaaaugcuuaugucucuguagugucuucacauuauagcagaagauucaccccagaaauagccaaaagacccaaggugagagaucaggaaggaagaaucaacuacuacuggucucugcuugaacccggggauacaauaauauuugaggcaaauggaaaucuaauagcgccaagguuugcuuucgcacugaguagaggcuuuggaucaggaaucaucaccucaaaugcaccaauggaugaaugugaugcgaaaugucaaacaccucagggagcuauaaacagcagucuuccuuuccagaauguacacccagucacaauaggagaguguccaaaguaugucaggaguacaaaauuaagaaugguuacaggacuaaggaacaucccauccauucaauccagagguuuauuuggagccauugccgguuucauugaagggggguggacuggaaugguagaugguugguaugguuaucaccaucagaaugagcaaggaucuggguaugcugcagaucaaaaaagcacacaaaaugccauuaacgggauuacaaacaaggugaauucuguaauugagaaaaugaacacucaauucacagcugugggcaaagaauucaacaaauuggaaagaaggauggaaaacuuaaauaaaaaaguugaugauggguuucuagacauuuggacauauaacgcagaauuguugguucuacuggaaaaugaaaggacuuuggacuuccaugacuccaacgugaagaaucuguaugagaaaguaaaaagccaauuaaagaauaaugccaaagaaauaggaaacggguguuuugaauucuaucacaaguguaacgaugaaugcauggagagugugaaaaauggaacuuaugacuauccaaaauauuccgaagaaucaaaguugaacagggagaaaauugauggagugaaauuggaaucaaugggggucuaucagauuuuggcgaucuacucaacagucgccaguucccugguucuuuuggucucccugggggcaaucagcuucuggauguguuccaaugggucuuugcaguguagaauaugcaucuaa

SEQ ID NO: 34223 - RNA, 1698 nt, Artificial Sequence
  derived and/or modified CDS sequence (wt) from hemagglutinin__InfluenzaA__ABX58272
augaaaguaaaacuacugauucuguuauguacauuuacagcuacauaugcagacacaauauguauaggcuaccaugccaacaacucgaccgacacuguugacacaguacuugagaagaaugugacagugacacacucugucaaccuacuugaggacagucacaauggaaaacuaugucuacuaaaaggaauagccccacuacaauuggguaauugcagcguugccggauggaucuuaggaaacccagaaugcgaauuacugauuuccaaggaaucaugguccuacauuguagagacaccaaauccugagaauggaacauguuacccaggguauuucgccgacuaugaggagcugagagagcaauugaguucaguaucuucauuugagagguucgaaauauuccccaaaaagagcucauggcccaaccacaccguaaccggaguaucagcaucaugcucccauaacgggaaaagcaguuuuuacagaaauuugcuauggcugacggggaagaaugguuuguauccaaaccugagcaaguccuaugcaaacaacaaagagaaagaaguccuuguacugugggguguucaucacccgccuaacauaggggaccaaagggcccucuaucauacagaaaaugcuuaugucucuguagugucuucacauuauagcagaagauucaccccagaaauagccaaaagacccaaggugagagaucaggaaggaagaaucaacuacuacuggacucugcuugaacccggggauacaauaauauuugaggcaaauggaaaucuaauagcgccaagguuugcuuucgcacugaguagaggcuuuggaucaggaaucaucaccucaaaugcaccaauggaugaaugugaugcgaaaugucaaacaccucagggagcuauaaacagcagucuuccuuuccagaauguacacccagucacaauaggagaguguccaaaguaugucaggaguacaaaauuaagaaugguuacaggacuaaggaacaucccauccauucaauccagagguuuauuuggagccauugccgguuucauugaagggggguggacuggaaugguagaugguugguaugguuaucaccaucagaaugagcaaggaucuggguaugcugcagaucaaaaaagcacacaaaaugccauuaacgggauuacaaacaaggugaauucuguaauugagaaaaugaacacucaauucacagcugugggcaaagaauucaacaaauuggaaagaaggauggaaaacuuaaauaaaaaaguugaugauggguuucuagacauuuggacauauaacgcagaauuguugguucuacuggaaaaugaaaggacuuuggacuuccaugacuccaacgugaagaaucuguaugagaaaguaaaaagccaauuaaagaauaaugccaaagaaauaggaaacggguguuuugaauucuaucacaaguguaacgaugaaugcauggagagugugaaaaauggaacuuaugacuauccaaaauauuccgaagaaucaaaguugaacagggagaaaauugauggagugaaauuggaaucaaugggagucuaucagauuuuggcgaucuacucaacagucgccaguucccugguucuuuuggucucccugggggcaaucagcuucuggauguguuccaaugggucuuugcaguguagaauaugcaucuaa

SEQ ID NO: 34224 - RNA, 1698 nt, Artificial Sequence; identical to SEQ ID NO: 33937
  derived and/or modified CDS sequence (wt) from hemagglutinin__InfluenzaA__ABX58283

SEQ ID NO: 34225 - RNA, 1698 nt, Artificial Sequence
  derived and/or modified CDS sequence (wt) from hemagglutinin__InfluenzaA__ABX58294
augaaaguaaaacuacugguucuguuauguacauuuacagcuacauaugcagacacaauauguauaggcuaccaugccaacaacucgaccgacacuguugacacaguacuugagaagaaugugacagugacacacucugucaaccuacuugaggacagucacaauggaaaacuaugucuacuaaaaggaauagccccacuacaauuggguaauugcagcguugccggauggaucuuaggaaacccagaaugcgaauuacugauuuccaaggaaucaugguccuacauuguagagacaccaaauccugagaauggaacauguuacccaggguauuucgccgacuaugaggagcugagagagcaauugaguucaguaucuucauuugagagguucgaaauauuccccaaagagagcucauggcccaaccacaccguaaccggaguaucagcaucaugcucccauaacgggagaagcaguuuuuacagaaauuugcuauggcugacggggaagaaugguuuguauccaaaccugagcaaguccuaugcaaacaacaaagagaaagaaguccuuguacugugggguguucaucacccgccuaacauaggggaccaaagggcccucuaucauacagaaaaugcuuauguuucuguagugucuucacauuauagcagaagauucaccccagaaauagccaaaagacccaaggugagagaucaggaaggaagaaucaacuacuacuggacucugcuugaacccggggauacaauaauauuugaggcaaauggaaaucuaauagcgccaagguuugcuuucgcacugaguagaggcuuuggaucaggaaucaucaccucaaaugcaccaauggaugaaugugaugcgaaaugucaaacaccucagggagcuauaaacagcagucuuccuuuccagaauguacacccagucacaauaggagaguguccaaaguaugucaggaguacaaaauuaagaaugguuacaggacuaaggaacaucccauccauucaauccagagguuuguuuggagccauugccgguuucauugaagggggguggacuggaaugguagaugguugguaugguuaucaccaucagaaugagcaaggaucuggguaugcugcagaucaaaaaagcacacaaaaugccauuaacgggauuacaaacaaggugaauucuguaauugagaaaaugaacacucaauucacagcugugggcaaagaauucaacaaauuggaaagaaggauggaaaacuuaaauaaaaaaguugaugauggguuucuagacauuuggacauauaacgcagaauuguugguucuacuggaaaaugaaaggacuuuggacuuccaugacuccaacgugaagaaucuguaugagaaaguaaaaagccaauuaaagaauaaugccaaagaaauaggaaacggguguuuugaauucuaucacaaguguaacgaugaaugcauggagagugugaaaaauggaacuuaugacuauccaaaauauuccgaagaaucaaaguugaacagggagaaaauugauggagugaaauuggaaucaaugggagucuaucagauuuuggcgaucuacucaacagucgccaguucccugguucuuuuggucucccugggggcaaucagcuucuggauguguuccaaugggucuuugcaguguagaauaugcaucuaa

SEQ ID NO: 34226 - RNA, 1698 nt, Artificial Sequence; identical to SEQ ID NO: 33932
  derived and/or modified CDS sequence (wt) from hemagglutinin__InfluenzaA__ABX58316

SEQ ID NO: 34227 - RNA, 1698 nt, Artificial Sequence
  derived and/or modified CDS sequence (wt) from hemagglutinin__InfluenzaA__ABX58327
augaaaguaaaacuacuuguucuguuauguacauuuacagcuacauaugcagacacaauauguauaggcuaccaugccaacaacucgaccgacacuguugacacaguacuugagaagaaugugacagugacacacucugucaaccuacuugaggacagucacaauggaaaacuaugucuacuaaaaggaauagccccacuacaauuggguaauugcagcguugccggauggaucuuaggaaacccagaaugcgaauuacugauuuccaaggaaucaugguccuacauuguagaaacaccaaauccugagaauggaacauguuacccaggauauuucgccgacuaugaggagcugagggagcaauugaguucaguaucuucauuugagagguucgaaauauuccccaaagagagcucauggcccaaccacaccguaaccggaguaucagcaucaugcucccauaacgggaaaagcaguuuuuacagaaauuugcuauggcugacggggaagaaugguuuguauccaaaccugagcaaguccuaugcaaacaacaaagagaaagaaguccuuguaaugugggguguucaucacccgccuaacauaggggaccaaagggcccucuaucauacagaaaaugcuuaugucucuguagugucuucacauuauagcagaagauucaccccagaaauagccaaaagacccaaggugagagaucaggaaggaagaaucaacuacuacuggacucugcuggaacccggggauacaauaauauuugaggcaaauggaaaucuaauagcgccaagguuugcuuucgcacugaguagaggcuuuggaucaggaaucaucaccucaaaugcaccaaugggugaaugugaugcgaagugucaaacaccucagggagcuauaaacaguagucuuccuuuccagaauguacacccagucacaauaggagaguguccaaaguaugucaggagugcaaaauuaagaaugguuacaggacuaaggaacaucccauccauucaauccagagguuuguuuggagccauugccgguuucauugaagggggguggacuggaaugguagaugguugguaugguuaucaccaucagaaugagcaaggaucuggguaugcugcagaucaaaaaagcacacaaaaugccauuaacgggauuacaaacaaggugaauucuguaauugagaaaaugaacacucaauucacagcugugggcaaagaauucaacaaauuggaaagaaggauggaaaacuuaaauaaaaagguugaugauggguuucuagacauuuggacauauaacgcagaauuguuaguucuacuggaaaaugaaaggacuuuggacuuccaugacuccaacgugaagaaucuguaugagaaaguaaaaagccaauuaaagaauaaugccaaagaaauaggaaacggguguuuugaauucuaucacaaguguaacgaugaaugcauggagagugugaaaaauggaacuuaugacuauccaaaauauuccgaagaaucaaaguugaacagagagaaaauugauggagugaaauuggaaucaaugggagucuaucagauucuggcgaucuacucaacagucgccaguucccugguucuuuuggucucccugggggcaaucagcuucuggauguguuccaaugggucuuugcaguguagaauaugcaucuaa

SEQ ID NO: 34228 - RNA, 1698 nt, Artificial Sequence; identical to SEQ ID NO: 33997
  derived and/or modified CDS sequence (wt) from hemagglutinin__InfluenzaA__ABX58338

SEQ ID NO: 34229 - RNA, 1698 nt, Artificial Sequence
  derived and/or modified CDS sequence (wt) from hemagglutinin__InfluenzaA__ABX58360
augaaaguaaaacuacugguucuguuauguacauuuacagcuacauaugcagacacaauauguauaggcuaccaugccaacaacucgaccgacacuguugacacaguacuugagaagaaugugacagugacacacucugucaaccuacuugaggacagucacaauggaaaacuaugucuacuaaaaggaauagccccaauacaauuggguaauugcagcguugccggauggaucuuaggaaacccagaaugcgaauuacugauuuccaaggaaucaugguccuacauuguagagacaccaaauccugagaauggaacauguuacccaggguauuucgccgacuaugaggagcugagagagcaauugaguucaguaucuucauuugagagguucgaaauauuccccaaagagagcucauggcccaaccacaccguaaccggaguaucagcaucaugcucccauaacgggaaaagcaguuuuuacagaaauuugcuauggcugacggggaagaaugguuuguauccaaaccugagcaaguccuaugcaaacaacaaagagaaagaaguccuuguacugugggguguucaucacccgccuaacauaggggaccaaagggcccucuaucauacagaaaaugcuuaugucucuguagugucuucacauuauagcagaagauucaccccagaaauagccaaaagacccaaggugagagaucaggaaggaagaaucaacuacuacuggacucugcuugaacccggggauacaauaauauuugaggcaaauggaaaucuaauagcgccaagguuugcuuucgcacugaguagaggcuuuggaucaggaaucaucaccucaaaugcaccaauggaugaaugugaugcgaaaugucaaacaccucagggagcuauaaacagcagucuuccuuuccagaauguacacccagucacaauaggagaguguccaaaguaugucaggaguacaaaauuaagaaugguuacaggacuaaggaacaucccauccauucaauccagagguuuauuuggagccauugccgguuucauugaagggggguggacuggaaugguagaugguugguaugguuaucaccaucagaaugagcaaggaucuggguaugcugcagaucaaaaaagcacacaaaaugccauuaacgggauuacaaacaaggugaauucuguaauugagaaaaugaacacucaauucacagcugugggcaaagaauucaacaaauuggaaagaaggauggaaaacuuaaauaaaaaaguugaugauggguuucuagacauuuggacauauaacgcagaauuguugguucuacuggaaaaugaaaggacuuuggacuuccaugacuccaacgugaagaaucuguaugagaaaguaaaaagccaauuaaagaauaaugccaaagaaauaggaaacggguguuuugaauucuaucacaaguguaacgauggaugcauggagagugugaaaaauggaacuuaugacuauccaaaauauuccgaagaaucaaaguugaacagggagaaaauugauggagugaaauuggaaucaaugggggucuaucagauuuuggcgaucuacucaacagucgccaguucccugguucuuuuggucucccugggggcaaucagcuucuggauguguuccaaugggucuuugcaguguagaauaugcaucuaa

SEQ ID NO: 34230 - RNA, 1698 nt, Artificial Sequence; identical to SEQ ID NO: 34189
  derived and/or modified CDS sequence (wt) from hemagglutinin__InfluenzaA__ABX58371

SEQ ID NO: 34231 - RNA, 1698 nt, Artificial Sequence
  derived and/or modified CDS sequence (wt) from hemagglutinin__InfluenzaA__ABX58382
augaaaguaaaacuacugguucuguuauguacauuuacagcuacauaugcagacacaauauguauaggcuaccaugccaacaacucgaccgacacuguugacacaguacuugagaagaaugugacagugacacacucugucaaccuacuugaggacagucacaauggaaaacuaugucuacuaaaaggaauagccccacuacaauuggguaauugcagcguugccggauggaucuuaggaaacccagaaugcgaauuacugauuuccaaggaaucaugguccuacauuguagagacaccaaauccugagaauggaacauguuacccaggguauuucgccgacuaugaggagcugagagagcaauugaguucaguaucuucauuugagagguucgaaauauuccccaaagagagcucauggcccaaccacaccguaaccggaguaucagcaucaugcucccauaacgggaaaagcaguuuuuacagaaauuugcuauggcugacggggaagaaugguuuguauccaaaccugagcaaguccuaugcaaacaacaaagagaaagaaguccuuguacugugggguguucaucacccgccuaacauaggggaccaaagggcccucuaucauacagaaaaugcuuaugucucuguagugucuucacauuauagcagaagauucaccccagaaauagccaaaagaccuaaggugagagaucaggaaggaagaaucaacuacuacuggacucugcuugaacccggggauacaauaauauuugaggcaaauggaaaucuaauagcgccaagguuugcuuucgcacugaguagaggcuuuggaucaggaaucaucaccucaaaugcaccaauggaugaaugugaugcgaaaugucaaacaccucagggagcuauaaacagcagucuuccuuuccagaauguacacccagucacaauaggagaguguccaaaguaugucaggaguacaaaauuaagaaugguuacaggacuaaggaacaucccauccauucaauccagagguuuguuuggagccauugccgguuucauugaagggggguggacuggaaugguagaugguugguaugguuaucaccaucagaaugagcaaggaucuggguaugcugcagaucaaaaaagcacacaaaaugccauuaacgggauuacaaacaaggugaauucuguaauugagaaaaugaacacucaauucacagcugugggcaaagaauucaacaaauuggaaagaaggauggaaaacuuaaauaaaaaaguugaugauggguuucuagacauuuggacauauaacgcagaauuguugguucuacuggaaaaugaaaggacuuuggacuuccaugacuccaacgugaagaaucuguaugagaaaguaaaaagccaauuaaagaauaaugccaaagaaauaggaaacggguguuuugaauucuaucacaaguguaacgaugaaugcauggagagugugaaaaauggaacuuaugacuauccaaaauauuccgaagaaucaaaguugaacagggagaaaauugauggagugaaauuggaaucaaugggagucuaucagauuuuggcgaucuacucaacagucgccaguucccugguucuuuuggucucccugggggcaaucagcuucuggauguguuccaaugggucuuugcaguguagaauaugcaucuaa

SEQ ID NO: 34232 - RNA, 1698 nt, Artificial Sequence
  derived and/or modified CDS sequence (wt) from hemagglutinin__InfluenzaA__ABX58393
augaaaguaaaacuacugguucuguuauguacauuuacagcuacauaugcagacacaauauguauaggcuaccaugccaacaacucgaccgacacuguugacacaguacuugagaagaaugugacagugacacacucugucaaucuacuugaggacagucacaauggaaaacuaugucuacuaaaaggaauagccccacuacaauuggguaauugcagcguugccggauggaucuuaggaaacccagaaugcgaauuacugauuuccaaggaaucaugguccuacauuguagagacaccaaauccugagaauggaacauguuacccaggguauuucgccgacuaugaggagcugagagagcaauugaguucaguaucuucauuugagagauucgaaauauuccccaaagagagcucauggcccaaccacaccguaaccggaguaucagcaucaugcucccauaacgggagaagcaguuuuuacagaaauuugcuauggcugacggggaagaaugguuuguauccaaaccugagcaaguccuaugcaaacaacaaagagaaagaaguccuuguacugugggguguucaucacccgccuaacauaggggaccaaagggcccucuaucauacagaaaaugcuuauguuucuguagugucuucacauuauagcagaagauucaccccagaaauagccaaaagacccaaggugagagaucaggaaggaagaaucaacuacuacuggacucugcuugaacccggggauacaauaauauuugaggcaaauggaaaucuaauagcgccaagguuugcuuucgcacugaguagaggcuuuggaucaggaaucaucaccucaaaugcaccaauggaugaaugugaugcgaaaugucaaacaccucagggagcuauaaacagcagucuuccuuuccagaauguacacccagucacaauaggagaguguccaaaguaugucaggaguacaaaauuaagaaugguuacaggacuaaggaacaucccauccauucaauccagagguuuguuuggagccauugccgguuucauugaagggggguggacuggaaugguagaugguugguaugguuaucaccaucagaaugagcaaggaucuggguaugcugcagaucaaaaaagcacacaaaaugccauuaacgggauuacaaacaaggugaauucuguaauugagaaaaugaacacucaauucacagcugugggcaaagaauucaacaaauuggaaagaaggauggaaaacuuaaauaaaaaaguugaugauggguuucuagacauuuggacauauaacgcagaauuguugguucuacuggaaaaugaaaggacuuuggacuuccaugacuccaacgugaagaaucuguaugagaaaguaaaaagccaauuaaagaauaaugccaaagaaauaggaaacggguguuuugaauucuaucacaaguguaacgaugaaugcauggagagugugaaaaauggaacuuaugacuauccaaaauauuccgaagaaucaaaguugaacagggagaaaauugauggagugaaauuggaaucaaugggagucuaucagauuuuggcgaucuacucaacagucgccaguucccugguucuuuuggucucccugggggcaaucagcuucuggauguguuccaaugggucuuugcaguguagaauaugcaucuaa

SEQ ID NO: 34233 - RNA, 1698 nt, Artificial Sequence
  derived and/or modified CDS sequence (wt) from hemagglutinin__InfluenzaA__ABX58404
augaaaguaaaacuacuaguucuguuauguacauuuacagcuacauaugcagacacaauauguauaggcuaccaugccaacaacucgaccgacacuguugacacaguacuugagaagaaugugacagugacacacucugucaaccuacuugaggacagucacaauggaaaacuaugucuacuaaaaggaauagccccacuacaauuggguaauugcagcguugccggauggaucuuaggaaacccagaaugcgaauuacugauuuccaaggaaucaugguccuacauuguagagacaccaaauccugagaauggaacauguuacccaggguauuuugccgacuaugaggagcugagagagcaauugaguucaguaucuucauuugagagguucgaaauauuccccaaagagagcucauggcccaaccacaccguaaccggaguaucagcaucaugcucccauaacgggaaaagcaguuuuuacagaaauuugcuaugguugacggggaagaaugguuuguauccaaaccugagcaaguccuaugcaaacaacaaagagaaagaaguccuuguacugugggguguucaucacccgccuaacauaggggaccaaagggcccucuaucauacagaaaaugcuuaugucucuguagugucuucacauuauagcagaagauucaccccagaaauagccaaaagacccaaggugagagaucaggaaggaagaaucaacuacuacuggacucugcuugaacccggggauacaauaauauuugaggcaaauggaaaucuaauagcgccaagguuugcuuucgcacugaguagaggcuuuggaucaggaaucaucaccucaaaugcaccaauggaugaaugugaugcgaaaugucaaacaccucagggagcuauaaacagcagucuuccuuuccagaauguacacccagucacaauaggagaguguccaaaguaugucaggaguacaaaauuaagaaugguuacaggacuaaggaacaucccauccauucaauccagagguuuguuuggagccauugccgguuucauugaagggggguggacuggaaugguagaugguugguaugguuaucaccaucagaaugagcaaggaucuggguaugcugcugaucaaaaaagcacacaaaaugccauuaacgggauuacaaacaaggugaacucuguaauugagaaaaugaacacucaauucacagcugugggcaaagaauucaacaaauuggaaagaaggauggaaaacuuaaauaaaaaaguugaugauggguuucuagacauuuggacauauaacgcagaauuguugguucuacuggaaaaugaaaggacuuuggacuuccaugacuccaacgugaagaaucuguaugagaaaguaaaaagccaauuaaagaauaaugccaaagaaauaggaaacggguguuuugaauucuaucacaaguguaacgaugaaugcauggagagugugaaaaauggaacuuaugacuauccaaaauauuccgaagaaucaaaguugaacagggagaaaauugauggagugaaauuggaaucaaugggagucuaucagauuuuggcgaucuacucaacagucgccaguucccugguucuuuuggucucccugggggcaaucagcuucuggauguguuccaaugggucuuugcaguguagaauaugcaucuaa

SEQ ID NO: 34234 - RNA, 1698 nt, Artificial Sequence
  derived and/or modified CDS sequence (wt) from hemagglutinin__InfluenzaA__ABX58415
augaaagugaaacuacugguucuguuauguacauuuacagcuacauaugcagacacaauauguauaggcuaccaugccaacaacucgaccgacacuguugacacaguacuugagaagaaugugacagugacacacucugucaaccuacuugaggaccgucacaauggaaaacuaugucuacuaaaaggaauagccccacuacaauuggguaauugcagcguugccggauggaucuuaggaaacccagaaugcgaauuacugauuuccaagaaaucaugguccuacauuguagaaacaccaaauccugagaauggaacauguuacccaggguauuucgccgacuaugaggagcugagggagcaauugaguucaguaucuucauuugagagguucgaaauauuccccaaagagagcucauggcccaaccacaccguaaccggaguaucagcaucaugcucccauaacgggaaaagcaguuuuuacagaaauuugcuauggcugacgggaaagaaugguuuguacccaaaccugagcagauccuaugcaaacaacaaagagaaagaaguccuuguacugugggguguucaucacccgccuaacauaggggaccaaagggcccucuaucauacagaaaaugcuuaugucucuguagugucuucacauuauagcagaagauucaccccagaaauagccaaaagacccaaggugagagaucaggaaggaagaaucaauuacuacuggacucuacuggaacccggggauacaauaauauuugaggcaaaugggaaucuaauagcgccaagguuugcuuucgcacugaguagaggcuuuggaucaggaaucaucaccucaaaugcaccaauggaugaaugugaugcgaagugucaaacaccucagggagcuauaaacagcagucuuccuuuccagaauguacacccagucacaauaggagaguguccaaaguaugucaggagugcaaaauuaagaaugguuacaggacuaaggaacaucccauccauucaauccagagguuuguuuggagccauugccgguuucauugaagggggguggacuggaaugguagaugguugguaugguuaucaccaccagaaugagcaaggaucuggguaugcugcagaucaaaaaagcacacaaaaugccauuaacgggauuacaaacaaggugaauucugugauugagaaaaugaacacucaauucacagcugugggcaaagaauucaacaaauuggaaagaagaauggaaaacuuaaauaaaaaaguugaugauggguuucuagacauuuggacguauaacgcagaauuguugguucuacuggaaaaugaaaggacuuuggacuuccaugacuccaacgugaagaaucuguaugagaaaguaaaaagccaauuaaagaauaaugccaaagaaauaggaaacggguguuuugaauucuaucacaaguguaacgaugaaugcauggagagugugaaaaauggaacuuaugacuauccaaaauauuccgaagaaucaaaguuaaacagggagaaaauugauggagugaaauuggaaucaaugggagucuaucagauucuggcaaucuacucaacagucgccaguucccugguucuuuuggucucccugggggcaaucagcuucuggauguguuccaaugggucuuugcaguguagaauaugcaucuaa

SEQ ID NO: 34235 - RNA, 1698 nt, Artificial Sequence; identical to SEQ ID NO: 33937
  derived and/or modified CDS sequence (wt) from hemagglutinin__InfluenzaA__ABX58426

SEQ ID NO: 34236 - RNA, 1698 nt, Artificial Sequence; identical to SEQ ID NO: 33937
  derived and/or modified CDS sequence (wt) from hemagglutinin__InfluenzaA__ABX58437

SEQ ID NO: 34237 - RNA, 1698 nt, Artificial Sequence
  derived and/or modified CDS sequence (wt) from hemagglutinin__InfluenzaA__ABX58448
augaaaguaaaacuacugauucuguuauguacauuuacagcuacauaugcagacacaauauguauaggcuaccaugccaacaacucgaccgacacuguugacacaguacuugagaagaaugugacagugacacacucugucaaccuacuugaggacagucacaauggaaaacuaugucuacuaaaaggaauagccccacuacaauuggguaauugcagcguugccggauggaucuuaggaaacccagaaugcgaauuacugauuuccaaggaaucaugguccuacauuguagagacaccaaauccugagaauggaacauguuacccaggguauuucgccgacuaugaggagcugagagagcaauugaguucaguaucuucauuugagagguucgaaauauuccccaaagagagcucauggcccaaccacaccguaaccggaguaucagcaucaugcucccauaacgggaaaagcaguuuuuacagaaauuugcuauggcugacggggaagaaugguuuguauccaaaccugagcaaguccuaugcaaacaacaaagagaaagaaguccuuguacugugggguguucaucacccgccuaacauaggggaccaaagggcccucuaucauacagaaaaugcuuaugucucuguagugucuucacauuauagcagaagauucaccccagaaauagccaaaagacccaaggugagagaucaggaaggaagaaucaacuacuacuggacucugcuugaacccggggauacaauaauauuugaggcaaauggaaaucuaauagcgccaagguuugcuuucgcacugaguagaggcuuuggaucaggaaucaucaccucaaaugcaccaauggaugaaugugaugcgaaaugucaaacaccucagggagcuauaaacagcagucuuccuuuccagaauguacacccagucacaauaggagaguguccaaaguaugucaggaguacaaaauuaagaaugguuacaggauuaaggaacaucccauccauucaauccagagguuuauuuggagccauugccgguuucauugaagggggguggacuggaaugguagaugguugguaugguuaucaccaucagaaugagcaaggaucuggguaugcugcagaucaaaaaagcacacaaaaugccauuaacgggauuacaaacaaggugaauucuguaauugagaaaaugaacacucaauucacagcugugggcaaagaauucaacaaauuggaaagaaggauggaaaacuuaaauaaaaaaguugaugauggguuucuagacauuuggacauauaacgcagaauuguugguucuacuggaaaaugaaaggacuuuggacuuccaugacuccaacgugaagaaucuguaugagaaaguaaaaagccaauuaaagaauaaugccaaagaaauaggaaacggguguuuugaauucuaucacaaguguaacgaugaaugcauggagagugugaaaaauggaacuuaugacuauccaaaauauuccgaagaaucaaaguugaacagggagaaaauugauggagugaaauuggaaucaaugggagucuaucagauuuuggcgaucuacucaacagucgccaguucccugguucuuuuggucucccugggggcaaucagcuucuggauguguuccaaugggucuuugcaguguagaauaugcaucuaa

SEQ ID NO: 34238 - RNA, 1698 nt, Artificial Sequence; identical to SEQ ID NO: 34085
  derived and/or modified CDS sequence (wt) from hemagglutinin__InfluenzaA__ABX58459

SEQ ID NO: 34239 - RNA, 1698 nt, Artificial Sequence; identical to SEQ ID NO: 34067
  derived and/or modified CDS sequence (wt) from hemagglutinin__InfluenzaA__ABX58470

SEQ ID NO: 34240 - RNA, 1698 nt, Artificial Sequence; identical to SEQ ID NO: 34085
  derived and/or modified CDS sequence (wt) from hemagglutinin__InfluenzaA__ABX58481

SEQ ID NO: 34241 - RNA, 1698 nt, Artificial Sequence
  derived and/or modified CDS sequence (wt) from hemagglutinin__InfluenzaA__ABX58492
augaaaguaaaacuacugguucuguuauguacauuuacagcuacauaugcagacacaauauguauaggcuaccaugccaacaacucgaccgacacuguugacacaguacuugagaagaaugugacagugacacacucugucaaccuacuugaggacagucacaauggaaaacuaugucuacuaaaaggaauagccccacuacaauuggguaauugcagcguugccggauggaucuuaggaaacccagaaugcgaauuacugauuuccaaggaaucaugguccuacauuguagagacaccaaauccugagaauggaacauguuacccaggguauuucgcugacuaugaggagcugagagagcaauugaguucaguaucuucauuugagagguucgaaauauuccccaaagagagcucauggcccaaccacaccguaaccggaguaucagcaucaugcucccauaacgggaaaagcaguuuuuacagaaauuugcuauggcugacggggaagaaugguuuguauccaaaccugagcaaguccuaugcaaacaacaaagagaaagaaguccuuguacugugggguguucaucacccgccuaacauaggggaccaaagggcccucuaucauacagaaaaugcuuaugucucuguagugucuucacauuauagcagaagauucaccccagaaauagccaaaagacccaaggugagagaucaggaaggaagaaucaacuacuacuggacucugcuugaacccggggauacaauaauauuugaggcaaauggaaaucuaauagcgccaagguuugcuuucgcacugaguagaggcuuuggaucaggaaucaucaccucaaaugcaccaauggaugaaugugaugcgaaaugucaaacaccucagggagcuauaaacagcagucuuccuuuccagaauguacacccagucacaauaggagaguguccaaaguaugucaggaguacaaaauuaagaaugguuacaggacuaaggaacaucccauccauucaauccagagguuuguuuggagccauugccgguuucauugaagggggguggacuggaaugguagaugguugguaugguuaucaccaucagaaugagcaaggaucuggguaugcugcugaucaaaaaagcacacaaaaugccauuaacgggauuacaaacaaggugaauucuguaauugagaaaaugaacacucaauucacagcugugggcaaagaauucaacaaauuggaaagaaggauggaaaacuuaaauaaaaaaguugaugauggguuucuagacauuuggacauauaacgcagaauuguugguucuacuggaaaaugaaaggacuuuggacuuccaugacuccaacgugaagaaucuguaugagaaaguaaaaagccaauuaaagaauaaugccaaagaaauaggaaacggguguuuugaauucuaucacaaguguaacgaugaaugcauggagagugugaaaaauggaacuuaugacuauccaaaauauuccgaagaaucaaaguugaacagggagaaaauugauggagugaaauuggaaucaaugggagucuaucagauuuuggcgaucuacucaacagucgccaguucccugguucuuuuggucucccugggggcaaucagcuucuggauguguuccaaugggucuuugcaguguagaauaugcaucuaa

SEQ ID NO: 34242 - RNA, 1698 nt, Artificial Sequence; identical to SEQ ID NO: 34079
  derived and/or modified CDS sequence (wt) from hemagglutinin__InfluenzaA__ABX58503

SEQ ID NO: 34243 - RNA, 1698 nt, Artificial Sequence; identical to SEQ ID NO: 34085
  derived and/or modified CDS sequence (wt) from hemagglutinin__InfluenzaA__ABX58525

SEQ ID NO: 34244 - RNA, 1698 nt, Artificial Sequence
  derived and/or modified CDS sequence (wt) from hemagglutinin__InfluenzaA__ABX58536
augaaagugaaacuacugguucuguuauguacauuuacagcuacauaugcagacacaauauguauaggcuaccaugccaacaacucgaccgacacuguugacacaguacuugagaagaaugugacagugacacacucugucaaccuacuugaggaccgucacaauggaaaacuaugucuacuaaaaggaauagccccacuacaauuggguaauugcagcguugccggauggaucuuaggaaacccagaaugcgaauuacugauuuccaaggaaccgugguccuacauuguagaaacaccaaauccugagaauggaacauguuacccaggguauuucgccgacuaugaggagcugagggagcaauugaguucaguaucuucauuugagagguucgaaauauuccccaaagagagcucauggcccaaccacaccguaaccggaguaucagcaucaugcucccauaacgggaaaagcaguuuuuacagaaauuugcuauggcugacgggaaagaaugguuuguacccaaaccuuagcagauccuaugcaaacaacaaagagaaagaaguccuuguacugugggguguucaucacccgccuaacauaggggaccaaagggcccucuaucauacagaaaaugcuuaugucucuguagugucuucacauuauagcagaagauucaccccagaaauagccaaaagacccaaggugagagaucaggaaggaagaaucaauuacuacuggacucuacuggaacccggggauacaauaauauuugaggcaaaugggaaucuaauagcgccaagguuugcuuucgcacugaguagaggcuuuggaucaggaaucaucaccucaaaugcaccaauggaugaaugugaugcgaagugucaaacaccucagggagcuauaaacagcagucuuccuuuccagaauguacacccagucacaauaggagaguguccaaaguaugucaggagugcaaaauuaagaaugguuacaggacuaaggaacaucccauccauucaauccagagguuuguuuggagccauugccgguuucauugaagggggguggacuggaaugguagaugguugguaugguuaucaccaccagaaugagcaaggaucuggguaugcugcagaucaaaaaagcacacaaaaugccauuaacgggauuacaaacaaggugaauucugugauugagaaaaugaacacucaauucacagcugugggcaaagaauucaacaaauuggaaagaagaauggaaaacuuaaauaaaaaaguugaugauggguuucuagacauuuggacguauaacgcagaauuguugguucuacuggaaaaugaaaggacuuuggacuuccaugacuccaacgugaagaaucuguaugagaaaguaaaaagccaauuaaagaauaaugccaaagaaauaggaaauggguguuuugaauucuaucacaaguguaacgaugaaugcauggagagugugaaaaauggaacuuaugacuauccaaaauauuccgaagaaucaaaguuaaacagggagaaaauugauggagugaaauuggaaucaaugggagucuaucagauucuggcgaucuacucaacagucgccaguucccugguucuuuuggucucccugggggcaaucagcuucuggauguguuccaaugggucuuugcaguguagaauaugcaucuaa

SEQ ID NO: 34245 - RNA, 1698 nt, Artificial Sequence
  derived and/or modified CDS sequence (wt) from hemagglutinin__InfluenzaA__ABX58547
augaaaguaaaacuacugauucuguuauguacauuuacagcuacauaugcagacacaauauguauaggcuaccaugccaacaacucgaccgacacuguugacacaguacuugagaagaaugugacagugacacacucugucaaccuacuugaggacagucacaauggaaaacuaugucuacuaaaaggaauagccccacuacaauuggguaauugcagcguugccggauggaucuuaggaaacccagaaugcgaauuacugauuuccaaggaaucaugguccuacauuguagagacaccaaauccugagaauggaacauguuacccaggguauuucgccgacuaugaggagcugagagagcaauugaguucaguaucuucauuugagagguucgaaauauuccccaaagagagcucauggcccaaccacaccguaaccggaguaucagcaucaugcucccauaacgggaaaagcaguuuuuacagaaauuugcuauggcugacggggaagaaugguuuguauccaaaccugagcaaguccuaugcaaacaacaaagagaaagaaguccuuguacugugggguguucaucacccgccuaacauaggggaccaaagggcccucuaucauacagaaaaugcuuaugucucuguagugucuucacauuauagcagaagauucaccccagaaauagccaaaagacccaaggugagagaucaggaaggaagaaucaacuacuacuggacucugcuugaacccggggauacaauaauauuugaggcaaauggaaaucuaauagcgccaagguuugcuuucgcacugaguagaggcuuuggaucaggaaucaucaccucaaaugcaccaauggaugaaugugaugcgaaaugucaaacaccucagggagcuauaaacagcagucuuccuuuccagaauguacacccagucacaauaggagaguguccaaaguaugucaggaguacaaaauuaagaaugguuacaggacuaaggaacaucccauccauucaaaccagagguuuauuuggagccauugccgguuucauugaagggggguggacuggaaugguagaugguugguaugguuaucaccaucagaaugagcaaggaucuggguaugcugcagaucaaaaaagcacacaaaaugccauuaacgggauuacaaacaaggugaauucuguaauugagaaaaugaacacucaauucacagcugugggcaaagaauucaacaaauuggaaagaaggauggaaaacuuaaauaaaaaaguugaugauggguuucuagacauuuggacauauaacgcagaauuguugguucuacuggaaaaugaaaggacuuuggacuuccaugacuccaacgugaagaaucuguaugagaaaguaaaaagccaauuaaagaauaaugccaaagaaauaggaaacggguguuuugaauucuaucacaaguguaacgaugaaugcauggagagugugaaaaauggaacuuaugacuauccaaaauauuccgaagaaucaaaguugaacagggagaaaauugauggagugaaauuggaaucaaugggagucuaucagauuuuggcgaucuacucaacagucgccaguucccugguucuuuuggucucccugggggcaaucagcuucuggauguguuccaaugggucuuugcaguguagaauaugcaucuaa

SEQ ID NO: 34246 - RNA, 1698 nt, Artificial Sequence
  derived and/or modified CDS sequence (wt) from hemagglutinin__InfluenzaA__ABX58558
augaaaguaaaacuacugguucuguuauguacauuuacagcuacauaugcagacacaauauguauaggcuaccaugccaacaacucgaccgacacuguugacacaguacuugagaagaaugugacagugacacacucugucaaccuacuugaggacagucacaauggaaaacuaugucuacuaaaaggaauagccccacuacaauuggguaauugcagcguugccggauggaucuuaggaaacccagaaugcgaauuacugauuuccaaggaaucaugguccuacauuguagagacaccaaauccugagaauggaacauguuacccaggguauuucgccgacuaugaggagcugagagagcaauugaguucaguaucuucauuugagagguucgaaauauuccccaaagagagcucauggcccaaccacaccguaaccggaguaucagcaucaugcucccauaacgggagaagcaguuuuuacagaaauuugcuauggcugacggggaagaaugguuuguauccaaaccugagcaaguccuaugcaaacaacaaagagaaagaaguccuuguacugugggguguucaucacccgccuaacauaggggaccaaagggcccucuaucauacagaaaaugcuuauguuucuguagugucuucacauuauagcagaagauucaccccagaaauugccaaaagacccaaggugagagaucaggaaggaagaaucaacuacuacuggacucugcuugaacccggggauacaauaauauuugaggcaaauggaaaucuaauagcgccaagguuugcuuucgcacugaguagaggcuuuggaucaggaaucaucaccucaaaugcaccaauggauaaaugugaugcgaaaugucaaacaccucagggagcuauaaacagcagucuuccuuuccagaauguacacccagucacaauaggagaguguccaaaguaugucaggaguacaaaauuaagaaugguuacaggacuaaggaacaucccauccauucaauccagagguuuguuuggagccauugccgguuucauugaagggggguggacuggaaugguagaugguugguaugguuaucaccaucagaaugagcaaggaucuggguaugcugcagaucaaaaaagcacacaaaaugccauuaacgggauuacaaacaaggugaauucuguaauugagaaaaugaacacucaauucacagcugugggcaaagaauucaacaaauuggaaagaaggauggaaaacuuaaauaaaaaaguugaugauggguuucuagacauuuggacauauaacgcagaauuguugguucuacuggaaaaugaaaggacuuuggacuuccaugacuccaacgugaagaaucuguaugagaaaguaaaaagccaauuaaagaauaaugccaaagaaauaggaaacggguguuuugaauucuaucacaaguguaacgaugaaugcauggagagugugaaaaauggaacuuaugacuauccaaaauauuccgaagaaucaaaguugaacagggagaaaauugauggagugaaauuggaaucaaugggagucuaucagauuuuggcgaucuacucaacagucgccaguucccugguucuuuuggucucccugggggcaaucagcuucuggauguguuccaaugggucuuugcaguguagaauaugcaucuaa

SEQ ID NO: 34247 - RNA, 1698 nt, Artificial Sequence
  derived and/or modified CDS sequence (wt) from hemagglutinin__InfluenzaA__ABX58569
augaaaguaaaacuacugauucuguuauguacauuuacagcuacauaugcagacacaauauguauaggcuaccaugccaacaacucgaccgacacuguugacacaguacuugagaagaaugugacagugacacacucugucaaccuacuugaggacagucacaauggaaaacuaugucuacuaaaaggaauagccccacuacaauuggguaauugcagcguugccggauggaucuuaggaaacccagaaugcgaauuacugauuuccaaggaaucaugguccuacauuguagagacaccaaauccugagaauggaacauguuacccaggguauuucgccgacuaugaggagcugagggagcaauugaguucaguaucuucauuugagagguucgaaauauuccccaaagagagcucauggcccaaccacaccgcaaccggaguaucagcaucaugcucccauaacgggaaaagcaguuuuuacagaaauuugcuauggcugacggggaagaaugguuuguauccaaaccugagcaaguccuaugcaaacaacaaagagaaagaaguccuuguacugugggguguucaucacccgccuaacauaggggaccaaagggcccucuaucauacagaaaaugcuuaugucucuguagugucuucacauuauagcagaagauucaccccagaaauagccaaaagacccaaggugagagaucaggaaggaagaaucaacuacuacuggacucugcuugaacccggggauacaauaauauuugaggcaaauggaaaucuaauagcgccaagguuugcuuucgcacugaguagaggcuuuggaucaggaaucaucaccucaaaugcaccaauggaugaaugugaugcgaaaugucaaacaccucagggagcuauaaacagcagucuuccuuuccagaauguacacccagucacaauaggagaguguccaaaguaugucaggaguacaaaauuaagaaugguuacaggacuaaggaacaucccauccauucaauccagagguuuguuuggagccauugccgguuucauugaagggggguggacuggaaugguagaugguugguaugguuaucaccaucagaaugagcaaggaucuggguaugcugcagaucaaaaaagcacacaaaaugccauuaacgggauuacaaacaaggugaauucuguaauugagaaaaugaacacucaauucacagcugugggcaaagaauucaacaaauuggaaagaaggauggaaaacuuaaauaaaaaaguugaugauggguuucuagacauuuggacauauaacgcagaauuguugguucuacuggaaaaugaaaggacuuuggacuuccaugacuccaacgugaagaaucuguaugagaaaguaaaaagccaauuaaagaauaaugccaaagaaauaggaaacggguguuuugaauucuaucacaaguguaacgaugaaugcauggagagugugaaaaauggaacuuaugacuauccaaaauauuccgaagaaucaaaguugaacagggagaaaauugauggagugaaauuggaaucaaugggagucuaucagauuuuggcgaucuacucaacagucgccaguucccugguucuuuuggucucccugggggcaaucagcuucuggauguguuccaaugggucuuugcaguguagaauaugcaucuaa

SEQ ID NO: 34248 - RNA, 1698 nt, Artificial Sequence; identical to SEQ ID NO: 33997
  derived and/or modified CDS sequence (wt) from hemagglutinin__InfluenzaA__ABX58580

SEQ ID NO: 34249 - RNA, 1698 nt, Artificial Sequence; identical to SEQ ID NO: 33937
  derived and/or modified CDS sequence (wt) from hemagglutinin__InfluenzaA__ABX58591

SEQ ID NO: 34250 - RNA, 1698 nt, Artificial Sequence
  derived and/or modified CDS sequence (wt) from hemagglutinin__InfluenzaA__ABX58602
augaaaguaaaacuacuuguucuguuauguacauuuacagcuacauaugcagacacaauauguauaggcuaccaugccaacaacucgaccgacacuguugacacaguacuugagaagaaugugacagugacacacucugucaaccuacuugaggacagucacaauggaaaacuaugucuacuagaaggaauagccccacuacaauuggguaauugcagcguugccggauggaucuuaggaaacccagaaugcgaauuacugauuuccaaggaaucaugguccuacauuguagaaacaccaaauccugagaauggaacauguuacccaggauauuucgccgacuaugaggagcugagggagcaauugaguucaguaucuucauuugagagguucgaaauauuccccaaagagagcucauggcccaaccacaccguaaccggaguaucagcaucaugcucccauaacgggaaaagcaguuuuuacagaaauuugcuauggcugacggggaagaaugguuuguauccaaaccugagcaaguccuaugcaaacaacaaagagaaagaaguccuuguacugugggguguucaucacccgccuaacauaggggaccaaagggcccucuaucauacagaaaaugcuuaugucucuguagugucuucacauuauagcagaagauucaccccagaaauagccaaaagacccaaggugagagaucaggaaggaagaaucaacuacuacuggacucugcuggaacccagggauacaauaauauuugaggcaaauggaaaucuaauagcgccaagguuugcuuucgcacugaguagaggcuuuggaucaggaaucaucaccucaaaugcaccaaugggugaaugugaugcgaagugucaaacaccucagggagcuauaaacaguagucuuccuuuccagaauguacauccagucacaauaggagaguguccaaaguaugucaggagugcaaaauuaagaaugguuacaggacuaaggaacaucccauccauucaauccagagguuuguuuggagccauugccgguuucauugaagggggguggacuggaaugguagaugguugguaugguuaucaccaucagaaugagcaaggaucuggguaugcugcagaucaaaaaagcacacaaaaugccauuaacgggauuacaaacaaggugaauucuguaauugagaaaaugaacacucaauucacagcugugggcaaagaauucaacaaauuggaaagaaggauggaaaacuuaaauaaaaagguugaugauggguuucuagacauuuggacauauaacgcagaauuguugguucuacuggaaaaugaaaggacuuuggacuuccaugacuccaacgugaagaaucuguaugagaaaguaaaaagccaauuaaagaauaaugccaaagaaauaggaaacggguguuuugaauucuaucacaaguguaacgaugaaugcauggagagugugaaaaauggaacuuaugacuauccaaaauauuccgaagaaucaaaguugaacagggagaaaauugauggagugaaauuggaaucaaugggagucuaucagauucuggcgaucuacucaacagucgccaguucccugguucuuuuggucucccugggggcaaucagcuucuggauguguuccaaugggucuuugcaguguagaauaugcaucuaa

SEQ ID NO: 34251 - RNA, 1698 nt, Artificial Sequence; identical to SEQ ID NO: 33959
  derived and/or modified CDS sequence (wt) from hemagglutinin__InfluenzaA__ABX58613

SEQ ID NO: 34252 - RNA, 1698 nt, Artificial Sequence; identical to SEQ ID NO: 34189
  derived and/or modified CDS sequence (wt) from hemagglutinin__InfluenzaA__ABX58624

SEQ ID NO: 34253 - RNA, 1698 nt, Artificial Sequence
  derived and/or modified CDS sequence (wt) from hemagglutinin__InfluenzaA__ABX58635
augaaaguaaaacuacugguucuguuauguacauuuacagcuacauaugcagacacaauauguauaggcuaccaugccaacaacucgaccgacacuguugacacaguacuugagaagaaugugacagugacacacucugucaaccuacuugaggacagucacaauggaaaacuaugucuacuaaaaggaauagccccacuacaauuggguaauugcagcguugccggauggaucuuaggaaacccagaaugcgaauuacugauuuccaaggaaucaugguccuacauuguagagacaccaaauccugagaauggaacauguuacccaggguauuucgccgacuaugaggagcugagagagcaauugaguucaguaucuucauuugagagguucgaaauauuccccaaagagagcucauggcccaaccacaccguaaccggaguaucagcaucaugcucccauaacgggagaagcaguuuuuacagaaauuugcuauggcugacggggaagaaugguuuguauccaagccugagcaaguccuaugcaaacaacaaagagaaagaaguccuuguacugugggguguucaucacccgccuaacauaggggaccaaagggcccucuaucauacagaaaaugcuuauguuucuguaguuucuucacauuauagcagaagauucaccccagaaauagccaaaagacccaaggugagagaucaggaaggaagaaucaacuacuacuggacucugcuugaacccggggauacaauaauauuugaggcaaauggaaaucuaauagcgccaagguuugcuuucgcacugaguagaggcuuuggaucaggaaucaucaccucaaaugcaccaauggaugaaugugaugcgaaaugucaaacaccucagggagcuauaaacagcagucuuccuuuccagaauguacacccagucacaauaggagaguguccaaaguaugucaggaguacaaaauuaagaaugguuacaggacuaaggaacaucccauccauucaauccagagguuuguuuggagccauugccgguuucauugaagggggguggacuggaaugguagaugguugguaugguuaucaccaucagaaugagcaaggaucuggguaugcugcagaucaaaaaagcacacaaaaugccauuaacgggauuacaaacaaggugaauucuguaauugagaaaaugaacacucaauucacagcugugggcaaagaauucaacaaauuggaaagaaggauggaaaacuuaaauaaaaaaguugaugauggguuucuagacauuuggacauauaacgcagaauuguugguucuacuggaaaaugaaaggacuuuggacuuccaugacuccaacgugaagaaucuguaugagaaaguaaaaagccaauuaaagaauaaugccaaagaaauaggaaacggguguuuugaauucuaucacaaguguaacgaugaaugcauggagagugugaaaaauggaacuuaugacuauccaaaauauuccgaagaaucaaaguugaacagggagaaaauugauggagugaaauuggaaucaaugggagucuaucagauuuuggcgaucuacucaacagucgccaguucccugguucuuuuggucucccugggggcaaucagcuucuggauguguuccaaugggucuuugcaguguagaauaugcaucuaa

SEQ ID NO: 34254 - RNA, 1698 nt, Artificial Sequence; identical to SEQ ID NO: 33938
  derived and/or modified CDS sequence (wt) from hemagglutinin__InfluenzaA__ABX58679

SEQ ID NO: 34255 - RNA, 1698 nt, Artificial Sequence; identical to SEQ ID NO: 34093
  derived and/or modified CDS sequence (wt) from hemagglutinin__InfluenzaA__ABX58701

SEQ ID NO: 34256 - RNA, 1698 nt, Artificial Sequence; identical to SEQ ID NO: 34221
  derived and/or modified CDS sequence (wt) from hemagglutinin__InfluenzaA__ABX58712

SEQ ID NO: 34257 - RNA, 1704 nt, Artificial Sequence
  derived and/or modified CDS sequence (wt) from hemagglutinin__InfluenzaA__ABY19417
auggagaaaauagugcuucuucuugcaauaaucagccuuguuaaaagugaucagauuugcauugguuaccaugcaaacaacucgacagagcagguugacacaauaauggaaaagaacguuacuguuacacaugcucaagauauacuggaaaagacacacaacgggaagcucugcgaucuagauggagugaagccucugauuuuaagagauuguaguguagcuggauggcuccucggaaacccaaugugugacgaauucaucaaugugccggaauggucuuacauaguggagaaggccaacccagccaaugaccucuguuacccaggaaauuucaacgacuaugaagaacugaaacaccuauugagcaggauaaaccauuuugagaaaauucagaucauccccaaaaguucuugguccgaucaugaagccucaucaggggugagcucagcauguccauaccagggagugcccuccuuuuucagaaaugugguauggcuuaucaaaaagaacaauacauacccaacaauaaagagaagcuacaauaauaccaaccaggaagaucuuuugauacugugggggauucaucauucuaaugaugcagcagagcagacaaagcucuaucaaaacccaaccaccuauauuuccguugggacaucaacacugaaccagagauugguaccaaaaauagcuacuagauccaaaguaaacgggcaaagcggaaggauggauuucuucuggacaauuuuaaaaccgaaugaugcaaucaacuucgagaguaauggaaauuucauugcuccagaauaugcauacaaaauugucaagaaaggggacucggcaauuaugaaaagugagguggaguaugguaacugcaacaccaagugucaaacuccaauaggggcgauaaacucuaguaugccauuccacaacauacacccucucaccaucggggaaugccccaaauaugugaaaucaaacaaauuaguccuugcgacuggacucagaaauaguccucuaagagaaagaagaagaaaaagaggacuauuuggagcuauagcagguuuuauagagggcggauggcagggaaugguagaugguugguauggguaucaccauagcaaugagcaggggaguggguacgcugcagacaaagaauccacucaaaaggcaauagauggagucaccaauaaggucaacucaaucauugacaaaaugaacacucaguuugaggccguuggaagggaauuuaauaacuuagagaggagaauagagaauuuaaacaagaaaauggaagacggauuccuagaugucuggacuuauaaugcugaacuucugguucucauggaaaaugagagaacucuagacuuccaugauucaaaugucaagaaccuuuacgacaagguccgacuacagcuuagggauaaugcaaaggagcuggguaacgguuguuucaaguucuaucacaaaugugauaaugaaugcauggaaaguguaagaaacggaacguaugacuacccgcaguauucagaagaagcaagauuaaaaagagaggaaauaaguggaguaaaauuggaaucaauaggaacuuaccaaauacugucaauuuauucaacaguugcgaguucucuagcacuggcaaucaugguggcuggucuaucuuuauggaugugcuccaaugggucguuacaaugcagaauucgcauuuaa

SEQ ID NO: 34258 - RNA, 1704 nt, Artificial Sequence
  derived and/or modified CDS sequence (wt) from hemagglutinin__InfluenzaA__ABY19418
auggagaaaauagugcuucuucuugcaauaaucagccuuguuaaaagugaucagauuugcauugguuaccaugcaaacaacucgacagagcagguugacacaauaauggaaaagaacguuacuguuacacaugcucaagauauacuggaaaagacacacaacgggaagcucugcgaucuagauggagugaagccucugauuuuaagagauuguaguguagcuggauggcuccucggaaacccaaugugugaugaauucaucaaugugccggaauggucuuacauaguggagaaggccaacccagccaaugaccucuguuacccaggggauuucaacgacuaugaagaacugaaacaccuauugagcaggauaaaccauuuugagaaaauucagaucauccccaaaaguucuugguccgaucaugaagccucaucaggggugagcucagcauguccauaccagggagugcccuccuuuuucagaaaugugguauggcuuaucaaaaagaacaauacauacccaacaauaaagagaagcuacaauaauaccaaccaggaagaucuuuugauacugugggggauucaucauucuaaugaugcagcagagcagacaaagcucuaucaaaacccaaccaccuauauuuccguugggacaucaacacugaaccagagauugguaccaaaaauagcuacuagauccaaaguaaacgggcaaaguggaaggauggauuucuucuggacaauuuuaaaaccgaaugaugcaaucaacuucgagaguaauggaaauuucauugcuccagaauaugcauacaaaauugucaagaaaggggacucggcaauuaugaaaagugagguggaguaugguaacugcaacaccaagugucaaacuccaauaggggcgauaaacucuaguaugccauuccacaacauacacccucucaccaucggggaaugccccaaauaugugaaaucaaacaaauuaguccuugcgacugggcucagaaauaguccucuaagagaaagaagaagaaaaagaggacuauuuggagcuauagcagguuuuauagagggcggauggcagggaaugguagaugguugguauggguuucaccauagcaaugagcaggggaguggguacgcugcagacaaagaauccacucaaaaggcaauagauggagucaccaauaaggucaacucaaucauugacaaaaugaacacucaguuugaggccguuggaagggaauuuaauaacuuagagaggagaauagagaauuuaaacaagaaaauggaagacggguuccuagaugucuggacuuauaaugcugaacuucugguucucauggaaaaugagagaacucuagacuuccaugauucaaaugucaagaaccuuuacgacaagguccgacuacagcuuagggauaaugcaaaggagcuggguaacgguuguuucgaguucuaucacaaaugugauaaugaaugcauggaaaguguaagaaacggaacguaugacuacccgcaguauucagaagaagcaagauuaaaaagagaggaaauaaguggaguaaaauuggaaucaauaggaacuuaccaaauacugucaauuuauucaacaguugcgaguucucuagcacuggcaaucaugguggcuggucuaucuuuauggaugugcuccaaugggucguuacaaugcagaauuugcauuuaa

SEQ ID NO: 34259 - RNA, 1704 nt, Artificial Sequence
  derived and/or modified CDS sequence (wt) from hemagglutinin__InfluenzaA__ABY19419
auggagaaaauagugcuucuucuugcaauaaucagccuuguuaaaagugaucagauuugcauugguuaccaugcaaacaacucgacagagcagguugacacaauaauggaaaagaacguuacuguuacacaugcucaagauauacuggaaaagacacacaacgggaagcucugcgaucuagauggagugaagccucugauuuuaagagauuguaguguagcuggauggcuccucggaaacccaaugugugaugaauucaucaaugugccggaauggucuuacauaguggagaaggccaacccagccaaugaccucuguuacccaggaaauuucaacgacuaugaagaacugaaacaccuauugagcaggauaaaccauuuugagaaaauucagaucauccccaaaaguucuugguccgaucaugaagccucaucaggggugagcucagcauguccauaccagggagugcccuccuuuuucagaaaugugguauggcuuaucaaaaagaacaauacauacccaacaauaaagagaagcuacaauaauaccaaccaggaagaucuuuugauacugugggggauucaucauucuaaugaugcagcagagcagacaaagcucuaucaaaacccaaccaccuauauuuccguugggacaucaacacugaaccagagauugguaccaaaaauagcuacuagauccaaaguaaacgggcaaagcggaaggauggauuucuucuggacaauuuuaaaaccgaaugaugcaaucaacuucgagaguaauggaaauuucauugcuccagaauaugcauacaaaauugucaagaaaggggacucggcaauuaugaaaagugagguggaguaugguaacugcaacaccaagugucaaacuccaauaggggcgauaaacucuaguaugccauuccacaacauacacccucucaccaucggggaaugccccaaauaugugaaaucaaacaaauuaguccuugcgacuggacucagaaauaguccucuaagagaaagaagaagaaaaagaggacuauuuggagcuauagcagguuuuauagagggcggauggcagggaaugguagaugguugguauggguaucaccauagcaaugagcaggggaguggguacgcugcagacaaagaauccacucaaaaggcaauagauggagucaccaauaaggucaacucaaucauugacaaaaugaacacucaguuugaggccguuggaagggaauuuaauaacuuagagaggagaauagagaauuuaaacaagaaaauggaagacggauuccuagaugucuggacuuauaaugcugaacuucugguucucauggaaaaugagagaacucuagacuuccaugauucaaaugucaagaaccuuuacgacaagguccgacuacagcuuagggauaaugcaaaggagcuggguaacgguuguuucgaguucuaucacaaaugugauaaugaaugcauggaaaguguaagaaacggaacguaugacuacccgcaguauucagaagaagcaagauuaaaaagagaggaaauaaguggaguaaaauuggaaucaauaggaacuuaccaaauacugucaauuuauucaacaguugcgaguucucuagcacuggcaaucaugguggcuggucuaucuuuauggaugugcuccaaugggucguuacaaugcagaauuugcauuuaa

SEQ ID NO: 34260 - RNA, 1698 nt, Artificial Sequence; identical to SEQ ID NO: 34210
  derived and/or modified CDS sequence (wt) from hemagglutinin__InfluenzaA__ABY51017

SEQ ID NO: 34261 - RNA, 1701 nt, Artificial Sequence; identical to SEQ ID NO: 33953
  derived and/or modified CDS sequence (wt) from hemagglutinin__InfluenzaA__ABY51028

SEQ ID NO: 34262 - RNA, 1698 nt, Artificial Sequence
  derived and/or modified CDS sequence (wt) from hemagglutinin__InfluenzaA__ABY51039
augaaaguaaaacuacugguccuguuaugcacauuuacagcuacaaaugcagacacaauauguauaggcuaccaugcuaacaacucgaccgacacuguugacacaguacuugaaaagaaugugacagugacacacucugucaaccugcuugagaacagucacaauggaaaacuaugucuauuaaaaggaauagccccacuacaauuggguaauugcagcguugccggguggaucuuaggaaacccagaaugcgaauuacugauuuccaaggagucaugguccuacauuguagaaacaccaaauccugagaauggaacauguuacccagggcauuucgcugacuaugaggaacugagggagcaauugaguucaguaucuucauuugagagguucgaaauauuccccaaagaaagcucauggcccaaucacaccguaaccggagugucagcaucaugcucccauaauggggaaagcaguuuuuacagaaauuugcuauggcugacggggaagaaugguuuguacccaaaccugagcaaguccuaugcaaacaacaaagaaaaagaaguccuuguacuaugggguguucaucacccgccaaacauaggugaccaaaaggcccucuaucauacagaaaaugcuuaugucucuguagugucuucacauuauagcagaaaauucaccccagaaauagccaaaagacccaaaguaagagaucaagaaggaagaaucaacuacuacuggacucugcuugaacccggggauacaauaauauuugaggcaaauggaaaucuaauagcgccaagauaugcuuucgcacugaguagaggcuuuggaucaggaaucaucaacucaaaugcaccaauggauaaaugugaugcgaagugccaaacaccucagggagcuauaaacagcagccuuccuuuccagaauguacacccagucacaauaggagaguguccaaaguaugucaggagugcaaaauuaaggaugguuacaggacuaaggaacaucccauccauucaauccagagguuuguuuggagccauugccgguuucauugaagggggguggacuggaaugguagaugguugguaugguuaucaucaucagaaugagcaaggaucuggcuaugcugcagaucaaaaaagcacacaaaaugccauuaaugggauuacaaacaaggugaauucuguaauugagaaaaugaacacucaauucacagcagugggcaaagaauucaacaaauuggaaagaaggauggaaaacuugaauaaaaaaguugaugauggguuuauagacauuuggacauauaaugcagaacuguugguucuacuggaaaaugaaaggacuuuggauuuccaugacuccaaugugaagaaucuguaugagaagguaaaaggccaguuaaagaauaaugccaaagaaauaggaaauggguguuuugaauucuaucacaaguguaacgaugaaugcauggagaguguaaagaauggaacuuaugacuauccaaaauauuccgaagaaucaaaguuaaacagggagaaaauugauggagugaaauuggaaucaaugggagucuaucagauucuggcgaucuacucaacagucgccaguucucugguucuuuuggucucccugggggcaaucagcuucuggauguguuccaaugggucuuugcaguguagaauaugcaucuaa

SEQ ID NO: 34263 - RNA, 1698 nt, Artificial Sequence
  derived and/or modified CDS sequence (wt) from hemagglutinin__InfluenzaA__ABY51050
augaaaguaaaacuacugguccuguuaugcacauuuacagcuacauaugcagacacaauauguauaggcuaccaugcuaacaacucgaccgacacuguugacacaguacuugaaaagaaugugacagugacacacucugucaaccugcuugagaacagucacaauggaaaacuaugucuauuaaaaggaauagccccacuacaauuggguaauugcagcguugccggguggaucuuaggaaacccagaaugcgaauuacugauuuccaaggagucaugguccuacauuguagaaaaaccaaauccugagaauggaacauguuacccagggcauuucgcugacuaugaggaacugagggagcaauugaguucaguaucuucauuugagagguucgaaauauuccccaaagaaagcucauggcccaaccacaccguaaccggagugucagcaucaugcucccauaauggggaaagcaguuuuuacagaaauuugcuauggcugacggggaagaaugguuuguacccaaaccugagcaaguccuaugcaaacaacaaagaaaaagaaguccuuguacuaugggguguucaucacccgccaaacauaggugaccaaaaggcccucuaucauacagaaaaugcuuaugucucuguagugucuucacauuauagcagaaaauucaccccagaaauagccaaaagacccaaaguaagagaucaagaaggaagaaucaacuacuacuggacucugcuugaacccggggauacaauaauauuugaggcaaauggaaaucuaauagcgccaagauaugcuuucgcacugaguagaggcuuuggaucaggaaucaucaacucaaaugcaccaauggauaaaugugauucgaaaugccaaacaccucagggagcuauaaacagcagucuuccuuuccagaauguacacccagucacaauaggagaguguccaaaguaugucaggagugcaaaauuaaggaugguuacaggacuaaggaacaucccauccauucaauccagagguuuguuuggagccauugccgguuucauugaagggggguggacuggaaugguagaugguugguaugguuaucaucaucagaaugagcaaggaucuggcuaugcugcagaucaaaaaagcacacaaaaugccauuaaugggauuacaaacaaggugaauucuguaauugagaaaaugaacacucaauucacagcagugggcaaagaauucaacaaauuggaaagaaggauggaaaacuugaauaaaaaaguugaugauggguuuauagacauuuggacauauaaugcagaacuguugguucuacuggaaaaugaaaggacuuuggauuuccaugacuccaaugugaagaaucuguaugagaaaguaaaaagccaguuaaagaauaaugccaaagaaauaggaaauggguguuuugaauucuaucacaaguguaacgaugaaugcauggagaguguaaagaauggaacuuaugacuauccaaaauauuccgaagaaucaaaguuaaacagggagaaaauugauggagugaaauuggaaucaaugggagucuaucagauucuggcgaucuacucaacagucgccaguucucugguucuuuuggucucccugggggcaaucagcuucuggauguguuccaaugggucuuugcaguguagaauaugcaucuaa

SEQ ID NO: 34264 - RNA, 1698 nt, Artificial Sequence
  derived and/or modified CDS sequence (wt) from hemagglutinin__InfluenzaA__ABY51061
augaaaguaaaacuacugguucuguuauguacauuuacagcuacauaugcagacacaauauguauaggcuaccaugccaacaauucaaccgacacuguugacacagugcuugagaagaaugugacagugacacacucugucaaccuacuugaggacagucacaauggaaaacuaugucuacuaaaaggaauagccccacuacaauuggguaauugcagcguugccggauggaucuuaggaaacccagaaugcgaauuacugauuuccaaggaaucaugguccuacauuguagaaacaccaaauccugagaauggaacauguuacccaggguauuucgccgacuaugaggagcugagggagcaauugaguucaguaucuucauuugagagguucgaaauauuccccaaagagaacucauggcccaaccacaccguaaccggaguaucagcaucaugcucccauaacgggaaaagcaguuuuuacagaaauuugcuauggcugacggggaagaaugguuuguacccaaaccugagcaaguccuaugcaaacaacaaagagaaagaaguccuuguacuaugggguguucaucacccgccuaacauaggggaccaaagggcccucuaucauacagaaaaugcuuaugucucuguagugucuucacauuauagcagaagauucaccccagaaauagccaaaagacccaaggugagagaucaggaaggaagaaucaacuacuacuggacucugcuggaacccggggauacaauaauauuugaggcaaauggaaaucuaauagcgccaagguuugcuuucgcacugaguagaggcuugggaucaggaaucaucaccucaaaugcaccaauggaugaaugugaugcgaaaugucaaacaccucagggagcuauaaacagcagucuuccuuuccagaauguacacccagucacaauaggagagugucccaaguaugucaggagugcaaaauuaaggaugguuacaggacuaaggaacaucccauccauucaauccagagguuuguuuggagccauugccgguuucauugaagggggguggacuggaaugguagaugguugguaugguuaucaucaucagaaugagcaaggaucuggguaugcugcagaucagaaaagcacacaaaaugccauuaacgggauuacaaacaaggugaauucuguaauugagaaaaugaacacucaauucacagcugugggcaaagaauucaacaaauuggaaagaaggauggaaaacuuaaauaaaaaaguugaugauggguuucuagacauuuggaccuauaaugcggaauuguugguucuacuggaaaaugaaaggacuuuggauuuccaugacuccaacgugaagaaucuguaugagaaaguaaaaagccaauuaaagaauaaugccaaagaaauaggaaacggguguuuugaauucuaucacaaguguaacgaugaaugcauggagagugugaaaaauggaacuuaugacuauccaaaauauuccgaagaaucaaaguugaacagggagaaaauugauggagugaaauuggaaucaaugggagucuaucagauucuggcgaucuacucaacagucgccaguucccugguucuuuuggucucccugggggcaaucagcuucuggauguguuccaaugggucuuugcaguguagaauaugcaucuaa

SEQ ID NO: 34265 - RNA, 1698 nt, Artificial Sequence
  derived and/or modified CDS sequence (wt) from hemagglutinin__InfluenzaA__ABY51072
augaaaguaaaacuacugauucuguuauguacauuuacagcuacauaugcagacacaauauguauaggcuaccaugccaacaacucgaccgacacuguugacacaguacuugagaagaaugugacagugacacacucugucaaccuacuugaggacagucacaauggaaaacuaugucuacuaaaaggaauagccccacuacaauuggguaauugcagcguugccggauggaucuuaggaaacccagaaugcgaauuacugauuuccaaggaaucaugguccuacauuguagagacaccaaauccugagaauggaacauguuacccaggguauuucgccgacuaugaggagcugagagagcaauugaguucaguaucuucauuugagagguucgaaauauuccccaaagagagcucauggcccaaccacaccguaaccggaguaucagcaucaugcucccauaacgggaaaagcaguuuuuacagaaauuugcuauggcugacggggaagaaugguuuguauccaaaccugagcaaguccuaugcaaacaacaaagagaaagaaguccuuguacugugggguguucaucacccgccuaacauaggggaccaaagggcccucuaucauacagaaaaugcuuaugucucuguagugucuucacauuauagcagaagauucaccccagaaauagccaaaagacccaaggugagagaucaggaaggaagaaucaacuacuacuggacucugcuugaacccggggauacaauaauauuugaggcaaauggaaaucuaauagcgccaagguuugcuuucgcacugaguagaggcuuuggaucaggaaucaucaccucaaaugcaccaauggaugaaugugaugcgaaaugucaaacaccucagggagcuauaaacagcagucuuccuuuccagaauguacacccggucacaauaggagaguguccaaaguaugucaggaguacaaaauuaagaaugguuacaggacuaaggaacaucccauccauucaauccagagguuuauuuggagccauugccgguuucauugaagggggguggacuggaaugguagaugguugguaugguuaucaccaucagaaugagcaaggaucuggguaugcugcagaucaaaaaagcacacaaaaugccauuaacgggauuacaaacaaggugaauucuguaauugagaaaaugaacacucaauucacagcugugggcaaagcauucaacaaauuggaaagaaggauggaaaacuuaaauaaaaaaguugaugauggguuucuagacauuuggacauauaacgcagaauuguugguucuacuggaaaaugaaaggacuuuggacuuccaugacuccaacgugaagaaucuguaugagaaaguaaaaagccaauuaaagaauaaugccaaagaaauaggaaacggguguuuugaauucuaucacaaguguaacgaugaaugcauggagagugugaaaaauggaacuuaugacuauccaaaauauuccgaagaaucaaaguugaacagggagaaaauugauggagugaaauuggaaucaaugggggucuaucagauuuuggcgaucuacucaacagucgccaguucccugguucuuuuggucucccugggggcaaucagcuucuggauguguuccaaugggucuuugcaguguagaauaugcaucuaa

SEQ ID NO: 34266 - RNA, 1698 nt, Artificial Sequence
  derived and/or modified CDS sequence (wt) from hemagglutinin__InfluenzaA__ABY51083
augaaagugaaacuacugguucuguuauguacauuuacagcuacauaugcagacacaauauguauaggcuaccaugccaacaacucgaccgacacuguugacacaguacuugagaagaaugugacagugacacacucugucaaccuacuugaggaccgucacaauggaaaacuaugucuacuaaaaggaauagccccacuacaauuggguaauugcagcguugccggauggaucuuaggaaacccagaaugcgaauuacugauuuccaaggaaucauggucuuacauuguagaaacaccaaauccugagaauggaacauguuacccaggguauuucgccgacuaugaggagcugagggagcaauugaguucaguaucuucauuugagagguucgaaauauuccccaaagagagcucauggcccaaccacaccguaaccggaguaucagcaucaugcucccauaacgggaaaagcaguuuuuacagaaauuugcuauggcugacgggaaagaaugguuuguacccaaaccugagcagauccuaugcaaacaacaaagagaaagaaguccuuguacugugggguguucaucacccgccuaacauaggggaccaaagggcccucuaucauacagaaaaugcuuaugucucuguagugucuucacauuauagcagaagauucaccccagaaauagccaaaagacccaaggugagagaucaggaaggaagaaucaauuacuacuggacucuacuggaacccggggauacaauaauauuugaggcaaaugggaaucuaauagcgccaagguuugcuuucgcacugaguagaggcuuuggaucaggaaucaucaccucaaaugcaccaauggaugaaugugaugcgaagugucaaacaccucagggagcuauaaacagcagucuuccuuuccagaauguacacccagucacaauaggagaguguccaaaguaugucaggagugcaaaauuaagaaugguuacaggacuaaggaacaucccauccauucaauccagagguuuguuuggagccauugccgguuucauugaagggggguggacuggaaugguagaugguugguaugguuaucaccaccagaaugagcaaggaucuggguaugcugcagaucaaaaaagcacacaaaaugccauuaacgggauuacaaacaaggugaauucugugauugagaaaaugaacacucaauucacagcugugggcaaagaauuuaacaaauuggaaaggagaauggaaaacuuaaauaaaaaaguugaugauggguuucuagacauuuggacguauaacgcagaguuguugguucuacuggaaaaugaaaggacuuuggacuuccaugacuccaacgugaagaaucuguaugagaaaguaaaaagccaauuaaagaauaaugccaaagaaauaggaaacggguguuuugaauucuaucacaaguguaacgaugaaugcauggagagugugaaaaauggaacuuaugacuauccaaaauauuccgaagaaucaaaguuaaacagggagaaaauugauggagugaaauuggaaucaaugggagucuaucagauucuggcgaucuacucaacagucgccaguucccugguucuuuuggucucccugggggcaaucagcuucuggauguguuccaaugggucuuugcaguguagaauaugcaucuaa

SEQ ID NO: 34267 - RNA, 1698 nt, Artificial Sequence; identical to SEQ ID NO: 34207
  derived and/or modified CDS sequence (wt) from hemagglutinin__InfluenzaA__ABY51094

SEQ ID NO: 34268 - RNA, 1698 nt, Artificial Sequence
  derived and/or modified CDS sequence (wt) from hemagglutinin__InfluenzaA__ABY51105
augaaaguaaaacuacugguucuguuauguacauuuacagcuacauaugcagacacaauauguauaggcuaccaugccaacaacucgaccgacacuguugacacaguacuugagaagaaugugacagugacacacucugucaaccuacuugaggacagucacaauggaaaacuaugucuacuaaaaggaauagccccacuacaauuggguaauugcagcguugccggauggaucuuaggaaacccagaaugcgaauuacugauuuccaaggaaucaugguccuacauuguagagacaccaaauccugagaauggaacauguuacccaggguauuucgccgacuaugaggagcugagagagcaauugaguucaguaucuucauuugagagguucgaaauauuccccaaagagagcucauggcccaaccacaccguaaccggaguaucagcaucaugcucccauaacgggagaagcaguuuuuacagaaauuugcuauggcugacggggaagaaugguuuguauccaaaccugagcaaguccuaugcaaacaacaaagagaaagaaguccuuguacugugggguguucaucacccgccuaacauaggggaccaaagggcccucuaucauacagaaaaugcuuauguuucuguagugucuucacauuauagcagaagauucaccccagaaauagccaaaagacccaaggugagagaucaggaaggaagaaucaacuacuacuggacucugcuugaacccggggauacaauaauauuugaggcaaauggaaaucuaauagcgccaagguuugcuuucgcacugaguagaggcuuuggaucaggaaucaucaccucaaaugcaccaauggaugaaugugaugcgaaaugucaaacaccucagggagcuauaaacagcagucuuccuuuccagaauguacacccagucacaauaggagaguguccaaaguaugucaggaguacaaaauuaagaaugguuacaggacuaaggaacaucccauccauucaauccagagguuuguuuggagccauugccgguuucauugaagggggguggacuggaaugguagaugguugguaugguuaucaccaucagaaugagcaaggaucuggguaugcugcagaucaaaaaagcacacaaaaugccauuaacgggauuacaaacaaggugaauucuguaauugagaaaaugaacacucaauucacagcugugggcaaagaauucaacaaauuggaaagaaggauggaaaacuuaaauaaaaaaguugaugauggguuucuagacauuuggacauauaacgcagaauuguugguucuacuggaaaaugaaaggacuuuggacuuccaugacuccaacgugaagaaucuguaugagaaaguaaaaagccaauuaaagaauaaugccaaagaaauaggaaacggguguuuugaauucuaucacaaguguaacgaugaaugcauggagagugugaaaaauggaacuuaugacuauccaaaauauuccgaagaaucaaaguugaacagggagaaaauugauggagugaaauuggaaucaaugggagucuaucagauuuuggcgaucuacucaacagucgccaguucccugguucuuuuggucucccugggggcaaucagcuucuggauguguuccaaugggucuuugcaguguaggauaugcaucuaa

SEQ ID NO: 34269 - RNA, 1698 nt, Artificial Sequence
  derived and/or modified CDS sequence (wt) from hemagglutinin__InfluenzaA__ABY51116
augaaaguaaaacuacugguucuguuauguacauuuacagcuacauaugcagacacaauauguauaggcuaccaugccaacaacucgaccgacacuguugacacaguacuugagaagaaugugacagugacacacucugucaaccuacuugaggacagucacaauggaaaacuaugucuacuaaaaggaauagccccacuacaauuggguaauugcagcguugccggauggaucuuaggaaacccagaaugcgaauuacugauuuccaaggaaucaugguccuacauuguagagacaccaaauccugagaauggaacauguuacccaggguauuucgccgacuaugaggagcugagagagcaauugaguucaguaucuucauuugagagguucgaaauauuccccaaagagagcucauggcccaaccacaccguaaccggaguaucagcaucaugcucccauaacgggaaaagcaguuuuuacagaaauuugcuauggcugacggggaagaaugguuuguauccaaaccugagcaaguccuaugcaaacaacaaagagaaagaaguccuuguacugugggguguucaucacccgccuaacauaggggaccaaagggcccucuaucauacagaaaaugcuuaugucucuguagugucuucacauuauagcagaagauucaccccagaaauagccaaaagacccaaggugagagaucaggaaggaagaaucaacuacuacuggacucugcuugaacccggggauacaauaauauuugaggcaaauggaaaucuaauagcgccaagguuugcuuucgcacugaguagaggcuuuggaucaggaaucaucaccucaaaugcaccaauggaugagugugaugcgaaaugucaaacaccucagggagcuauaaacagcagucuuccuuuccagaauguacacccagucacaauaggagaguguccaaaguaugucaggaguacaaaauuaagaaugguuacaggacuaaggaacaucccauccauucaauccagagguuuguuuggagccauugccgguuucauugaagggggguggacuggaaugguagaugguugguaugguuaucaccaucagaaugagcaaggaucuggguaugcugcagaucaaaaaagcacacaaaaugccauuaacgggauuacaaacaaggugaauucuguaauugagaaaaugaacacucaauucacagcugugggcaaagaauucaacaaauuggaaagaaggauggaaaacuuaaauaaaaaaguugaugauggguuucuagacauuuggacauauaacgcagaauuguugguucuacuggaaaaugaaaggacuuuggacuuccaugacuccaacgugaagaaucuguaugagaaaguaaaaagccaauuaaagaauaaugccaaagaaauaggaaacggguguuuugaauucuaucacaaguguaacgaugaaugcauggagagugugaaaaauggaacuuaugacuauccaaaauauuccgaagaaucaaaguugaacagggagaaaauugauggagugaaauuggaaucaaugggagucuaucagauuuuggcgaucuacucaacagucgccaguucccugguucuuuuggucucccugggggcaaucagcuucuggauguguuccaaugggucuuugcaguguagaauaugcaucuaa

SEQ ID NO: 34270 - RNA, 1701 nt, Artificial Sequence
  derived and/or modified CDS sequence (wt) from hemagglutinin__InfluenzaA__ABY51127
augaagacuaucauugcuuugagcuacauucuauguaugguuuucgcucaaaaacuuccuggaaaugacaacagcacggcaacgcugugccuugggcaccaugcaguaccaaacggaacgauagugaaaacaaucacgaaugaccaaauugaaguuacuaaugcuacugagcugguucagaguuccucaacaggugaaauaugcgacaguccucaucagauccuugauggagaaaacugcacacuaauagaugcucuauugggagacccucagugugauggcuuccaaaauaagaaaugggaccuuuuuguugaacgcagcaaagccuacagcaacuguuacccuuaugaugugccggauuaugccucccuuaggucacuaguugccucauccggcacacuggaguuuaacaaugaaagcuucaauuggacuggagucacucaaaacggaacaagcucugcuugcauaaggagaucuaauaacaguuucuuuaguagauugaauugguugacccacuuaaaauucaaauacccagcauugaacgugacuaugccaaacaaugaaaaauuugacaaauuguacauuugggggguucaccacccggguacggacaaugaccaagucuuccuguaugcucaagcaucaggaagaaucacagucucuaccaaaagaagccaacaaacuguaaucccgaauaucggaucuagacccagaguaaggaauauccccagcagaauaagcaucuauuggacaauaguaaaaccgggagacauacuuuugauuaacagcacagggaaucuaauugcuccuagggguuacuucaaaauacgaagugggaaaagcucaauaaugagaucagaugcacccauuggcaaaugcaauucugaaugcaucacuccaaauggaagcauucccaaugacaaaccauuccaaaauguaaacaggaucacauacggggccugucccagauauguuaagcaaaacacucugaaauuggcaacagggaugcgaaauguaccagagaaacaaacuagaggcauauuuggcgcaaucgcggguuucauagaaaaugguugggagggaaugguggaugguugguacgguuucaggcaucaaaauucugagggaauaggacaagcagcagaucucaaaagcacucaagcagcaaucgaucaaaucaaugggaagcugaauagguugaucgggaaaaccaacgagaaauuccaucagauugaaaaagaauucucagaagucgaagggagaauucaggaccuugagaaauauguugaggacaccaaaauagaucucuggucauacaacgcggagcuucuuguugcccuggagaaccaacauacaauugaucuaacugacucagaaaugaacaaacuguuugaaaaaacaaagaagcaacugagggaaaaugcugaggauaugggaaaugguuguuucaaaauauaccacaaaugugacaaugccugcauaggaucaaucagaaauggaacuuaugaccacgauguauacagagaugaagcauuaaacaaccgguuccagaucaagggcguugagcugaagucaggauacaaagauuggauccuauggauuuccuuugccauaucauguuuuuugcuuuguguugcuuuguugggguucaucaugugggccugccaaaaaggcaacauuaggugcaacauuugcauuuga

SEQ ID NO: 34271 - RNA, 1698 nt, Artificial Sequence
  derived and/or modified CDS sequence (wt) from hemagglutinin__InfluenzaA__ABY51138
augaaagugaaacuacugguucuguuauguacauuuacagcuacauaugcagacacaauauguauaggcuaccaugccaacaacucgaccgacacuguugacacaguacuugagaagaaugugacagugacacacucugucaaccuacuugaggaccgucacaauggaaaacuaugucuacuaaaaggaauagccccacuacaauuggguaauugcagcguugccggauggaucuuaggaaacccagaaugcgaauuacugauuuccaaggaaucaugguccuacauuguagaaacaccaaauccugagaauggaacauguuacccaggguauuucgccgacuaugaggagcugagggagcaauugaguucaguaucuucauuugagagguucgaaauauuccccaaagagagcucauggcccaaccacaccguaaccggaguaucagcaucaugcucccauaacgggaaaagcaguuuuuacagaaauuugcuauggcugacgggaaagaaugguuuguacccaaaccugagcagauccuaugcaaacaacaaagaaaaagaaguccuuguacugugggguguucaucacccgccuaacauaggggaccaaagggcccucuaucauacagaaaaugcuuaugucucuguagugucuucacauuauagcagaagauucaccccagaaauagccaaaagacccaaggugagagaucaggaaggaagaaucaauuacuacuggacucuacuggaacccggggauacaauaauauuugaggcaaaugggaaucuaauagcgccaagguuugcuuucgcacugaguagaggcuuuggaucaggaaucaucaccucaaaugcaccaauggaugaaugugaugcgaagugucaaacaccucagggagcuauaaacaguagucuuccuuuccagaauguacacccagucacaauaggagaguguccaaaguaugucaggagugcaaaauuaagaaugguuacaggacuaaggaacaucccauccauucaauccagagguuuguuuggagccauugccgguuucauugaagggggguggacuggaaugguagaugguugguaugguuaucaccaccagaaugagcaagguucuggguaugcugcagaucaaaaaagcacacaaaaugccauuaacgggauuacaaacaaggugaauucugugauugagaaaaugaacacucaauucacagcugugggcaaagaauucaacaaauuggaaagaagaauggaaaacuuaaauaaaaaaguugaugauggguuucuagacauuuggacguauaacgcagaauuguugguucuacuggaaaaugaaaggacuuuggacuuccaugacuccaacgugaagaaucuguaugagaaaguaaaaauccaauuaaagaauaaugccaaagaaauaggaaacggguguuuugaauucuaucacaaguguaacgaugaaugcauggagagugugaaaaauggaacuuaugacuauccaaaauauuccgaagaaucaaaguuaaacagggagaaaauugauggagugaaauuggaaucaaugggagucuaucagauucuggcgaucuacucaacagucgccaguucccugguucuuuuggucucccugggggcaaucagcuucuggauguguuccaaugggucuuugcaguguagaauaugcaucuaa

SEQ ID NO: 34272 - RNA, 1698 nt, Artificial Sequence; identical to SEQ ID NO: 33973
  derived and/or modified CDS sequence (wt) from hemagglutinin__InfluenzaA__ABY51149

SEQ ID NO: 34273 - RNA, 1698 nt, Artificial Sequence
  derived and/or modified CDS sequence (wt) from hemagglutinin__InfluenzaA__ABY51160
augaaagugaaacuacuaguucuguuauguacauuuacagcuacauaugcagacacaauauguauaggcuaccaugccaacaacucgaccgacacuguugacacaguacuugagaagaaugugacagugacacacucugucaaccuacuugaggaccgucacaauggaaaacuaugucugcuaaaaggaauagccccacuacaauuggguaauugcagcguugccggauggaucuuaggaaacccagaaugcgaauuacugauuuccaaggaaucaugguccuacauuguagaaacaccaaauccugagaauggaacauguuacccaggguauuucgccgacuaugaggagcugagggagcaauugaguucaguaucuucauuugagagguucgaaauauuccccaaagagagcucauggcccaaccacaccguaaccggaguaucagcaucaugcucccauaacgggaaaagcaguuuuuacagaaauuugcuauggcugacgggaaagaaugguuuguacccaaaccugagcaaauccuaugcaaacaauaaagagaaagaaguccuuguacugugggguguucaucacccgccuaacauaggggaccaaagggcccucuaucauacagaaaaugcuuaugucucuguagugucuucacauuauagcagaagauucaccccagaaauagccaaaagacccaaggugagagaucaggaaggaagaaucaacuacuacuggacucuacuggaacccggggauacaauaauauuugaggcaaauggaaaucuaauagcgccaagguuugcuuucgcacugaguagaggcuuuggaucaggaaucaucaccucaaaugcaccaauggauaaaugugaugcgaagugucaaacaccucagggagcuauaaacagcagucuuccuuuccagaauguacacccagucacaauaggagaguguccaaaguaugucaggagugcaaaauuaagaaugguuacaggacuaaggaacaucccauccauucaauccagagguuuguuuggagccauugccgguuucauugaagggggguggacuggaaugauagaugguugguaugguuaucaccaccagaaugagcaaggaucuggguaugcugcagaucaaaaaagcacacaaaaugccauuaacgggauuacaaacaaggugaauucugugauugagaaaaugaacacucaauucacagcugugggcaaagaauucaacaaauuggaaagaaggauggaaaacuuaaauaaaaaaguugaugauggguuucuagacauuuggacguauaacgcagaauuguugguucuacuggaaaaugaaaggacuuuggacuuccaugacuccaacgugaagaaucuguaugagaaaguaaaaagccaauuaaagaauaaugccaaagaaauaggaaacggguguuuugaauucuaucacaaguguaacgaugaaugcauggagagugugaaaaauggaacuuaugacuauccaaaauauuccgaagaaucaaaguuaaacagggagaaaauugauggagugaaauuggaaucaaugggagucuaucagauucuggcgaucuacucaacagucgccaguucccugguucuuuuggucucccugggggcaaucagcuucuggauguguuccaaugggucuuugcaguguagaauaugcaucuaa

SEQ ID NO: 34274 - RNA, 1698 nt, Artificial Sequence
  derived and/or modified CDS sequence (wt) from hemagglutinin__InfluenzaA__ABY51171
augaaaguaaaacuacuuguucuguuauguacauuuacagcuacauaugcagacacaauauguauaggcuaccaugccaacaacucgaccgacacuguugacacaguacuugagaagaaugugacagugacacacucugucaaccuacuugaggacagucacaauggaaaacuaugucuacuaaaaggaauagccccacuacaauuggguaauugcagcguugccggauggaucuuaggaaacccagaaugcgaauuacugauuuccaaggaaucaugguccuacauuguagaaacaccaaauccugagaauggaacauguuacccaggauauuucgccgacuaugaggagcugagggagcaauugaguucaguaucuucauuugagagguucgaaauauuccccaaagagagcucauggcccaaccacaccguaaccggaguaucagcaucaugcucccauaacgggaaaagcaguuuuuacagaaauuugcuauggcugacggggaagaaugguuuguauccaaaccugagcaaguccuaugcaaacaacaaagagaaagaaguccuuguacugugggguguucaucacccgccuaacauaggggaccaaagggcccucuaucacacagaaaaugcuuaugucucuguagugucuucacauuauagcagaagauucaccccagaaauagccaaaagacccaaggugagagaucaggaaggaagaaucaacuacuacuggacucugcuggaacccggggauacaauaauauuugaggcaaauggaaaucuaauagcgccaagguuugcuuucgcacugaguagaggcuuuggaucaggaaucaucaccucaaaugcaccaaugggugaaugugaugcgaagugucaaacaccucagggagcuauaaacaguagucuuccuuuccagaauguacacccagucacaauaggagaguguccaaaguaugucaggagugcaaaauuaagaaugguuacagggcuaaggaacaucccauccauucaauccagagguuuguuuggagccauugccgguuucauugaagggggguggacuggaaugguagaugguugguaugguuaucaccaucagaaugagcaaggaucuggguaugcugcagaucaaaaaagcacacaaaaugccauuaacgggauuacaaacaaggugaauucuguaauugagaaaaugaacacucaauucacagcugugggcaaagaauucaacaaauuggaaagaaggauggaaaacuuaaauaaaaagguugaugauggguuucuagacauuuggacauauaacgcagaauuguugguucuacuggaaaaugaaaggacuuuggacuuccaugacuccaacgugaagaaucuguaugagaaaguaaaaagccaauuaaagaauaaugccaaagaaauaggaaacggguguuuugaauucuaucacaaguguaacgaugaaugcauggagagugugaaaaauggaacuuaugacuaucaaaaauauuccgaagaaucaaaguugaacagggagaaaauugauggagugaaauuggaaucaaugggagucuaucagauucuggcgaucuacucaacagucgccaguucccugguucuuuuggucucccugggggcaaucagcuucuggauguguuccaaugggucuuuacaguguagaauaugcaucuaa

SEQ ID NO: 34275 - RNA, 1698 nt, Artificial Sequence
  derived and/or modified CDS sequence (wt) from hemagglutinin__InfluenzaA__ABY51182
augaaaguaaaacuacugauucuguuauguacauuuacagcuacauaugcagacacaauauguauagguuaccaugccaacaacucgaccgacacuguugacacaguacuugagaagaaugugacagugacacacucugucaaccuacuugaggacagucacaauggaaaacuaugucuacuaaaaggaauagccccacuacaauuggguaauugcaguguugccggauggaucuuaggaaacccagaaugcgaauuacugauuuccaaggaaucaugguccuacauuguagagacaccaaauccugagaauggaacauguuacccaggguauuucgccgacuaugaggagcugagagagcaauugaguucaguaucuucauuugagagguucgaaauauuccccaaagagagcucauggcccaaccacaccguaaccggaguaucagcaucaugcucccauaacgggaaaagcaguuuuuacagaaauuugcuauggcugacggggaagaaugguuuguauccaaaccugagcaaguccuaugcaaacaacaaagagaaagaaguccuuguacugugggguguucaucacccgccuaacauaggggaccaaagggcccucuaucauacagaaaaugcuuaugucucuguagugucuucacauuauagcagaagauucaccccagaaauagccaaaagacccaaggugagagaucaggaaggaagaaucaacuacuacuggacucugcuugaacccggggauacaauaauauuugaggcaaauggaaaucuaauagcgccaagguuugcuuucgcacugaguagaggcuuuggaucaggaaucaucaccucaaaugcaccaauggaugaaugugaugcgaaaugucaaacaccucagggagcuauaaacagcagucuuccuuuucagaauguacacccagucacaauaggagaguguccaaaguaugucaggaguacaaaauuaagaaugguuacaggacuaaggaacaucccauccauucaauccagagguuuauuuggagccauugccgguuucauugaagggggguggacuggaaugguagaugguugguaugguuaucaccaucagaaugagcaaggaucuggguaugcugcagaucaaaaaagcacacaaaaugccauuaacgggauuacaaacaaggugaauucuguaauugagaaaaugaacacucaauucacagcugugggcaaagaauucaacaaauuggaaagaaggauggaaaacuuaaauaaaaaaguugaugauggguuucuagacauuuggacauauaacgcagaauuguugguucuacuggaaaaugaaaggacuuuggacuuccaugacuccaacgugaagaaucuguaugagaaaguaaaaagccaauuaaagaauaaugccaaagaaauaggaaacggguguuuugaauucuaucacaaguguaacgaugaaugcauggagagugugaaaaauggaacuuaugacuauccaaaauauuccgaagaaucaaaguugaacagggagaaaauugauggagugaaauuggaaucaaugggagucuaucagauuuuggcgaucuacucaacagucgccaguucccugguucuuuuggucucccugggggcaaucagcuucuggauguguuccaaugggucuuugcaguguagaauaugcaucuaa

SEQ ID NO: 34276 - RNA, 1698 nt, Artificial Sequence; identical to SEQ ID NO: 34079
  derived and/or modified CDS sequence (wt) from hemagglutinin__InfluenzaA__ABY51193

SEQ ID NO: 34277 - RNA, 1698 nt, Artificial Sequence; identical to SEQ ID NO: 33937
  derived and/or modified CDS sequence (wt) from hemagglutinin__InfluenzaA__ABY51237

SEQ ID NO: 34278 - RNA, 1698 nt, Artificial Sequence
  derived and/or modified CDS sequence (wt) from hemagglutinin__InfluenzaA__ABY51248
augaaaguaaaacuacuuguucuguuauguacauuuacagcuacauaugcagacacaauauguauaggcuaccaugccaacaacucgaccgacacuguugacacaguacuugagaagaaugugacagugacacacucugucaaccuacuugaggacagucacaauggaaaacuaugucuacuaaaaggaauagccccacuacaauuggguaauugcagcguugccggauggaucuuaggaaacccagaaugcgaauuacugauuuccaaggaaucaugguccuacauuguagaaacaccaaauccugagaauggaacauguuacccaggauauuucgccgacuaugaggagcugagggagcaauugaguucaguaucuucauuugagagguucgaaauauuccccaaagagagcucauggcccaaccacaccguaaccggaguaucagcaucaugcucccauaacgggaaaagcaguuucuacagaaauuugcuauggcugacggggaagaaugguuuguauccaaaccugagcaaguccuaugcaaacaacaaagagaaagaaguccuuguacugugggguguucaucacccgccuaacauaggggaccaaagggcccucuaucauacagaaaaugcuuaugucucuguagugucuucacauuauagcagaagauucaccccagaaauagccaaaagacccaaggugagagaucaggaaggaagaaucaacuacuacuggacucugcuggaacccggggauacaauaauauuugaggcaaauggaaaucuaauagcgccaagguuugcuuucgcacugaguagaggcuuuggaucaggaaucaucaccucaaaugcaccaaugggugaaugugaugcgaagugucaaacaccucagggagcuauaaacaguagucuuccuuuccagaauguacauccagucacaauaggagaguguccaaaguaugucaggagugcaaaauuaagaaugguuacaggacuaaggaacaucccauccauucaauccagagguuuguuuggagccauugccgguuucauugaagggggguggacuggaaugguagaugguugguaugguuaucaccaucagaaugagcaaggaucuggguaugcugcagaucaaaaaagcacacaaaaugccauuaacgggauuacaaacaaggugaauucuguaauugagaaaaugaacacucaauucacagcugugggcaaagaauucaacaaauuggaaagaaggauggaaaacuuaaauaaaaagguugaugauggguuucuagacauuuggacauauaacgcagaauuguugguucuacuggaaaaugaaaggacuuuggacuuccaugacuccaacgugaagaaucuguaugagaaaguaaaaagccaauuaaagaauaaugccaaagaaauaggaaacggguguuuugaauucuaucacaaguguaacgaugaaugcauggagagugugaaaaauggaacuuaugacuauccaaaauauuccgaagaaucaaaguugaacagggagaaaauugauggagugaaauuggaaucaaugggagucuaucagauucuggcgaucuacucaacagucgccaguucccugguucuuuuggucucccugggggcaaucagcuucuggauguguuccaaugggucuuugcaguguagaauaugcaucuaa

SEQ ID NO: 34279 - RNA, 1698 nt, Artificial Sequence
  derived and/or modified CDS sequence (wt) from hemagglutinin__InfluenzaA__ABY51259
augaaaguaaaacuacugauucuguuauguacauuuacagcuacauaugcagacacaauauguauaggcuaccaugccaacaacucgaccgacacuguugacacaguacuugagaagaaugugacagugacacacucugucaaccuacuugaggacagucacaauggaaaacuaugucuacuaaaaggaauagccccacuacaauuggguaauugcagcguugccggauggaucuuaggaaacccagaaugcgaauuacugauuuccaaggaaucaugguccuacauuguagagacaccaaauccugagaauggaacauguuacccaggguauuucgccgacuaugaggagcugagagagcaauugaguucaguaucuucauuugagagguucgaaauauuccccaaagagagcucauggcccaaccacaccguaaccggaguaucagcaucaugcucccauaacgggaaaagcaguuuuuacagaaauuugcuauggcugacggggaagaaugguuuguauccaaaccugagcaaguccuaugcaaacaacaaagagaaagaaguccuuguacugugggguguucaucacccgccuaacauaggggaccaaagggcccucuaucauacagaaaaugcuuaugucucuguagugucuucacauuauagcagaagauucaccccagaaauagccaaaagacccaaggugagagaucaggaaggaagaaucaacuacuacuggacucugcuugaacccggggauacaauaauauuugaggcaaauggaaaucuaauagcgccaagguuugcuuucgcacugaguagaggcuuuggaucaggaaucaucaccuccaaugcaccaauggaugaaugugaugcgaaaugucaaacaccucagggagcuauaaacagcagucuuccuuuccagaauguacacccagucacaauaggagaguguccaaaguaugucaggaguacaaaauuaagaaugguuacaggacuaaggaacaucccauccauucaauccagagguuuauuuggagccauugccgguuucauugaagggggguggacuggaaugguagaugguugguaugguuaucaccaucagaaugagcaaggaucuggguaugcugcagaucaaaaaagcacacaaaaugccauuaacgggauuacaaacaaggugaauucuguaauugagaaaaugaacacucaauucacagcugugggcaaagaauucaacaaauuggaaagaaggauggaaaacuuaaauaaaaaaguugaugauggguuucuagacauuuggacauauaacgcagaauuguugguucuacuggaaaaugaaaggacuuuggacuuccaugacuccaacgugaagaaucuguaugagaaaguaaaaagccaauuaaagaauaaugccaaagaaauaggaaacggguguuuugaauucuaucacaaguguaacgaugaaugcauggagagugugaaaaauggaacuuaugacuauccaaaauauuccgaagaaucaaaguugaacagggagaaaauugauggagugaaauuggaaucaaugggggucuaucagauuuuggcgaucuacucaacagucgccaguucccugguucuuuuggucucccugggggcaaucagcuucuggauguguuccaaugggucuuugcaguguagaauaugcaucuaa

SEQ ID NO: 34280 - RNA, 1701 nt, Artificial Sequence
  derived and/or modified CDS sequence (wt) from hemagglutinin__InfluenzaA__ABY51270
augaagacuaucauugcuuugagcuacauucuaugucugguuuucgcucaaaaacuuccuggaaaugacaacagcacggcaacgcugugccuugggcaccaugcaguaccaaacggaacgauagugaaaacaaucacgaaugaccaaauugaaguuacuaaugcuacugagcugguucagaguuccucaacaggugaaauaugcgacaguccucaucagauccuugauggagaaaacugcacacugauagaugcucuauugggagacccucagugugauggcuuccaaaauaagaaaugggaccuuuuuguugaacgcagcaaagccuacagcaacuguuacccuuaugaugugccggauuaugccucccuuaggucacuaguugccucauccggcacacuggaguuuaacaaugaaagcuucaauuggacuggagucacucaaaacggaacaagcucugcuugcauaaggagaucuaauaacaguuucuuuaguagauugaauugguugacccacuuaaaauucaaauacccagcauugaacgugacuaugccaaacaaugaaaaauuugacaaauuguacauuugggggguucaccacccggguacggacaaugaccaagucuuccuguaugcucaagcaucaggaagaaucacagucucuaccaaaagaagccaacaaacuguaaucccgaauaucggaucuagacccagaguaaggaauauccccagcagaauaagcaucuauuggacaauaguaaaaccgggagacauacuuuugauuaacagcacagggaaucuaauugcuccuagggguuacuucaaaauacgaagugggaaaagcucaauaaugagaucagaugcacccauuggcaaaugcaauucugaaugcaucacuccaaauggaagcauucccaaugacaaaccauuccaaaauguaaacaggaucacauacggggccugucccagauauguuaagcaaaacacucugaaauuggcaacagggaugcgaaauguaccagagaaacaaacuagaggcauauuuggcgcaaucgcgggcuucauagaaaaugguugggagggaaugguggaugguugguacgguuucaggcaucaaaauucugagggaauaggacaagcagcagaucucaaaagcacucaagcagcaaucgaucaaaucaaugggaagcugaauagguugaucgggaaaaccaacgagaaauuccaucagauugaaaaagaauucucagaagucgaagggagaauucaggaccuugagaaauauguugaggacaccaaaauagaucucuggucauacaacgcggagcuucuuguugcccuggagaaccaacauacaauugaucuaacugacucagaaaugaacaaacuguuugaaaaaacaaagaagcaacugagggaaaaugcugaggauaugggcaaugguuguuucaaaauauaccacaaaugugacaaugccugcauaggaucaaucagaaauggaacuuaugaccacgauguauacagagaugaagcauuaaacaaccgguuccagaucaagggcguugagcugaagucaggauacaaagauuggauccuauggauuuccuuugccauaucauguuuuuugcuuuguguugcuuuguugggguucaucaugugggccugccaaaaaggcaacauuaggugcaacauuugcauuuga

SEQ ID NO: 34281 - RNA, 1707 nt, Artificial Sequence
  derived and/or modified CDS sequence (wt) from hemagglutinin__InfluenzaA__ABY76282
auggagaaaauagugcuucuucuugcaauagucagucuuguuaaaagugaucagauuugcauugguuaccaugcaaacaacucgacagagcauguugacacaauaauggaaaagaacgucacuguuacacacgcccaagauauacuggaaaaggcacacaacgggaggcucugcgaucuagacggagugaagccucuaaucuuaagagauuguaguguagcuggauggcuccucgggaacccaaugugugacgaauuccucaaugugccggaauggucuuauauaguggagaagaacaauccagccaaugaccucuguuacccagggaauuucaacgacuaugaagaauugaaacaccuauugagcagaauaaaccauuuugagaaaauucagaucauccccaaaaguucuuggucggaucaugaagccucaucaggggugagcucagcauguccauaccagggaagguccuccuuuuuuagaaaugugguauggcuuaucaaaaagaacgaugcauauccaacaauaaagagaaguuacaauaauaccaaccaagaagaucuuuugguacugugggggauucaccauccaaaugaugcggcagagcagacaaggcucuaucaaaacccaaccaccuauauuuccguugggacaucaacacuaaaccagagauugguaccaaaaauagcuacuagauccaagguaaacgggcaaaguggaaggauggaguucuuuuggacaauuuuaaaaccgaaugaugcgauaaacuuugagaguaauggaaauuucauugcuccagaaaaugcauacaaaauugucaagaaaggggacucaacaaucaugaaaagugaauuggaauaugguaauugcaacaccaagugucaaacuccaauaggggcgauaaacucuaguaugccauuccacaacauccacccucucaccaucggggaaugccccaaauaugugaaaucaaacagauuaguccuugcgacugggcucagaaauagcccucaaggagagagaagaagaaaaaagagagggcuauuuggagcuauagcagguuuuauagagggaggauggcagggaaugguagaugguugguauggguaucaccauagcaacgagcaggggaguggguacgcugcagacaaagaauccacucaaaaggcaauagauggagucaccaauaaggucaacucgaucauugacaaaaugaacacucaguuugaggcaguuggaagggaauuuaauaacuuagaaaggagaauagaaaauuuaaacaagaagauggaagacggauuccuagaugucuggacuuauaaugcugaacuucugguucucauggaaaaugagagaacucuagacuuucaugacucaaaugucaagaaccuuuacgacaagguccgacuacagcuuagggauaaugcaaaggagcuugguaacgguuguuucgaguucuaucacagaugugauaaugaauguauggaaagugugagaaacggaacguaugacuacccgcaguauucagaagaagcaagauuaaaaagagaggaaauaaguggaguaaaauuggaaucaauaggaacuuaccaaauacugucaauuuauucaacaguggcgagcucccuagcacuggcaaucaugguggcuggucuaucuuuauggaugugcuccaauggaucguuacaaugcagaauuugcauuuaa

SEQ ID NO: 34282 - RNA, 1701 nt, Artificial Sequence
  derived and/or modified CDS sequence (wt) from hemagglutinin__InfluenzaA__ABY81349
augaaagcaaaacuacugguccuguuaugugcacuuucagcuacagaugcagacacaauauguauaggcuaccaugcgaacaacucaaccgacacuguugacacaguacucgaaaagaacgugacagugacacacucugucaaccuacuugaggacagucacaacggaaaacuaugcagacuaaaaggaauagcuccacuacaauuggggaaaugcagcauugccggauggaucuuaggaaacccagaaugcgaaucacuguuuucuaagaaaucauggucuuacauugcagaaacaccaaacuccgagaauggaacauguuacccaggauauuucgccgacuaugaggaacugagggagcaauugaguucaguaucaucauucgagagauucgaaauauuccccaaggaaagaucauggcccaaacacaacguaaccagaggaguaacggcagcaugcucccauaaggggaaaagcaguuuuuacagaaauuugcuauggcugacggagaaaaauggcucguacccaaaucugagcaaguccuaugugaacaacaaagagaaagaaguccuuguacuaugggguguucaucacccgucuaacauaaaggaccaaaagaccaucuaucagaaagaaaaugcuuaugucucuguagugucuucaaauuauaacaggagauucaccccagaaauagcaaaaagacccaaaguaagagaucaagaagggagaauuaacuacuacuggacucugcuggaacccggggacacaauaauauuugaggcaaauggaaaucuaauagcgccaugguaugcuuucgcacugaguagaggcuuugggucaggaaucaucaccucaaacgcaucgauggaugaaugugacacgaagugucaaacaccccagggagcuauaaacaguagccuuccuuuccagaauguacacccagucacaauaggagagugcccaaaauacgucaggaguacaaaauuaaggaugguuacaggacuaagaaacaucccauccauucaauccagaggucuguuuggagccauugccgguuucauugaagggggauggacuggaaugauagauggaugguaugguuaucaucaucagaaugaacagggaucuggcuaugcugcggaucaaaaaagcacacaaaaugccauuaacgggauuacaaacaaggugaacucuguuaucgagaaaaugaacacucaauucacagcuguggguaaagaauucaacaaauuagaaaaaaggauggaaaacuuaaauaaaaaaguugaugauggauuucuggacauuuggacauauaaugcagaauuguugguucuacuggaaaaugaaaggacuuuggauuuucaugacucaaaugugaagaaucuguaugagaaaguaaaaagccaauuaaagaauaaugccaaagaaguaggaaacggguguuuugaauucuaccacaaguguaacaaugaaugcauggaaaguguaaaaaauggaacuuaugacuauccaaaauauucagaggaaucaaaguuaaacagggaaaaaauugauggagugaaauuggaaucaaugggagucuaucagauucuggcgaucuacucaacugucgccaguucacuggugcuuuuggucucccugggggcaaucagcuucuggauguguucuaaugggucuuugcagugcagaauaugcaucuga

SEQ ID NO: 34283 - RNA, 1701 nt, Artificial Sequence
  derived and/or modified CDS sequence (wt) from hemagglutinin__InfluenzaA__ABY81371
augaagacuaucauugcuuugagcuacauucuaugucugguuuucgcucaaaaacuuccuggaaaugacaacagcacggcaacgcugugccuugggcaccaugcaguaccaaacggaacgauagugaaaacaaucacgaaugaccaaauugaaguuacuaaugcuacugagcugguucagaguuccucaacaggugaaauaugcgacaguccucaucagauccuugauggagaaaacugcacacuaauagaugcucuauugggagacccucagugugauggcuuccaaaauaagaaaugggaccuuuuuguugaacgcagcaaagccuacagcaacuguuacccuuaugaugugccggauuaugccucccuuaggucacuaguugccucauccggcacacuggaguuuaacaaugaaagcuucaauuggacuggagucacucaaaacggaacaagcucugcuugcauaagaagaucuaauaacaguuucuuuaguagauugaauugguugacccacuuaaaauucaaauacccagcauugaacgugacuaugccaaacaaugaaaaauuugacaaauuguacauuugggggguucaccacccggguacggacaaugaccaaaucuuccuguaugcucaagcaucaggaagaaucacagucucuaccaaaagaagccaacaaacuguaaucccgaauaucggaucuagacccagaguaaggaauauccccagcagaauaagcaucuauuggacaauaguaaaaccgggagacauacuuuugauuaacagcacagggaaucuaauugcuccuagggguuacuucaaaauacgaagugggaaaagcucaauaaugagaucagaugcacccauuggcaaaugcaauucugaaugcaucacuccaaauggaagcauucccaaugacaaaccauuccaaaauguaaacaggaucacauauggggccugucccagauauguuaagcaaaacacucugaaauuggcaacagggaugcgaaauguaccagagaaacaaacuagaggcauauuuggcgcaaucgcggguuucauagaaaaugguugggagggaaugguggaugguugguacgguuucaggcaucaaaauucugagggaauaggacaagcagcagaucucaaaagcacucaagcagcaaucgaucaaaucaaugggaagcugaauagguugaucgggaaaaccaacgagaaauuccaucagauugaaaaagaauucucagaagucgaagggaggauucaggaccuugagaaauauguugaggacaccaaaauagaucucuggucauacaacgcggagcuucuuguugcccuggagaaccaacauacaauugaucuaacugacucagaaaugaacaaacuguuugaaaaaacaaagaagcaacugagggaaaaugcugaggauaugggcaaugguuguuucaaaauauaccacaaaugugacaaugccugcauaggaucaaucagaaauggaacuuaugaccacgauguauacagagaugaagcauuaaacaaccgguuccagaucaagggcguugagcugaagucaggauacaaagauuggauccuauggauuuccuuugccauaucauguuuuuugcuuuguguugcuuuguugggguucaucaugugggccugccaaaaaggcaacauuaggugcaacauuugcauuuga

SEQ ID NO: 34284 - RNA, 1698 nt, Artificial Sequence; identical to SEQ ID NO: 33937
  derived and/or modified CDS sequence (wt) from hemagglutinin__InfluenzaA__ABY81382

SEQ ID NO: 34285 - RNA, 1698 nt, Artificial Sequence
  derived and/or modified CDS sequence (wt) from hemagglutinin__InfluenzaA__ABY81393
augaaagugaaacuauugguucuguuauguacauuuacagcuacauaugcagacacaauauguauaggcuaccaugccaacaacucgaccgacacuguugacacaguacuugagaagaaugugacagugacacacucugucaaccuacuugaggaccgucacaauggaaaacuaugucuacuaaaaggaauagccccacuacaauuggguaauugcagcguugccggauggaucuuaggaaacccagaaugcgaauuacugauuuccaaggaaucaugguccuacauuguagaaacaccaaauccugagaauggaacauguuacccaggguauuucgccgacuaugaggagcugagggagcaauugaguucaguaucuucauuugagagguucgaaauauuccccaaagagagcucauggcccaaccacaccguaaccggaguaucagcaucaugcucccauaacgggaaaagcaguuuuuacagaaauuugcuauggcugacgggaaagaaugguuuguacccaaaccugagcagauccuaugcaaacaacaaagagaaagaaguccuuguacugugggguguucaucacccgccuaacauaggggaccaaagggcccucuaucauacagaaaaugcuuaugucucuguagugucuucacauuauagcagaagauucaccccagaaauagccaaaagacccaaggugagagaucaggaaggaagaaucaauuacuacuggacucuacuggaacccggggauacaauaauauuugaggcaaaugggaaucuaauagcgccaagguuugcuuucgcacugaguagaggcuuuggaucaggaaucaucaccucaaaugcaccaauggaugaaugugaugcgaagugucaaacaccucagggagcuauaaacagcagucuuccuuuccagaauguacacccagucacaauaggagaguguccaaaguaugucaggagugcaaaauuaagaaugguuacaggacuaaggaacaucccauccauucaauccagagguuuguuuggagccauugccgguuucauugaagggggguggacuggaaugguagaugguugguaugguuaucaccaccagaaugagcaaggaucuggguaugcugcagaucaaaaaagcacacaaaaugccauuaacgggauuacaaacaaggugaauucugugauugagaaaaugaacacucaauucacagcugugggcaaagaauucaacaaauuggaaagaagaauggaaaacuuaaauaaaaaaguugaugauggguuucuagacauuuggacguauaacgcagaauuguugguucuacuggaaaaugaaaggacuuuggacuuccaugacuccaacgugaagaaucuguaugagaaaguaaaaagccaauuaaagaauaaugccaaagaaauaggaaacggguguuuugaauucuaucacaaguguaacgaugaaugcauggagagugugaaaaauggaacuuaugacuauccaaaauauuccgaagaaucaaaguuaaacagggagaaaauugauggagugaaauuggaaucaaugggagucuaucagauucuggcgaucuacucaacagucgccaguucccugguucuuuuggucucccugggggcaaucagcuucuggauguguuccaaugggucuuugcaguguagaauaugcaucuaa

SEQ ID NO: 34286 - RNA, 1698 nt, Artificial Sequence
  derived and/or modified CDS sequence (wt) from hemagglutinin__InfluenzaA__ABY81415
augaaaguaaaacuacuuguucuguuauguacauuuacagcuacauaugcagacacaauauguauaggcuaccaugccaacaacucgaccgacacuguugacacaguacuugagaagaaugugacagugacacacucugucaaccuacuugaggacagucacaauggaaaacuaugucuacuaaaaggaauagccccacuacaauuggguaauugcagcguugccggauggaucuuaggaaacccagaaugcgaauuacugauuuccaaggaaucaugguccuacauuguagaaacaccaaguccugagaauggaacauguuacccgggauauuucgccgacuaugaggagcugagagagcaauugaguucaguaucuucauuugagagguucgaaauauuccccaaagagagcucauggcccaaccacacaguaaccggaguaucagcaucaugcucccauaacgggaaaagcaguuuuuacagaaauuugcuauggcugacggggaagaaugguuuguauccaaaccugagcaaguccuaugcaaacaacaaagagaaagaaguccuuguacugugggguguucaucacccgccuaacauaggggaccaaagggcccucuaucauacagaaaaugcuuaugucucuguagugucuucacauuauagcagaagauucaccccagaaauagccaaaagacccaaggugagagaucaggaaggaagaaucaacuacuacuggacucugcuggaacccggggauacaauaauauuugaggcaaauggaaaucuaauagcgccaagguuugcuuucgcacugaguagaggcuuuggaucaggaaucaucaccucaaaugcaccaaugggugaaugugaugcgaagugucaaacaccucagggagcuauaaacaguagucuuccuuuccagaauguacacccagucacaauaggagaguguccaaaguaugucaggagugcaaaauuaagaaugguuacaggacuaaggaacaucccauccauucaauccagagguuuguuuggagccauugccgguuucauugaagggggguggacuggaaugguagaugguugguaugguuaucaccaucagaaugagcaaggaucuggguaugcugcagaucaaaaaagcacacaaaaugccauuaacgggauuacaaacaaggugaacucuguaauugagaaaaugaacacucaauucacagcugugggcaaagaauucaacaaauuggaaagaaggauggaaaacuuaaauaaaaagguugaugauggauuucuagacauuuggacauauaacgcagaauuguugguucuacuggaaaaugaaaggacuuuggacuuccaugacuccaacgugaagaaucuguaugagaaaguaaaaagccaauuaaagaauaaugccaaagaaauaggaaacggguguuuugaauucuaucacaaguguaacgaugaaugcauggagagugugaaaaauggaacuuaugacuauccaaaauauuccgaagaaucaaaguugaacagggagaaaauugauggagugaaauuggaaucaaugggagucuaucagauucuggcgauuuacucaacagucgccaguucccugguucuuuuggucucccugggggcaaucagcuucuggauguguuccaaugggucuuugcaguguagaauaugcauuuaa

SEQ ID NO: 34287 - RNA, 1701 nt, Artificial Sequence
  derived and/or modified CDS sequence (wt) from hemagglutinin__InfluenzaA__ACA24502
augaagacuaucauugcuuugagcuacauucuaugucugguuuucgcucaaaaacuuccuggaaaugacaacagcacggcaacgcugugccuugggcaccaugcaguaccaaacggaacgauagugaaaacaaucacgaaugaccaaauugaaguuacuaaugcuacugagcugguucagaguuccucaacaggugaaauaugcgacaguccucaucagauccuugauggagaaaacugcacacuaauagaugcucuauugggagacccucagugugauggcuuccaaaauaagaaaugggaccuuuuuguugaacgcagcaaagccuacagcaacuguuacccuuaugaugugccggauuaugccucccuuaggucacuaguugccucauccggcacacuggaguuuaacaaugaaagcuucaauuggacuggagucacucaaaacggaacaagcucugcuugcauaaggagaucuaauaacaguuucuuuaguagauugaauugguugacccacuuaaaauucaaauacccagcauugaacgugacuaugccaaacaaugaaaaauuugacaaauuguacauuugggggguucaccacccggguacggacaaugaccaaaucuuccuguaugcucaagcaucaggaagaaucacagucucuaccaaaagaagccaacaaacuguaaucccgaauaucggaucuagacccagaguaaggaauauccccagcagaauaagcaucuauuggacaauaguaaaaccgggagacauacuuuugauuaacaguacagggaaucuaauugcuccuagggguuacuucaaaauacgaagugggaaaagcucaauaaugagaucagaugcacccauuggcaaaugcaauucugaaugcaucacuccaaauggaagcauucccaaugacaaaccauuccaaaauguaaacaggaucacauacggggccugucccagauauguuaagcaaaacacucugaaauuggcaacagggaugcgaaauguaccagagaaacaaacuagaggcauauuuggcgcaaucgcggguuucauagaaaaugguugggagggaaugguggaugguugguacgguuucaggcaucaaaauucugagggaauaggacaagcagcagaucucaaaagcacucaagcagcaaucgaucaaaucaaugggaagcugaauagguugaucgggaaaaccaacgagaaauuccaucagauugaaaaagaauucucagaagucgaagggaggauucaggaccuugagaaauauguugaggacaccaaaauagaucucuggucauacaacgcggagcuucuuguugcccuggagaaccaacauacaauugaucuaacugacucagaaaugaacaaacuguuugaaaaaacaaagaagcaacugagggaaaaugcugaggauaugggcaaugguuguuucaaaauauaccacaaaugugacaaugccugcauaggaucaauuagaaauggaacuuaugaccacgauguauacagagaugaagcauuaaacaaccgguuccagaucaagggcguugagcugaagucaggauacaaagauuggauccuauggauuuccuuugccauaucauguuuuuugcuuuguguugcuuuguugggguucaucaugugggccugccaaaaaggcaacauuaggugcaacauuugcauuuga

SEQ ID NO: 34288 - RNA, 1698 nt, Artificial Sequence
  derived and/or modified CDS sequence (wt) from hemagglutinin__InfluenzaA__ACA24513
augaaaguaaaacuacugauucuguuauguacauuuacagcuacauaugcagacacaauauguauaggcuaccaugccaacaacucgaccgacacuguugacacaguacuugagaagaaugugacagugacacacucugucaaccuacuugaggacagucacaauggaaaacuaugucuacuaaaaggaauagccccacuacaauuggguaauugcagcguugccggauggaucuuaggaaacccagaaugcgaauugcugauuuccaaggaaucaugguccuacauuguagagacaccaaauccugagaauggaacauguuacccaggguauuucgccgacuaugaggagcugagagagcaauugaauucaguaucuucauuugagagguucgaaauauuccccaaagagagcucauggcccaaccacaccguaaccggaguaucagcaucaugcucccauaacgggaaaagcaguuuuuacagaaauuugcuauggcugacggggaagaaugguuuguauccaaaccugagcaaguccuaugcaaacaacaaagagaaagaaguccuuguacugugggguguucaucacccgccuaacauaggggaccaaagggcccucuaucauacagaaaaugcuuaugucucuguagugucuucacauuauagcagaagauucaccccagaaauagccaaaagacccaaggugagagaucaggaaggaagaaucaacuacuacuggacucugcuugaacccagggauacaauaauauuugaggcaaauggaaaucuaauagcgccaagguuugcuuucgcacugaguagaggcuuuggaucaggaaucaucaccucaaaugcaccaauggaugaaugugaugcgaaaugucaaacaccucagggagcuauaaacagcagucuuccuuuccagaauguacacccagucacaauaggagaguguccaaaguaugucaggaguacaaaauuaagaaugguuacaggacuaaggaacaucccauccauucaauccagagguuuauuuggagccauugccgguuucauugaagggggguggacuggaaugguagaugguugguaugguuaucaccaucagaaugagcaaggaucuggguaugcugcagaucaaaaaagcacacaaaaugccauuaacgggauuacaaacaaggugaauucuguaauugagaaaaugaacacucaauucacagcugugggcaaagaauucaacaaauuggaaagaaggauggaaaacuuaaauaaaaaaguugaugauggguuucuagacauuuggacauauaacgcagaauuguugguucuacuggaaaaugaaaggacuuuggacuuccaugacuccaacgugaagaaucuguaugagaaaguaaaaagccaauuaaagaauaaugccaaagaaauaggaaacggguguuuugaauucuaucacaaguguaacgaugaaugcauggagagugugaaaaauggaacuuaugacuauccaaaauauuccgaagaaucaaaguugaacagggagaaaauugauggagugaaauuggaaucaaugggagucuaucagauuuuggcgaucuacucaacagucgccaguucccugguucuuuuggucucccugggggcaaucagcuucuggauguguuccaaugggucuuugcaguguagaauaugcaucuaa

SEQ ID NO: 34289 - RNA, 1698 nt, Artificial Sequence; identical to SEQ ID NO: 33937
  derived and/or modified CDS sequence (wt) from hemagglutinin__InfluenzaA__ACA24524

SEQ ID NO: 34290 - RNA, 1701 nt, Artificial Sequence
  derived and/or modified CDS sequence (wt) from hemagglutinin__InfluenzaA__ACA24689
augaagacuaucauugcuuugagcuacauucuaugucugguuuucgcucaaaaacuucccggaauugacaacagcacggcaacgcugugccuugggcaccaugcaguaccaaacggaacgauagugaaaacaaucacgaaugaccaaauugaaguuacuaaugcuacugagcugguucagaauuccucaacagguggaauaugcgacaguccucaucagaucauugauggagaaaacugcacacuaauagaugcucuauugggagacccucagugugauggcuuccaaaauaagaaaugggaccuuuuuguugaacgcagcaaagccuacagcaacuguuacccuuaugaugugccggauuaugccucccuuaggucacuaguugccucauccggcacacuggaguuuaacaaugaaagcuucaauuggacuggagucacucaaaauggaacaagcucugcuugcaaaaggggaucuaauaacaguuucuuuaguagauugaauugguugacccacucaaaauucaaauacccagcauugaacgugacuaugccaaacaaugaagaauuugacaaauuguacauuugggggguccaccacccggguacggacaaugaccaaaucuuccuguaugcucaagcaucaggaagaaucacagucucuaccaaaagaagccaacaaacuguaaucccgaauaucggaucuagacccagaguaaggaauauccccagcagaauaagcaucuauuggacaauaguaaaaccgggagacauacuuuugauuaacagcacagggaaucuaauugcuccuagggguuacuucaaaauacgaagugggaaaagcucaauaaugagaucagaugcacccauuggcaaaugcaauucugaaugcaucacuccaaauggaagcauucccaaugacaaaccauuucaaaauguaaacaggaucacauacggggccugucccagauauguuaagcaaaacacucugaaauuggcaacagggaugcgaaauguaccagagaaacaaacuagaggcauauuuggcgcaaucgcggguuucauagaaaaugguugggagggaaugguggaugguugguacgguuucaggcaucaaaauucugagggaauaggacaagcagcagaucucaaaagcacucaagcagcaaucgaucaaaucaaugggaagcugaauagguugaucgggaaaaccaacgagaaauuccaccagauugaaaaagaauucucagaaguagaagggagaauucaggaccucgagaaauauguugaggacacuaaaauagaucucuggucauacaacgcggagcuucuuguugcccuggagaaccaacauacaauugaucuaacugacucagaaaugaacaaacuguuugaaaagacaaagaagcaacugagggaaaaugcugaggauaugggcaaugguuguuucaaaauauaccacaaaugugacaaugccugcauaggaucaaucagaaauggaacuuaugaccauuauguauacagagaugaagcauuaaacaaccgguuucagaucaagggcauugagcugaagucaggauacaaagauuggauccuauggauuuccuuugccauaucauguuuuuugcuuuguguugcuuuguugggguucaucaugugggccugccaaaaaggcaacauuaggugcaacauuugcauuuga

SEQ ID NO: 34291 - RNA, 1701 nt, Artificial Sequence
  derived and/or modified CDS sequence (wt) from hemagglutinin__InfluenzaA__ACA24700
augaagacuaucauugcuuugagcuacauucuaugucugguuuucgcucaaaaacuucccggaauugacaacagcacggcaacgcugugccuugggcaccaugcaguaccaaacggaacgauagugaaaacaaucacgaaugaccaaauugaaguuacuaaugcuacugagcugguucagaauuccucaacagguggaauaugcgacaguccucaucagauccuugauggagaaaacugcacacuaauagaugcucuauugggagacccucagugugauggcuuccaaaauaagaaaugggaccuuuuuguugaacgcagccaagccuacagcaacuguuacccuuaugaugugccggauuaugccucccuuaggucacuaguugccucauccggcacacuggaguuuaacaaugaaagcuucaauuggacuggaguuacucaaaauggaacaagcucugcuugcaaaaggggaucuaauaacaguuucuuuaguagauugaauugguugacccacucaaaauucaaauacccagcauugaacgugacuaugccaaacaaugaagaauuugacaaauuguacauuugggggguucaccacccggguacggacaaugaccaaaucuuccuguaugcucaagcaucaggaagaaucacagucucuaccaaaagaagucaacaaacuguaaucccgaauaucggaucuagacccagaguaaggaauauccccagcagaauaagcaucuauuggacaauaguaaaaccgggagacauacuuuugauuaacagcacagggaaucuaauugcuccuagggguuacuucaaaauacgaagugggaaaagcucaauaaugagaucagaugcacccauuggcaaaugcaauucugaaugcaucacuccaaauggaagcauucccaaugacaaaccauuucaaaauguaaacaggaucacauacggggccugucccagauauguuaagcaaaacacucugaaauuggcaacagggaugcgaaauguaccagagaaacaaacuagaggcauauuuggcgcaaucgcggguuucauagaaaaugguugggagggaaugguggaugguugguacgguuucaggcaucaaaauucugagggaauaggacaagcagcagaucucaaaagcacucaagcagcaaucgaucaaaucaaugggaagcugaauagguugaucgggaaaaccaacgagaaauuccaccagauugaaaaagaauucucagaaguagaagggagaauucaggaccucgagaaauauguugaggacacuaaaauagaucucuggucauacaacgcggagcuucuuguugcccuggagaaccaacauacaauugaucuaacugacucagaaaugaacaaacuauuugaaaagacaaagaagcaacugagggaaaaugcugaggauaugggcaaugguuguuucaaaauauaccacaaaugugacaaugccugcauaggaucaaucagaaauggaacuuaugaccaugauguauacagagaugaagcauuaaacaaccgguuucagaucaagggcguugagcugaagucaggauacaaagauuggauccuauggauuuccuuugccauaucauguuuuuugcuuuguguugcauuguugggguucaucaugugggccugccaaaaaggcaacauuaggugcaacauuugcauuuga

SEQ ID NO: 34292 - RNA, 1698 nt, Artificial Sequence
  derived and/or modified CDS sequence (wt) from hemagglutinin__InfluenzaA__ACA28846
augaaaguaaaacuacugguccuguuaugcacauuuacagcuacauaugcagacacaauauguauaggcuaccaugcuaacaacucgaccgacacuguugacacaguacuugaaaagaaugugacagugacacacucugucaaccugcuugagaacagucacaauggaaaacuaugucuauuaaaaggaauagccccacuacaauuggguaauugcagcguugccggguggaucuuaggaaacccagaaugcgaauuacugauuuccaaggagucaugguccuacauuguagaaaaaccaaauccugagaauggaacauguuacccagggcauuucgcugacuaugaggaacugagggagcaauugaguucaguaucuucauuugagagguucgaaauauuccccaaagaaagcucauggcccaaccacaccguaaccggagugucagcaucaugcucccauaauggggaaagcaguuuuuacagaaauuugcuauggcugacggggaagaaugguuuguacccaaaccugagcaaguccuaugcaaacaacaaagaaaaagaaguccuuguacuaugggguguucaucacccgccaaacauagguauccaaaaggcccucuaucauacagaaaaugcuuaugucucuguagugucuucacauuauagcagaaaauucaccccagaaauagccaaaagacccaaaguaagagaucaagaaggaagaaucaauuacuacuggacucugcuugaacccggggauacaauaauauuugaggcaaauggaaaucuaauagcgccaagauaugcuuucgcacugaguagaggcuuuggaucaggaaucaucaacucaaaugcaccaauggauaaaugugaugcgaagugccaaacaccucagggagcuauaaacagcagucuuccuuuccagaacguacacccagucacaauaggagaguguccaaaguaugucaggagugcaaaauuaaggaugguuacaggacuaaggaacaucccauccauucaauccagagguuuguuuggagccauugccgguuucauugaagggggguggacuggaaugguagaugguugguaugguuaucaucaucagaaugagcaaggaucuggcuaugcugcagaucaaaaaagcacacaaaaugccauuaaugggauuacaaacaaggugaauucuguaauugagaaaaugaacacucaauucacagcugugggcaaagaauucaacaaauuggaaagaaggauggaaaacuugaauaaaaaaguugaugauggguuuauagacauuuggacauauaaugcagaacuguugguucuacuggaaaaugaaaggacuuuggauuuccaugacuccaaugugaagaaucuguaugagaaaguaaaaagccaguuaaagaauaaugcuaaagaaauaggaaauggguguuuugaauucuaucacaaguguaacgaugaaugcauggagaguguaaagaauggaacuuaugacuauccaaaauauuccgaagaaucaaaguuaaacagggagaaaauugauggagugaaauuggaaucaaugggagucuaucagauucuggcgaucuacucaacagucgccaguucucugguucuuuuggucucccugggggcaaucagcuucuggauguguuccaaugggucuuuacaguguagaauaugcaucuaa

SEQ ID NO: 34293 - RNA, 1701 nt, Artificial Sequence
  derived and/or modified CDS sequence (wt) from hemagglutinin__InfluenzaA__ACA33749
augaagacuaucauugcuuugagcuacauuuuaugucugguuuucgcucaaaaacuuccuggaaaugacaacagcacggcaacgcugugccuugggcaccaugcaguaccaaacggaacgauagugaaaacaaucacgaaugaccaaauugaaguuacuaaugcuacugagcugguucagaguuccucaacaggugaaauaugcgacaguccucaucagauccuugauggagaaaacugcacacuaauagaugcucuauugggagacccucagugugauggcuuccaaaauaagaaaugggaccuuuuuguugaacgcagcaaagccuacagcaacuguuacccuuaugaugugccggauuaugccucccuuaggucacuaguugccucauccggcacacuggaguuuaacaaugaaagcuucaauuggacuggagucacucaaaacggaacaagcucuucuugcauaagaagaucuaauaacaguuucuuuaguagauugaauugguugacccacuuaaaauucaaauacccagcauugaacgugacuaugccaaacaaugaaaaauuugacaaauuguacauuugggggguucaccacccggguacggacaaugaccaaaucuuccuguaugcucaagcaucaggaagaaucacagucucuaccaaaagaagccaacaaacuguaaucccgaauaucggaucuagacccagaguaaggaauauccccagcagaauaagcaucuauuggacaauaguaaaaccgggagacauacuuuugauuaacagcacagggaaucuaauugcuccuagggguuacuucaaaauacgaagugggaaaagcucaauaaugagaucagaugcacccauuggcaaaugcaauucugaaugcaucacuccaaauggaagcauucccaaugacaaaccauuccaaaauguaaacaggaucacauauggggccugucccagauauguuaagcaaaacacucugaaauuggcaacagggaugcgaaauguaccagagaaacaaacuagaggcauauuuggcgcaaucgcggguuucauagaaaaugguugggagggaaugguggaugguugguacgguuucaggcaucaaaauucugagggaauaggacaagcagcagaucucaaaagcacucaagcagcaaucgaucaaaucaaugggaagcugaauagguugaucgggaaaaccaacgagaaauuccaucagauugaaaaagaauucucagaagucgaagggaggauucaggaccuugagaaauauguugaggacaccaaaauagaucucuggucauacaacgcggagcuucuuguugcccuggagaaccaacauacaauugaucuaacugacucagaaaugaacaaacuguuugaaaaaacaaagaagcaacugagggaaaaugcugaggauaugggcaaugguuguuucaaaauauaccacaaaugugacaaugccugcauaggaucaaucagaaauggaacuuaugaccacgauguauacagagaugaagcauuaaacaaccgguuccagaucaagggcguugagcugaagucaggauacaaagauuggauccuauggauuuccuuugccauaucauguuuuuugcuuuguguugcuuuguugggguucaucaugugggccugccaaaaaggcaacauuaggugcaacauuugcauuuga

SEQ ID NO: 34294 - RNA, 1698 nt, Artificial Sequence; identical to SEQ ID NO: 33938
  derived and/or modified CDS sequence (wt) from hemagglutinin__InfluenzaA__ACA96519

SEQ ID NO: 34295 - RNA, 1659 nt, Artificial Sequence
  derived and/or modified CDS sequence (wt) from hemagglutinin__InfluenzaA__ACC55270
augaacacucaaauucuggcauucauugcuugugugcugacuggaguuaaaggagacaaaauaugucuugggcaccaugcuguggcaaauggaacaaaagugaacacauuaacagagagggggauugaaguagugaaugccacagagacaguggaaacuacgaauaucaagaaaauauguacccaggggaaaaggccaacagaucugggacaauguggacuucuaggaacccuaauaggaccuccccaaugugaucaauuccuggaguuuuccucugauuugauaauugagcgaagagaaggaaccgauauaugcuaucccgguagauucacaaacgaagaaucacugaggcagauccuucgaagaucaggaggaauugguaaggagucaaugggcuucaccuauaguggaauaagaaccaauggagcgacaagugccugcacaagaucagguucuucuuucuaugcagagaugaagugguugcugucgaauucagauaaugcagcauucccacagaugacaaaggcguauagaaaucccagaaacaaaccagcucugauaauuuggggaguucaucacucugaaucgguuagcgagcagaccaaacucuauggaaguggaaacaaguugauaacaguaagaagcucaaaauaccagcaaucauucaccccaaauccgggagcacgaagaaucgauuuccacuggcuacuccuugaucccaaugacacagugaccuucacuuucaauggagcauucauagccccugacaggacaaguuucuuuaggggagaaucacuaggaguccagagugaugcuccuuuggauucaaguuguagaggagauugcuuucacaguggggguacgauagucaguucccugccauuccaaaacaucaacucuagaacuguggggaaaugcccucgguaugucaaacagaaaagccuccuucuggcuacaggaaugagaaauguuccagagaaaccaaagcccagaggccuuuuuggagcaauugcuggauucauagagaauggaugggagggucucaucaauggaugguaugguuucagacaucaaaaugcacaaggagagggaacugcagcugacuacaaaagcacccagucugcaauagaucagaucacaggcaaauugaaucguuuaauuggcaaaacaaaucagcaguuugagcugauagacaaugaguucaaugagauagaacaacaaauaggaaaugucauuaauuggacaagagacgcaaugacugagauauggucguauaaugcugagcuguugguggcaauggaaaaucagcauacaauagaucuugcggacucagaaaugagcaaacuuuaugagcgugucaaaaaacaacuaagggagaaugcugaagaagauggaacuggauguuuugagauauuucauaaaugugacgaucaguguauggagagcauaaggaacaacacguaugaccauacucaauacagaacagagucauugcagaauagaauacagauagacccagugaaguugaguaguggguacaaagacauaaucuuaugguuuagcuucggggcaucauguuuucuucuucuagccauugcaaugggacugguuuucauuugcauaaagaauggaaacaugcagugcacuauuuguauauag

SEQ ID NO: 34296 - RNA, 1698 nt, Artificial Sequence; identical to SEQ ID NO: 34074
  derived and/or modified CDS sequence (wt) from hemagglutinin__InfluenzaA__ACC61964

SEQ ID NO: 34297 - RNA, 1698 nt, Artificial Sequence
  derived and/or modified CDS sequence (wt) from hemagglutinin__InfluenzaA__ACC61975
augaaaguaaaacuacugguucuguuauguacauuuacagcuucauaugcggacacaauauguauaggcuaccaugccaacaauucaaccgacacuguugacacaguacuugagaagaaugugacagugacacacucugucaaccuacuugaggacagucacaauggaaaacuaugucuacuaaaaggaauagccccacuacaauuggguaauugcagcguugccggauggaucuuaggaaacccagaaugcgaauuacugauuuccaaggaaucaugguccuacauuguggaaguaccaaauccugagaauggaacauguuacccaggguauuucgccgacuaugaggagcugagggagcaauugaguucaauaucuucauuugagagguucgaaauauuccccaaagagagcucauggcccaaccacaccguaaccggaguaucggcaucaugcucccauaacgggaaaagcaguuuuuacagaaauuugcuauggcugacggggaaaaaugguuuguacccaaaccugagcaaguccuaugcaaacaacaaagagaaagaaguccuuguacuaugggguguccaucacccaccuaacauaggggaccaaagggcccucuaucauacggaaaaugcuuaugucucuguagugucuucacauuauagcagaagauucaccccagaaauagccaaaagacccaaggugagagaucaggaaggaagaaucaacuacuacuggacucugcuggaacccggggauacaauaauauuugaggcaaauggaaaucuaauagcgccaagguuugcuuucgcacugaguagaggcuugggaucaggaaucaucaccucaaaugcaccaauggaugaaugugaugcgaaaugucaaacaccucagggagcuauaaacagcagucuuccuuuccagaauguacacccagucacaauaggagaguguccaaaguaugucaggagugcaaaauuaaggaugguuacaggacuaaggaacaucccauccauucaauccagagguuuguuuggagccauugccgguuucauugaagggggguggacuggaaugguagaugguugguaugguuaucaucaucagaaugagcaaggaucuggguaugcugcagaucaaaaaagcacacaaaaugccauuaacgggauuacaaacaaggugaauucuguaauugagaaaaugaacacucaauucacagcugugggcaaagaauucaacaaauuggaaagaaggauggaaaacuuaaauaaaaaaguugaugauggguuucuagacauuuggaccuauaaugcagaauuguugguucuacuggaaaaugaaaggacuuuggauuuccaugacuccaacgugaagaaucuguaugagaaaguaaaaagccaauuaaagaauaaugccaaagaaauaggaaacggguguuuugaauucuaucacaaguguaacaaugaaugcauggagagugugaaaaauggaacuuaugacuauccaaaauauuccgaagaaucaaaguuaaacagggagaaaauugauggagugaaauuggaaucaaugggagucuaucagauucuggcgaucuacucaacagucgccaguucccugguucuuuuggucucccugggggcaaucagcuucuggauguguuccaaugggucuuugcaguguagaauaugcaucuaa

SEQ ID NO: 34298 - RNA, 1698 nt, Artificial Sequence; identical to SEQ ID NO: 33938
  derived and/or modified CDS sequence (wt) from hemagglutinin__InfluenzaA__ACC61986

SEQ ID NO: 34299 - RNA, 1698 nt, Artificial Sequence
  derived and/or modified CDS sequence (wt) from hemagglutinin__InfluenzaA__ACD37430
augaaagcaaaacuacugguccuguuauguacauuuacagcuacauaugcagacacaauauguauaggcuaccaugccaacaacucaaccgacacuguugacacaguacuugagaagaaugugacagugacacacucugucaaccuacuugaggacagucacaauggaaaacuaugucuacuaaaaggaauagccccacuacaauuggguaauugcagcguugccggauggaucuuaggaaacccagaaugcgaauuacugauuuccaaggaaucaugguccuacauuguagaaacaccaaauccugagaauggaacauguuacccaggguauuucgccgacuaugaggaacugagggagcaauugaguucaguaucuucauuugagagauucgaaauauuccccaaagaaagcucauggcccacccacaccguaaccggaguaucagcaucaugcucccauaaugggaaaagcaguuuuuacagaaauuugcuauggcugacggggaagaaugguuuguacccaaaccugagcaaguccuauguaaacaacaaagagaaagaaguccuuguacuaugggguguucaucacccgccuaacauaggggaccaaagggcccucuaucauacagaaaaugcuuaugucucuguagugucuucacauuauagcagaagauucaccccagaaauagccaaaagacccaaaguaagagaucaggaaggaagaaucaacuacuacuggacucugcuggaaccuggggauacaauaauauuugaggcaaauggaaaucuaauagcgccaugguaugcuuuugcacugaguagaggcuuuggaucaggaaucaucaccucaaaugcaccaauggaugaaugugaugcgaagugucaaacaccucagggagcuauaaacagcagucuuccuuuccagaauguacacccagucacaauaggagaguguccaaaguaugucaggagugcaaaauuaaggaugguuacaggacuaaggaacaucccauccauucaauccagagguuuguuuggagccauugccgguuucauugaagggggguggacuggaaugguagaugggugguaugguuaucaucaucagaaugagcaaggaucuggcuaugcugcagaucaaaaaaguacacaaaaugccauuaacgggauuacaaacaaggugaauucuguaauugagaaaaugaacacucaauucacagcugugggcaaagaauucaacaaauuggaaagaaggauggaaaacuuaaauaaaaaaguugaugauggguuucuagacauuuggacauauaaugcagaauuguugguucuacuggaaaaugaaaggacuuuggauuuccaugacuccaaugugaagaaucuguaugagaaaguaaaaagccaauuaaagaauaaugccaaagaaauaggaaacggguguuuugaauucuaucacaaguguaacaaugaaugcauggagagugugaaaaauggaacuuaugacuauccaaaauauuccgaagaaucaaaguuaaacagggagaaaauugauggagugaaauuggaaucaaugggagucuaucagauucuggcgaucuacucaacugucgccaguucccugguucuuuuggucucccugggggcaaucagcuucuggauguguuccaaugggucuuugcaguguagaauaugcaucuga

SEQ ID NO: 34300 - RNA, 1698 nt, Artificial Sequence
  derived and/or modified CDS sequence (wt) from hemagglutinin__InfluenzaA__ACD37507
augaaagcaaaacuacugguccuguuaugcacauuugcagcuacauaugcagacacaauauguauaggcuaccaugcuaacaacucgaccgacacuguugacacaguacuugaaaagaaugugacagugacacacucugucaaccugcuugagaacagucacaauggaaaacuaugucuauuaaaaggaauagccccacuacaauuggguaauugcagcguugccggguggaucuuaggaaacccagaaugcgaauugcugauuuccaaggagucaugguccuauauuguagaaaaaccaaauccugagaauggaacauguuacccagggcauuucgcugacuaugaggaacugagggagcaauugaguucaguaucuucauuugagagguucgaaauauuccccaaagaaagcucauggcccaaccacaccguaaccggagugucagcaucaugcucccauaauggggaaagcaguuuuuacagaaauuugcuauggcugacggggaagaaugguuuguacccaaaccugagcaaguccuaugcaaacaacaaagaaaaagaaguccuuguacuaugggguguucaucacccgccaaacauagguaaccaaaaggcccucuaucauacagaaaaugcuuaugucucuguagugucuucacauuauagcagaaaauucaccccagaaauagccaaaagacccaaaguaagagaucaagaaggaagaaucaauuacuacuggacucugcuugaacccggggauacaauaauauuugaggcaaauggaaaucuaauagcgccaagauaugcuuucgcacugaguagaggcuuuggaucaggaaucaucaacucaaaugcaccaauggauaaaugugaugcgaagugccaaacaccucagggagcuauaaacagcagucuuccuuuccagaacguacacccagucacaauaggagaguguccaaaguaugucaggagugcaaaauuaaggaugguuacaggacuaaggaacaucccauccauucaauccagagguuuguuuggagccauugccgguuucauugaagggggguggacuggaaugguagaugguugguaugguuaucaucaucagaaugagcaaggaucuggcuaugcugcagaucaaaaaagcacacaaaaugccauuaaugggauuacaaacaaggugaauucuguaauugagaaaaugaacacucaauucacagcagugggcaaagaauucaacaaauuggaaagaaggauggaaaacuugaauaaaaaaguugaugauggguuuauagacauuuggacauauaaugcagaacuguugguucuacuggaaaaugaaaggacuuuggauuuccaugacuccaaugugaagaaucuguaugagaaaguaaaaagccaguuaaagaauaaugcuaaagaaauaggaaauggguguuuugaauucuaucacaaguguaacgaugaaugcauggagaguguaaagaauggaacuuaugacuauccaaaauauuccgaagaaucaaaguuaaacagggagaaaauugauggagugaaauuggaaucaaugggagucuaucagauucuggcgaucuacucaacagucgccaguucucugguucuuuuggucucccugggggcaaucagcuucuggauguguuccaaugggucuuugcaguguagaauaugcaucuaa

SEQ ID NO: 34301 - RNA, 1698 nt, Artificial Sequence; identical to SEQ ID NO: 34225
  derived and/or modified CDS sequence (wt) from hemagglutinin__InfluenzaA__ACD56113

SEQ ID NO: 34302 - RNA, 1698 nt, Artificial Sequence; identical to SEQ ID NO: 34002
  derived and/or modified CDS sequence (wt) from hemagglutinin__InfluenzaA__ACD56124

SEQ ID NO: 34303 - RNA, 1701 nt, Artificial Sequence; identical to SEQ ID NO: 33999
  derived and/or modified CDS sequence (wt) from hemagglutinin__InfluenzaA__ACD56258

SEQ ID NO: 34304 - RNA, 1701 nt, Artificial Sequence; identical to SEQ ID NO: 34004
  derived and/or modified CDS sequence (wt) from hemagglutinin__InfluenzaA__ACD56269

SEQ ID NO: 34305 - RNA, 1698 nt, Artificial Sequence
  derived and/or modified CDS sequence (wt) from hemagglutinin__InfluenzaA__ACD56280
augaaaguaaaacuacugauucuguuauguacauuuacagcuacauaugcagacacaauauguauaggcuaccaugccaacaacucgaccgacacuguugacacaguacuugagaagaaugugacagugacacacucugucaaccuacuugaggacagucacaauggaaaacuaugucuacuaaaaggaauagccccacuacaauuggguaauugcagcguugccggauggaucuuaggaaacccagaaugcgaauugcugauuuccaaggaaucaugguccuacauuguagagacaccaaauccugggaauggaacauguuacccaggguauuucgccgacuaugaggagcugagagagcaauugaguucaguaucuucauuugagagguucgaaauauuccccaaagagagcucauggcccaaccacaccguaaccggaguaucagcaucaugcucccauaacgggaaaagcaguuuuuacagaaauuugcuauggcugacggggaagaaugguuuguauccaaaccugagcaaguccuaugcaaacaacaaagagaaagaaguccuuguacugugggguguucaucacccgccuaacauaggggaccaaagggcccucuaucauacagaaaaugcuuaugucucuguagugucuucacauuauagcagaagauucaccccagaaauagccaaaagacccaaggugagagaucaggaaggaagaaucaacuacuacuggacucugcuugaacccggggauacaauaauauuugaggcaaauggaaaucuaauagcgccaagguuugcuuucgcacugaguagaggcuuuggaucaggaaucaucaccucaaaugcaccaauggaugaaugugaagcgaaaugucaaacaccucagggagcuauaaacagcagucuuccuuuccagaauguacacccagucacaauaggagaguguccaaaguaugucaggaguacaaaauuaagaaugguuacaggacuaaggaacaucccauccauucaauccagagguuuauuuggagccauugccgguuucauugaagggggguggacuggaaugguagaugguugguaugguuaucaccaucagaaugagcaaggaucuggguaugcugcagaucaaaaaagcacacaaaaugccauuaacgggauuacaaacaaggugaauucuguaauugagaaaaugaacacucaauucacagcugugggcaaagaauucaacaaauuggaaagaaggauggaaaacuuaaauaaaaaaguugaugauggguuucuagacauuuggacauauaacgcagaauuguugguucuacuggaaaaugaaaggacuuuggacuuccaugacuccaacgugaagaaucuguaugagaaaguaaaaagccaauuaaagaauaaugccaaagaaauaggaaacggguguuuugaauucuaucacaaguguaacgaugaaugcauggagagugugaaaaauggaacuuaugacuauccaaaauauuccgaagaaucaaaguugaacagggagaaaauugauggagugaaauuggaaucaaugggagucuaucagauuuuggcgaucuacucaacagucgccaguucccugguucuuuuggucucccugggggcaaucagcuucuggauguguuccaaugggucuuugcaguguagaauaugcaucuaa

SEQ ID NO: 34306 - RNA, 1689 nt, Artificial Sequence
  derived and/or modified CDS sequence (wt) from hemagglutinin__InfluenzaA__ACD56324
auggccaucauuuaucucauucuccuguucacagcagugagaggggaccagauaugcauuggauaccaugccaauaauuccacagagaaggucgacacaauucuagagcggaacgucacugugacucaugccaagaacauucuugagaagacccauaacggaagguuaugcaaacuaaacggaaucccuccacuugaacuaggggacuguagcauugccggauggcuccuuggaaauccagaaugugauaggcuucuacgugugccagaaugguccuauauaauggagaaagaaaacccgagaaacgguuuguguuauccaggcagcuucaaugauuaugaagaauugaaacaucuccucagcagcgugaaacauuucgagaaaguaaggauccugccaaaagauagauggacacagcauacaacaacuggaaguucacgggccugcgcggugucugguaauccaucauucuucaggaacauggucuggcugacaaagaaagaaucaaauuauccgguugccaaaggaucguacaacaauacaagcggagaacaaaugcuaauaauuuggggggugcaccaucccaucgaugaaacagaacaaagaacauuguaccagaaugugggaaccuauguuuccguaggcacaucaacauugaacaaaaggucaaccccagacauagcaacaaggccuaaagugaauggacuaggaaguagaauggaauucucuuggacccucuuggauaugugggacaccauaaauuuugagaguacugguaaucuaauugcaccagaauauggauucaaaauaucgaaaagagguaguucagggaucaugaaaacagaaagaacacuugagaacugugagaccaaaugccaaacuccuuugggagcaauaaauacaacauugccuuuucacaauguccacccacugacaauaggugagugccccaaauauguaaaaucggagaaguuggucuuagcaacaggacuaaggaauguuccccagauugaaccaagaggauuguuuggggcaauagcugguuuuauagaaggaggauggcaaggaaugguugaugguugguauggauaccaucacagcaaugaccagggaucaggguaugcagcagacaaagaauccacucaaaaggcauuugauggaaucaccaacaagguaaauucugugauugaaaagaugaacacccaauuugaagcuguugggaaagaauucaguaacuuagagaggagacuggagaacuugaacaaaaagauggaagacggguuccuagauguguggacauacaaugcugagcuucuaguucugauggaaaaugagaggacacuugacuuucaugauucuaaugucaagaaucuguaugauaaagucagaaugcagcugagagacaacgucaaagaacuaggaaauggauguuuugaauuuuaucacaaaugugaugaugaaugcaugaauagugugaaaaacgggacguaugauuaucccaaguaugaagaagagucuaaacuaaauagaaaugaaaucaaagggguaaaauugagcagcauggggguuuaucaaauucuugccauuuaugcuacaguagcagguucucugucacuggcaaucaugauggcugggaucucuuucuggaugugcuccaacgggucucugcagugcaggaucugcauauga

SEQ ID NO: 34307 - RNA, 1689 nt, Artificial Sequence
  derived and/or modified CDS sequence (wt) from hemagglutinin__InfluenzaA__ACD85187
auggccaucauuuaucucauacuccuguucacagcagugaggggggaccagauaugcauuggauaccaugccaauaauuccacagaaaaggucgacacaauucuagagcggaaugucacugugacucaugccaaggacauccuugagaagacccauaacggaaagcuaugcaaacuaaacggaaucccuccacuugaacuaggggacuguagcauugccggauggcuccuuggaaauccagaaugugauaggcuucuaagggugccagaaugguccuauauaauggagaaagaaaacccgagauacaguuuguguuacccaggcagcuucaaugacuaugaagaauugaaacaucuccucagcagcguaaaacauuucgagaaaguaaagauucugcccaaagauagauggacacagcauacaacaacuggagguucaaaggccugcgcagugucagguaaaccaucauucuucaggaacauggucuggcugacaaagaaaggaccaaauuauccgguugccaaaggaucguacaacaauacgagcggagagcaaaugcuaauaauuuggggagugcaccauccuaaagaugaggcagaacaaagagcauuguaccaggaagugggaaccuauguuuccgcaagcacaucaacauugaacaaaaggucaaccccugaaauagcagcaaggccugaagugaauggacuaggaaguagaauggaauucucuuggacccucuuggaugugugggacaccauaaauuuugagagcacugguaaucuaguugcaccagaguauggauucaaaauaucgaaaagagguaguucagggaucaugaagacagaaggaacacuugggaacugugagaccaaaugccaaacuccuuugggagcaauaaauacaacacuaccuuuucacaauguccacccacugacaauaggugaaugccccaaauauguaaaaucggagaaauuggucuuagcaacaggacuaaggaauguuccccagauugaaucaagaggauuguuuggggcaauagcuggcuuuauagaaggaggauggcaaggaaugguugaugguugguauggauaccaucacagcaaugaccagggaucaggguaugcagcagacaaagaauccacucaaaaggcauuugauggaaucaccaacaagguaaauucugugauugaaaagaugaacacccaauuugaagcuguugggaaagaauucaauaauuuagagaaaagacuggagaacuugaacaaaaagauggaagacggguuucuagauguguggacauacaaugcugagcuucuaguucugauggaaaaugagaggacacuugacuuucaugauucuaaugucaagaaccuguaugauaaagucagaaugcagcugagagacaacgucaaagaacuaggaaauggauguuuugaauuuuaucacaaaugugacgaugaaugcaugaauagugugaaaaacgggacguaugauuaucccaaguaugaagaagaaucuaaacuaaauagaaaugaaaucaaagggguaaaauugagcagcauggggguuuaccaaauucuugccauuuaugcuacaguugcagguucucugucacuggcaaucaugauggcugggaucucuuucuggaugugcuccaacgggucucugcagugcagaaucugcauauga

SEQ ID NO: 34308 - RNA, 1689 nt, Artificial Sequence
  derived and/or modified CDS sequence (wt) from hemagglutinin__InfluenzaA__ACD85198
auggccaucauuuaucucauacuccuguucacagcagugaggggggaccagauaugcauuggauaccaugccaauaauuccacagaaaaggucgacacaauucuagagcggaaugucacugugacucaugccaaggacauccuugagaagacccauaacggaaagcuaugcaaacuaaacggaaucccuccacuugaacuaggggauuguagcauugccggauggcuccuuggaaauccagaaugugauaggcuucuaagggugccagaaugguccuauauaauggagaaagaaaacccgagauacaguuuguguuacccaggcagcuucaaugacuaugaagaauugaaacaucuccucagcagcguaaaacauuucgagaaaguaaagauccugcccaaagauggauggacacagcauacaacaacuggagguucaaaggccugcgcagugucagguaaaccaucauucuucaggaacauggucuggcugacaaagaaaggaccaaauuauccgguugccaaaagaucguacaacaauacgagcggagagcaaaugcuaauaauuuggggagugcaccauccuacugaugaggcagaacaaagagcauuguaccaggaagugggaaccuauguuuccgcaagcacaucaacauugaacaaaaggucaaccccagaaauagcagcaaggccugaagugaauggacuaagaaguagaauggaauucucuuggacccucuuggaugugugggacaccauaaauuuugagagcacugguaaucuaguugcaccagaguauggauucaaaauaucgaaaagagguaguucagggaucaugaagacagaaggaacacuugggaacugugagaccaaaugccaaacuccuuugggagcaauaaauacaacacuaccuuuucacaauguccacccacugacaauaggugaaugccccaaauauguaaaaucggagaaauuggucuuagcaacaggacuaaggaauguuccccagauugaaucaagaggauuguuuggggcaauagcuggcuuuauagaaggaggauggcaaggaaugguugaugguugguauggauaccaucacagcaaugaccagggaucaggguaugcagcagacaaagaauccacucaaaaggcauuugauagaaucaccaacaagguaaauucugugauugaaaagaugaacacccaauuugaagcuguugggaaagaauucaguaacuuagagaaaagacuggagaacuugaacaaaaagauggaagacggguuucuagauguguggacauacaaugcugagcuucuaguucugauggaaaaugagaggacacuuggcuuucaugauucuaaugucaagaaccuguaugauaaagucagaaugcagcugagagacaacgucaaagaacuaggaaauggauguuuugaauuuuaucacaaaugugacgaugaaugcaugaauagugugaaaaacgggacguaugauuaucccaaguaugaagaagaaucuaaacuaaagagaaaugaaaucaaagggguaaaauugagcagcauggggguuuaccaaauucuugccauuuaugcuacaguugcagguucucugucacuggcaaucaugauggcugggaucucuuucuggaugugcuccaacgggucucugcagugcagaaucugcauauga

SEQ ID NO: 34309 - RNA, 1689 nt, Artificial Sequence
  derived and/or modified CDS sequence (wt) from hemagglutinin__InfluenzaA__ACD85209
auggccaucauuuaucucauucuccuguucacagcagugagaggggaccagauaugcauuggauaccaugccaauaauuccacagagaaggucgacacaauucuagagcggaacgucacugugacucaugccaaggacauucuugagaagacccauaacggaaaguuaugcaaacuaaacggaaucccuccacuugaacuaggggacuguagcauugccggauggcuccuuggaaauccagaaugugauaggcuucuaagugugccagaaugguccuauauaauggagaaagaaaacccgagagacgguuuguguuauccaggcagcuucaaugauuaugaagaauugaaacaucuccucagcagcgugaaacauuucgagaaaguaaagauucugcccaaagauagauggacacagcauacaacaacuggagguucacgggccugcgcggugucugguaauccaucauucuucaggaacauggucuggcugacacagaaaggaucaaauuauccgguugccaaaggaucguacaacaauacaagcggagaacaaaugcuaauaauuuggggggugcaccaucccaaugaugagacagaacaaagaacauuguaccagaaugugggaaccuauguuuccguaggcacaucaacauugaacaaaaggucaaccccagacauagcaacaaggccuaaagugaauggacaaggagguagaauggaauucucuuggacccuauuggauaugugggacaccauaaauuuugagaguacugguaaucuaauugcaccagaguauggauucaaaauaucgaaaagagguaguucagggaucaugaaaacagaaggaacacuugagaacugugagaccaaaugccaaacuccuuugggagcaauaaauacaacauugccuuuucacaauguccacccacugacaauaggugagugccccaaauauguaaaaucggagaaguuggucuuagcaacaggacuaaggaauguuccccagauugaaucaagaggauuguuuggggcaauagcugguuuuauagaaggaggauggcaaggaaugguugaugguugguauggauaccaucacagcaaugaccagggaucaggguaugcagcagacaaagaauccacucaaaaggcauuugauggaaucaccaacaagguaaauucugugauugaaaagaugaacacccaauuugaagcuguugggaaagaauucaguaacuuagagagaagacuggagaacuugaacaaaaagauggaagacggguuucuagauguguggacauacaaugcugagcuucuaguucugauggaaaaugagaggacacuugacuuucaugauucuaaugucaagaaucuguaugauaaagucagaaugcagcugagagacaacgucaaagaacuaggaaauggauguuuugaauuuuaucacaaaugugaugaugaaugcaugaauagugugaaaaacgggacguaugauuaucccaaguaugaagaagagucuaaacuaaauagaaaugaaaucaaagggguaaaauugagcagcauggggguuuaucaaauccuugccauuuaugcuacaguagcagguucucugucacuggcaaucaugauggcugggaucucuuucuggaugugcuccaacgggucucugcagugcaggaucugcauauga

SEQ ID NO: 34310 - RNA, 1689 nt, Artificial Sequence
  derived and/or modified CDS sequence (wt) from hemagglutinin__InfluenzaA__ACD85220
auggccaucauuuaucucauacuccuguucacagcagugaggggggaccagauaugcauuggauaccaugccaauaauuccacagaaaaggucgacacaauucuagagcggaaugucacugugacucaugccaaggacauccuugagaagacccauaacggaaagcuaugcaaacuaaacggaaucccuccacuugaacuaggggacuguagcauugccggauggcuccuuggaaauccagaaugugauaggcuucuaagggugccagaaugguccuauauaauggagaaagaaaacccgaaauacaguuuguguuacccaggcagcuucaaugacuaugaagaauugaaacaucuccucagcagcguaaaacauuucgagaaaguaaagauucugcccaaagauagauggacacagcauacaacaacuggagguucaaaggccugcgcagugucaggugaaccaucauucuucaggaacauggucuggcugacaaagaaaggaccaaauuauccgguugccaaaggaucguacaacaauacgagcggagagcaaaugcuaauaauuuggggagugcaccauccuaaggaugaggcagaacaaagagcauuguaccagaacgugggaaccuauguuuccgcaagcacaucaacauugaacaaaaggucaaccccugaaauagcagcaaggccugaagugaauggacuaggaaguagaauggaauucucuuggacccucuuggaugugugggacaccauaaauuuugagagcacugguaaucuaguugcaccagaguauggauucaaaauaucgaaaagagguaguucagggaucaugaagacagaaggaacacuugggaacugugagaccaaaugccaaacuccuuugggagcaauaaauacaacacuaccuuuucacaauguccacccacuaacaauaggugaaugccccaaauauguaaaaucggagaaauuggucuuagcaacaggacuaaggaauguuccccagauugaaucaagaggauuguuuggggcaauagcuggcuuuauagaaggaggauggcaaggaaugguugaugguugguauggauaccaucacagcaaugaccagggaucaggguaugcagcagacaaagaauccacucaaaaggcauuugauggaaucaccaacaagguaaauucugugauugaaaagaugaacacccaauuugaagcuguugggaaagaauucaauaauuuagagaaaagacuggagaacuugaacaaaaagauggaagacggguuucuagauguguggacauacaaugcugagcuucuaguucugauggaaaaugagaggacacuugacuuucaugauucuaaugucaagaaccuguaugauaaagucagaaugcagcugagagacaacgucaaagaacuaggaaauggauguuuugaauuuuaucacaaaugugacgaugaaugcaugaauagugugaaaaacgggacguaugauuaucccaaguaugaaaaagaaucuaaacuaaauagaaaugaaaucaaagggguaaaauugagcagcauggggguuuaccaaauucuugccauuuaugcuacaguugcagguucucugucacuggcaaucaugauggcugggaucucuuucuggaugugcuccaacgggucucugcagugcagaaucugcauauga

SEQ ID NO: 34311 - RNA, 1689 nt, Artificial Sequence
  derived and/or modified CDS sequence (wt) from hemagglutinin__InfluenzaA__ACD85242
auggccaucauuuaucucauacuccuguucgcaacagugaggggggaccagauaugcauuggauaccaugccaauaauuccacagaaaaggucgacacaauucuagagcggaaugucacugugacucaugccaaggacauccuugagaagacccacaacggaaagcuaugcaaacuaaacggaaucccuccacuugaacuaggggacuguagcauugccggauggcuccuuggaaauccagaaugugauaggcuucuaagggugccagaaugguccuauauaauggagaaagaaaacccaagauacaguuuguguuacccaggcagcuuaaaugacuaugaagaauugaaacaucuccucagcagcguaaaacauuucgagaaaguaaggauucugcccaaagauagauggacacagcauacaacaacuggagguucaaaggccugcgcagugucagguaaaccaucauucuucaggaacauggucuggcugacaaagaaaggaccaaauuauccgguugccaaaggaucguacaacaauacgagcggagagcaaaugcuaauaauuuggggagugcaccaucccaaagaugaggcagaacaaagagcauuguaccaggaagugggaaccuauguuuccgcaagcacaucaacauugaacaaaaggucaaucccugaaauagcagcaaggccugaagugaauggacuuggaaguagaauggaauucucuuggacacucuuggauguaugggacaccauaaauuuugagagcacugguaaucuaguugcaccagaguauggauucaaaauaucgaaaagagguaguucaggaaucaugaagacagaaggaacacuugggaacugugagaccaaaugucaaacuccuuugggggcgauaaauacaacacuaccuuuucacaauguccauccacugacaauaggugaaugccccaaauauguaaaaucggagaaauuggucuuagcaacagggcuaaggaauguuccccaaauugaaucaagaggauuguuuggggcaauagcuggcuuuauagaaggaggauggcaaggaaugguugaugguugguauggauaccaucacagcaaugaccagggaucaggguaugcagcagacaaagaauccacucaaaaggcauuugauggaaucaccaacaaggugaauucuaugauugaaaagaugaacacccaauuugaagcuguugggaaagaauucaauaauuuagagaaaagacuggagaacuuggacaaaaagauggaagacggguuccuagauguguggacauacaaugcugagcuucuaguucugauggaaaaugagaggacacuugacuuccaugauucuaaugugaaaaaccuguaugaaaaagucagaaugcagcugagagacaacgucaaagaacuaggaaauggauguuuugaauuuuaucacaaaugugacaaugaaugcaugaauagugugaaaaacggaacguaugauuaucccaaguaugaagaagaaucuaaacuaaagagaaaugaaaucaaagggguaaaauugagcagcauggggguuuaccaaauucuugccauuuaugcuacaguugcagguucucugucacuggcaaucaugguggcugggaucucuuucuggaugugcuccaacgggucucugcagugcagaaucugcauauga

SEQ ID NO: 34312 - RNA, 1689 nt, Artificial Sequence
  derived and/or modified CDS sequence (wt) from hemagglutinin__InfluenzaA__ACD85253
auggccaucauuuaucucauacuccuguucgcaacagugaggggggaccagauaugcauuggauaccaugccaauaauuccacagaaaaggucgacacaauucuagagcggaaugucacugugacucaugccaaggacauccuugagaagacccacaacggaaagcuaugcaaacuaaacggaaucccuccacuugaacuaggggacuguagcauugccggauggcuccuuggaaauccagaaugugauaggcuucuaagggugccagaaugguccuauauaauggagaaagaaaacccaagauacaauuuguguuacccaggcagcuuaaaugaauaugaagaauugaaacaucuccucagcagcguaaaacauuucgagaaaguaaggauucugcccaaagauagauggacacagcauacaacaacuggagguucaaaggccugcgcagugucaggugaaccaucauucuucaggaacauggucuggcugacaaagaaaggaccaaauuauccgguugccaaaggaucguacaacaauacgagcggagagcaaaugcuaauaauuuggggagugcaccauccuaaugaugaggcagagcaaagagcauuguaccagaaagugggaaccuauguuuccgcaagcacaucaacauugaacaaaaggucaaucccugaaauagcagcaaggccuaaagugaauggacuuggaaguagaauggaauucuuuuggacccucuuggauguaugggacaccauaaauuuugagagcacugguaaucuaguuguaccagaguauggauucaaaauaucaaaaagagguaguucagggaucaugaagacagaaggaacacuuggaaacugugagaccaaaugccaaacuccuuugggagcaauaaauacaacacuaccuuuucacaauguccacccacugacaauaggugaaugccccaaauauguaaaaucggagaaauuggucuuagcaacaggacuaaggaauguuccccaaauugaaucaagaggacuguuuggggcaauagcuggcuuuauagaaggaggauggcaaggaaugguugaugguugguauggauaccaucacagcaaugaccagggaucaggguaugcagcagacaaagaauccacucaaaaggcauuugauggaaucaccaacaagguaaauucugugauugaaaagaugaacacccaauuugaaacuguugggaaagaauucaauaauuuagagaaaagacuggagaacuugaacaaaaagauggaagacggguuccuagauguguggacauacaaugcugagcuucuaguucugauggaaaaugagaggacacuugacuuccaugauucuaauguaaaaaaccuguaugaaaaagucagaaugcagcugagagacaacgucaaagaacuaggaaauggauguuuugaauuuuaucacaaaugugacgaugaaugcaugaauagugugaaaaacggaacguaugauuaucccaaguaugaagaagaaucuaaacuaaagagaaaugaaaucaaagggguaaaauugagcagcaugggaguuuaccaaauucuugccauuuaugcuacaguugcagguucccugucacuggcaaucaugguggcugggaucucuuucuggaugugcuccaacgggucucugcagugcagaaucugcauauga

SEQ ID NO: 34313 - RNA, 1701 nt, Artificial Sequence
  derived and/or modified CDS sequence (wt) from hemagglutinin__InfluenzaA__ACD85440
augaagacuaucauugcuuugagcuacauucuaugucugguuuucgcucaaaaacuuccuggaaaugacaacagcacggcaacgcugugccuugggcaccaugcaguaccaaacggaacgauagugaaaacaaucacgaaugaccaaauugaaguuacuaaugcuacugagcugguucagaguuccucaacaggugaaauaugcgacaguccucaucagauccuugauggagaaaacugcacacuaauagaugcucuauugggagacccucagugugauggcuuccaaaauaagaaaugggaccuuuuuguugaacgcagcaaagccuacagcaacuguuacccuuaugaugugccggauuaugccucccuuaggucacuaguugccucauccggcacacuggaguuuaacaaugaaagcuucaauuggacuggagucacucaaaacggaacaagcucugcuugcauaaggagaucuaauaacaguuucuuuaguagauugaauugguugacucacuuaaaauucaaauacccagcauugaacgugacuaugccaaacaaugaaaaauuugacaaauuguacauuugggggguucaccacccggguacggacaaugaccaaaucuuccuguaugcucaagcaucaggaagaaucacagucucuaccaaaagaagccaacaaacuguaaucccgaauaucggaucuagacccagaguaaggaauauccccagcagaauaagcaucuauuggacaauaguaaaaccgggagacauacuuuugauuaacagcacagggaaucuaauugcuccuagggguuacuucaaaauacgaagugggaaaagcucaauaaugagaucagaugcacccauuggcaaaugcaauucugaaugcaucacuccaaauggaagcauucccaaugacaaaccauuccaaaauguaaacaggaucacauacggggccugucccagauauguuaagcaaaacacucugaaauuggcaacagggaugcgaaauguaccagagaaacaaacuagaggcauauuuggcgcaaucgcggguuucauagaaaaugguugggagggaaugguggaugguugguacgguuucaggcaucaaaauucugagggaauaggacaagcagcagaucucaaaagcacucaagcagcaaucgaucaaaucaaugggaagcugaauagguugaucgggaaaaccaacgagaaauuccaucagauugaaaaagaauucucagaagucgaagggaggauucaggaccuugagaaauauguugaggacaccaaaauagaucucuggucauacaacgcggagcuucuuguugcccuggagaaccaacauacaauugaucuaacugacucagaaaugaacaaacuguuugaaaaaacaaagaagcaacugagggaaaaugcugaggaucugggcaaugguuguuucaaaauauaccacaaaugugacaaugccugcauaggaucaaucagaaauggaacuuaugaccacgauguauacagagaugaagcauuaaacaaccgguuccagaucaagggcguugagcugaagucaggauacaaagauuggauccuauggauuuccuuugccauaucauguuuuuugcuuuguguugcuuuguugggguucaucaugugggccugccaaaaaggcaacauuaggugcaacauuugcauuuga

SEQ ID NO: 34314 - RNA, 1701 nt, Artificial Sequence
  derived and/or modified CDS sequence (wt) from hemagglutinin__InfluenzaA__ACD85451
augaagacuaucauugcuuugagcuacauucuaugucugguuuucgcucaaaaacuuccuggaaaugacaacagcacggcaacgcugugccuugggcaccaugcaguaccaaacggaacgauagugaaaacaaucacgaaugaccaaauugaaguuacuaaugcuacugagcugguucagaguuccucaacaggugaaauaugcgacaguccucaucagauccuugauggagaaaacugcacacuaauagaugcucuauugggagacccucagugugauggcuuccaaaauaagaaaugggaccuuuuuguugaacgcagcaaagccuacagcaacuguuacccuuaugaugugccggauuaugccucccuuaggucacuaguugccucauccggcacacuggaguuuaacaaugaaagcuucaauuggacuggagucacucaaaacggaacaagcucugcuugcauaaggagaucuaauaacaguuucuuuaguagauugaauugguugacccacuuaaaauucaaauacccagcauugaacgugacuaugccaaacaaugaaaaauuugacaaauuguacauuugggggguucaccacccggguacggacaaugaccaaaucuuccuguaugcucaagcaucaggaagaaucacagucucuaccaaaagaagccaacaaacuguaaucccgaauaucggaucuagacccagaguaaggaauauccccagcagaauaagcaucuauuggacaauaguaaaaccgggagacauacuuuugauuaacagcacagggaaucuaauugcuccuagggguuacuucaaaauacgaagugggaaaagcucaauaaugagaucagaugcacccauuggcaaaugcaauucugaaugcaucacuccaaauggaagcauucccaaugacaaaccauuccaaaauguaaacaggaucacauacggggccugucccagauauguuaagcaaaacacucugaaauuggcaacagggaugcgaaauguaccagagaaacaaacuagaggcauauuuggcgcaaucgcggguuucauagaaaaugguugggagggaaugguggaugguugguacgguuucaggcaucaaaauucugagggaauaggacaagcagcagaucucaaaagcacucaagcagcaaucgaucaaaucaaugggaagcugaauagguugaucgggaaaaccaacgagaaauuccaucagauugaaaaagaauucucagaagucgaagggaggauucaggaccuugagaaauauguugaggacaccaaaauagaucucuggucauacaacgcggagcuucuuguugcccuggagaaccaacauacaauugaucuaacugacucagaaaugaacaaacuguuugaaaaaacaaagaagcaacugagggaaaaugcugaggaucugggcaaugguuguuucaaaauauaccacaaaugugacaaugccugcauaggaucaaucagaaauggaacuuaugaccacgauguauacagagaugaagcauuaaacaaccgguuccagaucaagggcguugagcugaagucaggauacaaagauuggauccuauggauuuccuuugccauaucauguuuuuugcuuuguguugcuuuguugggguucaucaugugggccugccaaaaaggcaacauuaggugcaacauuugcauuuga

SEQ ID NO: 34315 - RNA, 1701 nt, Artificial Sequence; identical to SEQ ID NO: 34314
  derived and/or modified CDS sequence (wt) from hemagglutinin__InfluenzaA__ACD85462

SEQ ID NO: 34316 - RNA, 1701 nt, Artificial Sequence
  derived and/or modified CDS sequence (wt) from hemagglutinin__InfluenzaA__ACD85473
augaagacuaucauugcuuugagcuacauucuaugucugguuuucgcucaaaaacuuccuggaaaugacaacagcacggcaacgcugugccuugggcaccaugcaguaccaaacggaacgauagugaaaacaaucacgaaugaccaaauugaaguuacuaaugcuacugagcugguucagaguuccucaacaggugaaauaugcgacaguccucaucagauccuugauggagaaaacugcacacuaauagaugcucuauugggagacccucagugugauggcuuccaaaauaagaaaugggaccuuuuuguugaacgcagcaaagccuacagcaacuguuacccuuaugaugugccggauuaugccucccuuaggucacuaguugccucauccggcacacuggaguuuaacaaugaaagcuucaauuggacuggagucacucaaaacggaacaagcucugcuugcauaaggagaucuaauaacaguuucuuuaguagauugaauugguugacccacuuaaaauucaaauacccagcauugaacgugacuaugccaaacaaugaaaaauuugacaaauuguauauuugggggguucaccacccgggcacggacaaugaccaaaucuuccuguaugcucaagcaucaggaagaaucacagucucuaccaaaagaagccaacaaacuguaaucccgaauaucggaucuagacccagaguaaggaauauccccagcagaauaagcaucuauuggacaauaguaaaaccgggagacauacuuuugauuaacagcacagggaaucuaauugcuccuagggguuacuucaaaauacgaagugggaaaagcucaauaaugagaucagaugcacccauuggcaaaugcaauucugaaugcaucacuccaaauggaagcauucccaaugacaaaccauuccaaaauguaaacaggaucacauacggggccugucccagauauguuaagcaaaacacucugaaauuggcaacagggaugcgaaauguaccagagaaacaaacuagaggcauauuuggcgcaaucgcggguuucauagaaaaugguugggagggaaugguggaugguugguacgguuucaggcaucaaaauucugagggaauaggacaagcagcagaucucaaaagcacucaagcagcaaucgaucaaaucaaugggaagcugaauagguugaucgggaaaaccaacgagaaauuccaucagauugaaaaagaauucucagaagucgaagggaggauucaggaccuugagaaauauguugaggacaccaaaauagaucucuggucauacaacgcggagcuucuuguugcccuggagaaccaacauacaauugaucuaacugacucagaaaugaacaaacuguuugaaaaaacaaagaagcaacugagggaaaaugcugaggauaugggcaaugguuguuucaaaauauaccacaaaugugacaaugccugcauaggaucaaucagaaauggaacuuaugaccacgauguauacagagaugaagcauuaaacaaccgguuccagaucaagggcguugagcugaagucaggauacaaagauuggauccuauggauuuccuuugccauaucauguuuuuugcuuuguguugcuuuguugggguucaucaugugggccugccaaaaaggcaacauuaggugcaacauuugcauuuga

SEQ ID NO: 34317 - RNA, 1701 nt, Artificial Sequence
  derived and/or modified CDS sequence (wt) from hemagglutinin__InfluenzaA__ACD85484
augaagacuaucauugcuuugagcuacauucuaugucugguuuucgcucaaaaacuuccuggaaaugacaacagcacggcaacgcugugccuugggcaccaugcaguaccaaacggaacgauagugaaaacaaucacgaaugaccaaauugaaguuacuaaugcuacugagcugguucagaguuccucaacaggugaaauaugcgacaguccucaucagauccuugauggagaaaacugcacacuaauagaugcucuauugggagacccucagugugauggcuuccaaaauaagaaaugggaccuuuuuguugaacgcagcaaagccuacagcaacuguuacccuuaugaugugccggauuaugccucccuuagaucacuaguugccucauccggcacacuggaguuuaacaaugaaagcuucaauuggacuggagucacucaaaacggaacaagcucugcuugcauaaggagaucuaauaacaguuucuuuaguagauugaauugguugacccacuuaaaauucaaauacccagcauugaacgugacuaugccaaacaaugaagaauuugacaaauuguauauuugggggguucaccacccggguacggacaaugaccaaaucuuccuguaugcucaagcaucaggaagaaucacagucucuaccaaaagaagccaacaaacuguaaucccgaauaucggaucuagacccagaguaaggaauauccccagcagaauaagcaucuauuggacaauaguaaaaccgggagacauacuuuugauuaacagcacagggaaucuaauugcuccuagggguuacuucaaaauacgaagugggaaaagcucaauaaugagaucagaugcacccauuggcaaaugcaauucugaaugcaucacuccaaauggaagcauucccaaugacaaaccauuccaaaauguaaacaggaucacauacggggccugucccagauauguuaagcaaaacacucugaaauuggcaacagggaugcgaaauguaccagagaaacaaacuagaggcauauuuggcgcaaucgcggguuucauagaaaaugguugggagggaaugguggaugguugguacgguuucaggcaucaaaauucugagggaauaggacaagcagcagaucucaaaagcacucaagcagcaaucgaucaaaucaaugggaagcugaauagguugaucgggaaaaccaacgagaaauuccaucagauugaaaaagaauucucagaagucgaagggaggauucaggaccuugagaaauauguugaggacaccaaaauagaucucuggucauacaacgcggagcuucuuguugcccuggagaaccaacauacaauugaucuaacugacucagaaaugaacaaacuguuugaaaaaacaaagaagcaacugagggaaaaugcugaggauaugggcaaugguuguuucaaaauauaccacaaaugugacaaugccugcauaggaucaaucagaaauggaacuuaugaccacgauguauacagagaugaagcauuaaacaaccgguuccagaucaagggcguugagcugaagucaggauacaaagauuggauccuauggauuuccuuugccauaucauguuuuuugcuuuguguugcuuuguugggguucaucaugugggccugccaaaaaggcaacauuaggugcaacauuugcauuuga

SEQ ID NO: 34318 - RNA, 1701 nt, Artificial Sequence
  derived and/or modified CDS sequence (wt) from hemagglutinin__InfluenzaA__ACD85495
augaagacuaucauugcuuugagcuacauucuaugucugguuuucgcucaaaaacuuccuggaaaugacaacagcacggcaacgcugugccuugggcaccaugcaguaccaaacggaacgauagugaaaacaaucacgaaugaccaaauugaaguuacuaaugcuacugagcugguucagaguuccucaacaggugaaauaugcgacaguccucaucagauccuugauggagaaaacugcacacuaauagaugcucuauugggagacccucagugugauggcuuccaaaauaagaaaugggaccuuuuuguugaacgcagcaaagccuacagcaacuguuacccuuaugaugugccggauuaugccucccuuaggucacuaguugccucauccggcacacuggaguuuaacaaugaaagcuucaauuggacuggagucacucaaaacggaacaagcucugcuugcauaaggagaucuaauaacaguuucuuuaguagauugaauugguugacccacuuaaaauucaaauacccagcauugaacgugacuaugccaaacaaugaaaaauuugacaaauuguauauuugggggguucaccacccggguacggacaaugaccaaaucuuccuguaugcucaagcaucaggaagaaucacagucucuaccaaaagaagccaacaaacuguaaucccgaauaucggaucuagacccagaguaaggaauauccccagcagaauaagcaucuauuggacaauaguaaaaccgggagacauacuuuugauuaacagcacagggaaucuaauugcuccuagggguuacuucaaaauacgaagugggaaaagcucaauaaugagaucagaugcacccauuggcaaaugcaauucugaaugcaucacuccaaauggaagcauucccaaugacaaaccauuccaaaauguaaacaggaucacauacggggccugucccagauauguuaagcaaaacacucugaaauuggcaacagggaugcgaaauguaccagagaaacaaacuagaggcauauuuggcgcaaucgcggguuucauagaaaaugguugggagggaaugguggaugguugguacgguuucaggcaucaaaauucugagggaauaggacaagcagcagaucucaaaagcacucaagcagcaaucgaucaaaucaaugggaagcugaauagguugaucgggaaaaccaacgagaaauuccaucagauugaaaaagaauucucagaagucgaagggaggauucaggaccuugagaaauauguugaggacaccaaaauagaucucuggucauacaacgcggagcuucuuguugcccuagagaaccaacauacaauugaucuaacugacucagaaaugaacaaacuguuugaaaaaacaaagaagcaacugagggaaaaugcugaggauaugggcaaugguuguuucaaaauauaccacaaaugugacaaugccugcauaggaucaaucagaaauggaacuuaugaccacgauguauacagagaugaagcauuaaacaaccgguuccagaucaagggcguugagcugaagucaggauacaaagauuggauccuauggauuuccuuugccauaucauguuuuuugcuuuguguugcuuuguugggguucaucaugugggccugccaaaaaggcaacauuaggugcaacauuugcauuuga

SEQ ID NO: 34319 - RNA, 1701 nt, Artificial Sequence
  derived and/or modified CDS sequence (wt) from hemagglutinin__InfluenzaA__ACD85528
augaagacuaucauugcuuuaagcuacauucuaugucugguuuucgcucaaaaacuuccuggaaaugacaacagcacggcaacgcugugccuugggcaccaugcaguaccaaacggaacgauagugaaaacaaucacgaaugaccaaauugaaguuacuaaugcuacugagcugguucagaguuccucaacaggugaaauaugcgacaguccucaucagauccuugauggagaaaacugcacacuaauagaugcucuauugggagacccucagugugauggcuuccaaaauaagaaaugggaccuuuuuguugaacgcagcaaagccuacagcaacuguuacccuuaugaugugccggauuaugucucccuuaggucacuaguugccucauccggcacacuggaguuuaacaaugaaagcuucaauuggacuggagucacucaaaacggaacaagcucugcuugcauaaggagaucuaauaaaaguuucuuuaguagauugaauugguugacccacuuaaaauucaaauacccagcauugaacgugacuaugccaaacaaugaaaauuuugacaaauuguacauuugggggguucaccacccggguacggacaaugaccaaaucuuccuguaugcucaagcaucaggaagaaucacagucucuaccaaaagaagccaacaaacuguaaucccgaauaucggaucuagacccagaguaaggaauauccccagcagaauaagcaucuauuggacaauaguaaaaccgggagacauacuuuugauuaacagcacagggaaucuaauugcuccuagggguuacuucaaaauacgaagugggaaaagcucaauaaugagaucagaugcacccauuggcaaaugcaauucugaaugcaucacuccaaauggaagcauucccaaugacaaaccauuccaaaauguaaacaggaucacauacggggccugucccagauauguuaagcaaaacacucugaaauuggcaacagggaugcgaaauguaccagagaaacaaacuagaggcauauuuggcgcaaucgcggguuucauagaaaaugguugggagggaaugguggaugguugguacgguuucaggcaucaaaauucugagggaauaggacaagcagcagaucucaaaagcacucaagcagcaaucgaucaaaucaaugggaagcugaauagguugaucgggaaaaccaacgagaaauuccaucagauugaaaaagaauucucagaagucgaagggaggauucaggaccuugagaaauauguugaggacaccaaaauagaucucuggucauacaacgcggagcuucuuguugcccuggagaaccaacauacaauugaucuaacugacucagaaaugaacaaacuguuugaaaaaacaaagaagcaacugagggaaaaugcugaggaucugggcaaugguuguuucaaaauauaccacaaaugugacaaugccugcauaggaucaaucagaaauggaacuuaugaccacgauguauacagagaugaagcauuaaacaaccgguuccagaucaagggcguugagcugaagucaggauacaaagauuggauccuauggauuuccuuugccauaucauguuuuuugcuuuguguugcuuuguugggguucaucaugugggccugccaaaaaggcaacauuaggugcaacauuugcauuuga

SEQ ID NO: 34320 - RNA, 1701 nt, Artificial Sequence
  derived and/or modified CDS sequence (wt) from hemagglutinin__InfluenzaA__ACD85539
augaagacuaucauugcuuugagcuacauucuaugucugguuuucgcucaaaaacuuccuggaaaugacaacagcacggcaacguugugccuugggcaccaugcaguaccaaacggaacgauagugaaaacaaucacgaaugaccaaauugaaguuacuaaugcuacugagcugguucagaguuccucaacaggugaaauaugcgacaguccucaucagauccuugauggagaaaacugcacacuaauagaugcucuauugggagacccucagugugauggcuuccaaaauaagaaaugggaccuuuuuguugaacgcagcaaagccuacagcaacuguuacccuuaugaugugccggauuaugccucccuuaggucacuaguugccucauccggcacacuggaguuuaacaaugaaagcuucaauuggacuggagucacucaaaacggaacaagcucugcuugcauaaggagaacuaauaacaguuucuuuaguagauugaauugguugacccacuuaaaauucaaauacccagcauugaacgugacuaugccaaacaaugaaaaauuugacaaauuguacauuugggggguucaccacccggguacggacaaugaccaaaucuuccuguaugcucaagcaucaggaagaaucacagucucuaccaaaagaagccaacaaacuguaaucccgaauaucggaucuagacccagaguaaggaauauccccagcagaauaagcaucuauuggacaauaguaaaaccgggagacauacuuuugauuaacagcacagggaaucuaauugcuccuagggguuacuucaaaauacgaagugggaaaagcucaauaaugagaucagaugcacccauuggcaaaugcaauucugaaugcaucacuccaaauggaagcauucccaaugacaaaccauuccaaaauguaaacaggaucacauacggggccugucccagauauguuaagcaaaacacucugaaauuggcaacagggaugcgaaauguaccagagaaacaaacuagaggcauauuuggcgcaaucgcggguuucauagaaaaugguugggagggaaugguggaugguugguacgguuucaggcaucaaaauucugagggaauaggacaagcagcagaucucaaaagcacucaagcagcaaucgaucaaaucaaugggaagcugaauagguugaucgggaaaaccaacgagaaauuccaucagauugaaaaagaauucucagaagucgaagggaggauucaggaccuugagaaauauguugaggacaccaaaauagaucucuggucauacaacgcggagcuucuuguugcccuggagaaccaacauacaauugaucuaacugacucagaaaugaacaaacuguuugaaaaaacaaagaagcaacugagggaaaaugcugaggauaugggcaaugguuguuucaaaauauaccacaaaugugacaaugccugcauaggaucaaucagaaauggaacuuaugaccacgauguauacagagaugaagcauuaaacaaccgguuccagaucaagggcguugagcugaagucaggauacaaagauuggauccuauggauuuccuuugccauaucauguuuuuugcuuuguguugcuuuguugggguucaucaugugggccugccaaaaaggcaacauuaggugcaacauuugcauuuga

SEQ ID NO: 34321 - RNA, 1701 nt, Artificial Sequence
  derived and/or modified CDS sequence (wt) from hemagglutinin__InfluenzaA__ACD85550
augaagacuaucauugcuuugagcuacauucuaugucugguuuucgcucaaaaacuuccuggaaaugacaacagcacggcaacgcugugccuugggcaccaugcaguaccaaacggaacgauagugaaaacaaucacgaaugaccaaauugaaguuacuaaugcuacugagcugguucagaguuccucaacaggugaaauaugcgacaguccucaucagauccuugauggagaaaacugcacacuaauagaugcucuauugggagacccucagugugauggcuuccaaaauaagaaaugggaccuuuuuguugaacgcagcaaagccuacagcaacuguuacccuuaugaugugccggauuaugccucccuuaggucacuaguugccucauccggcacacuggaguuuaacaaugaaagcuucaauuggacuggagucacucaaaacggaacaagcucugcuugcauaaggagaucuaauaacaguuucuuuaguagauugaauugguugacccacuuaaaauucaaauacccagcauugaacgugacuaugccaaacaaugaaaaauuugacaaauuguacauuugggggguucaccacccggguacggacaaugaccaaaucuuccuguaugcucaagcaucaggaagaaucacagucucuaccaaaagaagccaacaaacuguaaucccgaauaucggaucuagacccagaguaaggaauauccccagcagaauaagcaucuauuggacaauaguaaaaccgggagacauacuuuugauuaacagcacagggaaucuaauugcuccuagggguuacuucaaaauacgaagugggaaaagcucaauaaugagaucagaugcacccauuggcaaaugcaauucugaaugcaucacuccaaauggaagcauucccaaugacaaaccauuccaaaauguaaacaggaucacauacggggccugucccagauauguuaagcaaaacacucugaaauuggcaacagggaugcgaaauguaccagagaaacaaacuagaggcauauuuggcgcaaucgcggguuucauagaaaaugguugggagggaaugguggaugguugguacgguuucaggcaucaaaauucugagggaauaggacaagcagcagaucucaaaagcacucaagcagcaaucgaucaaaucaaugggaagcugaauagguugaucgggaaaaccaacgagaaauuccaucagauugaaaaagaauucucagaagucgaagggaggauucaggaccuugagaaauauguugaggacaccaaaauagaucucuggucauacaacgcggagcuucuuguugcccuggagaaccaacauacaauugaucuaacugacucagaaaugaacaaacuguuugaaaaaacaaagaagcaacugagggaaaaugcugaggaucugggcaaugguuguuucaaaauauaccacaaaugugacaaugccugcauaggaucaaucagaaauggaacuuaugaccacgauguauacagagaugaagcauuaaacaaccgguuccagaucaagggcguugagcugaagucaggauacaaagauuggauccuauggauuuccuuugccaugucauguuuuuugcuuuguguugcuuuguugggguucaucaugugggccugccaaaaaggcaacauuaggugcaacauuugcauuuga

SEQ ID NO: 34322 - RNA, 1701 nt, Artificial Sequence; identical to SEQ ID NO: 34316
  derived and/or modified CDS sequence (wt) from hemagglutinin__InfluenzaA__ACD85561

SEQ ID NO: 34323 - RNA, 1701 nt, Artificial Sequence
  derived and/or modified CDS sequence (wt) from hemagglutinin__InfluenzaA__ACD85572
augaagacuaucauugcuuugagcuacauucuaugucugguuuucgcucaaaaacuuccuggaaaugacaacagcacggcaacgcugugccuugggcaccaugcaguaccaaacggaacgauagugaaaacaaucacgaaugaccaaauugaaguuacuaaugcuacugagcugguucagaguuccucaacaggugaaauaugcgacaguccucaucagauccuugauggagaaaacugcacacuaauagaugcucuauugggagacccucagugugauggcuuccaaaauaagaaaugggaccuuuuuguugaacgcagcaaagccuacagcaacuguuacccuuaugaugugccggauuaugccucccuuaggucacuaguugccucauccggcacacuggaguuuaacaaugaaagcuucaauuggacuggagucacucaaaacggaacaagcucugcuugcauaaggagaucuaauaacaguuucuuuaguagauugaauugguugacccacuuaaaauucaaauacccagcauugaacgugacuaugccaaacaaugaaaaauuugacaaauuguauauuugggggguucaccacccgggcacggacaaugaccaaaucuuccuguaugcucaagcaucaggaagaaucacagucucuaccaaaagaagccaacaaacuguaaucccgaauaccggaucuagacccagaguaaggaauauccccagcagaauaagcaucuauuggacaauaguaaaaccgggagacauacuuuugauuaacagcacagggaaucuaauugcuccuagggguuacuucaaaauacgaagugggaaaagcucaauaaugagaucagaugcacccauuggcaaaugcaauucugaaugcaucacuccaaauggaagcauucccaaugacaaaccauuccaaaauguaaacaggaucacauacggggccugucccagauauguuaagcaaaacacucugaaauuggcaacagggaugcgaaauguaccagagaaacaaacuagaggcauauuuggcgcaaucgcggguuucauagaaaaugguugggagggaaugguggaugguugguacgguuucaggcaucaaaauucugagggaauaggacaagcagcagaucucaaaagcacucaagcagcaaucgaucaaaucaaugggaagcugaauagguugaucgggaaaaccaacgagaaauuccaucagauugaaaaagaauucucagaagucgaagggaggauucaggaccuugagaaauauguugaggacaccaaaauagaucucuggucauacaacgcggagcuucuuguugcccuggagaaccaacauacaauugaucuaacugacucagaaaugaacaaacuguuugaaaaaacaaagaagcaacugagggaaaaugcugaggauaugggcaaugguuguuucaaaauauaccacaaaugugacaaugccugcauaggaucaaucagaaauggaacuuaugaccacgauguauacagagaugaagcauuaaacaaccgguuccagaucaagggcguugagcugaagucaggauacaaagauuggauccuauggauuuccuuugccauaucauguuuuuugcuuuguguugcuuuguugggguucaucaugugggccugccaaaaaggcaacauuaggugcaacauuugcauuuga

SEQ ID NO: 34324 - RNA, 1701 nt, Artificial Sequence; identical to SEQ ID NO: 34320
  derived and/or modified CDS sequence (wt) from hemagglutinin__InfluenzaA__ACD85583

SEQ ID NO: 34325 - RNA, 1701 nt, Artificial Sequence
  derived and/or modified CDS sequence (wt) from hemagglutinin__InfluenzaA__ACD93579
augaagacuaucauugcuuugagcuacauucuaugucugguuuucgcucaaaaacuucccggaaaugacaacagcacggcaacgcugugccuugggcaccaugcaguaccaaacggaacgauagugaaaacaaucacgaaugaccaaauugaaguuacuaaugcuacugagcugguucagaguuccucaacaggugaaauaugcgacaguccucaucagauccuugauggagaaaacugcacacuaauagaugcucuauugggagacccucagugugauggcuuccaaaauaagaaaugggaccuuuuuguugaacgcagcaaagccuacagcaacuguuacccuuaugaugugccggauuaugccucccuuaggucacuaguugcaucauccggcacacuggaguuuaacaaugaaagcuucaauuggacuggagucacucaaaacggaacaagcucugcuugcauaaggagaucuaauaacaguuucuuuaguagauugaauugguugacccacuuaaaauucaaauacccagcauugaacgugacuaugccaaacaaugaaaaauuugacaaauuguacauuugggggguucaccacccggguacggacaaugaccaaaucuuccuguaugcucaagcaucaggaagaaucacagucucuaccaaaagaagccaacaaacuguaaucccgaauaucggaucuagacccagaguaaggaauauccccagcagaauaagcaucuauuggacaauaguaaaaccgggagacauacuuuugauuaacagcacagggaaucuaauugcuccuagggguuacuucaaaauacgaagugggaaaagcucaauaaugagaucagaugcacccauuggcaaaugcaauucugaaugcaucacuccaaauggaagcauucccaaugacaaaccauuccaaaauguaaacaggaucacauacggggccugucccagauauguuaagcaaaacacucugaaauuggcaacagggaugcgaaauguaccagagaaacaaacuagaggcauauuuggugcaaucgcggguuucauagaaaaugguugggagggaaugguggaugguugguacgguuucaggcaucaaaauucugagggaauaggacaagcagcagaucucaaaagcacucaagcagcaaucgaucaaaucaaugggaagcugaauagguugaucgggaaaaccaacgagaaauuccaucagauugaaaaagaauucucagaagucgaagggagaauucaggaccuugagaaauauguugaggacaccaaaauagaucucuggucauacaacgcggagcuucuuguugcccuggagaaccaacauacaauugaucuaacugacucagaaaugaacaaacuguuugaaaaaacaaagaagcaacugagggaaaaugcugaggauaugggcaaugguuguuucaaaauauaccacaaaugugacaauaccugcauaggaucaaucagaaauggaacuuaugaccacgauguauacagagaugaagcauuaaacaaccgguuccagaucaagggcguugagcugaagucaggauacaaagauuggauccuauggauuuccuuugccauaucauguuuuuugcuuuguguugcuuuguugggguucaucaugugggccugccaaaaaggcaacauuaggugcaacauuugcauuuga

SEQ ID NO: 34326 - RNA, 1701 nt, Artificial Sequence; identical to SEQ ID NO: 32647
  derived and/or modified CDS sequence (wt) from hemagglutinin__InfluenzaA__ACF09402

SEQ ID NO: 34327 - RNA, 1701 nt, Artificial Sequence
  derived and/or modified CDS sequence (wt) from hemagglutinin__InfluenzaA__ACF22159
augaagacuaucauugcuuugagcuacauucuaugucugguuuuugcucaaaagcuucccggaaaugacaacagcacggcaacgcugugccuugggcaccaugcaguaccaaacggaacgauagugaaaacaaucacgaaugaccaaauugaaguuacuaaugcuacugagcugguucagaauuccucaacagguggaauaugcgacaguccucaucagauccuugauggagaaaacugcacacuaauagaugcucuauugggagacccucagugugauggcuuccaaaauaagaaaugggaccuuuuuguugaacgcagcaaagccuacagcaacuguuacccuuaugaugugccggauuaugccucccuuaggucacuaguugccucauccggcacacuggaguuuaacaaugaaagcuucaauuggacuggagucacucagaauggaacaagcucugcuugcaaaaggagaucuaauaaaaguuucuuuaguagauugaauugguugacccacuuaaaauacaaauacccagcauugaacgugacuaugccaaacaaugaaaaauuugacaaauuguacauuugggggguucaccacccggguacggacagugaccaaaucagccuauaugcucaagcaucaggaagaaucacagucucuaccaaaagaagccaacaaacuguaaucccgaauaucggauuuagacccaggguaagggaugucuccagcagaauaagcaucuauuggacaauaguaaaaccgggagacauacuuuugauuaacagcacagggaaucuaauugcuccucgggguuacuucaaaauacgaagugggaaaagcucaauaaugagaucagaugcacccauuggcaaaugcaauucugaaugcaucacuccaaauggaagcauucccaaugacaaaccauuucaaaauguaaacaggaucacauauggggccugucccagauauguuaagcaaaacacucugaaauuggcaacagggaugcgaaauguaccagagaaacaaacuagaggcauauuuggcgcaaucgcggguuucauagaaaaugguugggagggaaugguggacgguugguacgguuucaggcaucaaaauucugagggcacaggacaagcagcagaucucaaaagcacucaagcagcaaucaaccaaaucaaugggaaacugaauagguuaaucgggaaaacaaacgagaaauuccaucagauugaaaaagaauucucagaaguagaagggagaauucaggaccucgagaaauauguugaggacacuaaaauagaucucuggucauacaacgcggagcuucuuguugcccuggagaaccaacauacaauugaucuaacugacucagaaaugaacaaacuguuugaaagaacaaagaagcaacugagggaaaaugcugaggauaugggcaaugguuguuucaaaauauaccacaaaugugacaaugccugcauagagucaaucagaaauggaacuuaugaccaugauguauacagagaugaagcauuaaacaaccgguuccagaucaaagguguugagcugaagucaggauacaaagauuggauccuauggauuuccuuugccauaucauguuuuuugcuuuguguugcuuuguugggguucaucaugugggccugccaaaaaggcaacauuaggugcaacauuugcauuuga

SEQ ID NO: 34328 - RNA, 1701 nt, Artificial Sequence
  derived and/or modified CDS sequence (wt) from hemagglutinin__InfluenzaA__ACF22188
augaagaccaucauugcuuugagcuacauuuucugucuggcucucggccaagaccuuccaggaaaugacaacagcacagcaacgcugugccugggacaucaugcggugccaaacggaacacuagugaaaacaaucacagaugaucagauugaagugacuaaugcuacugagcuaguucagagcuccucaacggggaaaauaugcaacaauccucaucgaauccuugauggaauagacugcacacugauagaugcucuauugggggacccucauugugauguuuuucaaaaugagacaugggaccuuuucguugaacgcagcaaagcuuucagcaacuguuacccuuaugaugugccagauuaugccucccuuaggucacuaguugccucgucaggcacucuggaguuuaucacugaggguuucacuuggacuggggucacucagaaugggggaagcaaugcuugcaaaaggggaccugguagcgguuuuuucaguagacugaacugguugaccaaaucaggaagcacauauccagugcugaacgugacuaugccaaacaaugacaauuuugacaaacuauacauuugggggguucaccacccgagcacgaaccaagaacaaaccagccuguauguucaagcaucagggagagucacagucucuaccagaagaagccagcaaacuauaaucccgaauaucugguccagacccuggguaaggggucugucuaguagaauaagcaucuauuggacaauaguuaagccgggagacguacugguaauuaauaguaaugggaaccuaaucgcuccucgggguuauuucaaaaugcgcacugggaaaagcucaauaaugaggucagaugcaccuauugauaccuguauuucugaaugcaucacuccaaauggaagcauucccaaugacaagcccuuucaaaacguaaacaagaucacauauggagcaugccccaaguauguuaagcaaaacacccugaaguuggcaacagggaugcggaauguaccagagaaacaaacuagaggccuauucggcgcaauagcagguuucauagaaaaugguugggagggaaugauagacgguugguacgguuucaggcaucaaaauucugagggcacaggacaagcagcagaucuuaaaagcacucaagcagccaucgaccaaaucaaugggaaauugaacaggguaaucgagaagacgaacgagaaauuccaucaaaucgaaaaggaauucucagaaguagaagggagaauucaggaccucgagaaauacguugaagacacuaaaauagaucucuggucuuacaaugcggagcuucuugucgcucuggagaaucaacauacaauugaccugacugacucggaaaugaacaagcuguuugaaaaaacaaggaggcaacugagggaaaaugcugaagacaugggcaaugguugcuucaaaauauaccacaaaugugacaacgcuugcauagagucaaucagaaaugggaauuaugaccaugauguauacagagacgaagcauuaaacaaccgguuucagaucaaagguguugaacugaagucuggauacaaagacuggauccuguggauuuccuuugccauaucaugcuuuuugcuuuguguuguuuugcugggguucaucaugugggccugccagagaggcaacauuaggugcaacauuugcauuuga

SEQ ID NO: 34329 - RNA, 1701 nt, Artificial Sequence
  derived and/or modified CDS sequence (wt) from hemagglutinin__InfluenzaA__ACF22199
augaagaccaucauugcuuugagcuacauuuucugucuggcucucggccaagaccuuccaggaaaugacaacaguacagcaacgcugugccugggacaucaugcggugccaaacggaacacuagugaaaacaaucacagaugaucagauugaagugacuaaugcuacugagcuaguucagagcuccucaacggggaaaauaugcaacaauccucaucgaauccuugauggaauagacugcacacugauagaugcucuauugggggacccucauugugauguuuuucaaaaugagacaugggaccuuuucguugaacgcagcaaagcuuucagcaacuguuacccuuaugaugugccagauuaugccucccuuaggucacuaguugccucgucaggcacucuggaguuuaucacugaggguuucacuuggacuggggucacucagaaugggggaagcaaugcuugcaaaaggggaccugguagcgguuuuuucaguagacugaacugguugaccaaaucaggaagcacauauccagugcugaacgugacuaugccaaacaaugacaauuuugacaaacuauacauuugggggguucaccacccgagcacgaaccaagaacaaaccagccuguauguucaagcaucagggagagucacagucucuaccagaagaagccagcaaacuauaaucccgaauaucugguccagacccuggguaaggggucugucuaguagaauaagcaucuauuggacaauaguuaagccgggagacguacugguaauuaauaguaaugggaaccuaaucgcuccucgggguuauuucaaaaugcgcacugggaaaagcucaauaaugaggucagaugcaccuauugauaccuguauuucugaaugcaucacuccaaauggaagcauucccaaugacaagcccuuucaaaacguaaacaagaucacauauggagcaugccccaaguauguuaagcaaaacacccugaaguuggcaacagggaugcggaauguaccagagaaacaaacuagaggccuauucggcgcaauagcagguuucauagaaaaugguugggagggaaugauagacgguugguacgguuucaggcaucaaaauucugagggcacaggacaagcagcagaucuuaaaagcacucaagcagccaucgaccaaaucaaugggaaauugaacaggguaaucgagaagacgaacgagaaauuccaucaaaucgaaaaggaauucucagaaguagaagggagaauucaggaccucgagaaauacguugaagacacuaaaauagaucucuggucuuacaaugcggagcuucuugucgcucuggagaaucaacauacaauugaccugacugacucggaaaugaacaagcuguuugaaaaaacaaggaggcaacugagggaaaaugcugaagacaugggcaaugguugcuucaaaauauaccacaaaugugacaacgcuugcauagagucaaucagaaaugggaauuaugaccaugauguauacagagacgaagcauuaaacaaccgguuucagaucaaagguguugaacugaagucuggauacaaagacuggauccuguggauuuccuuugccauaucaugcuuuuugcuuuguguuguuuugcugggguucaucaugugggccugccagagaggcaacauuaggugcaacauuugcauuuga

SEQ ID NO: 34330 - RNA, 1701 nt, Artificial Sequence
  derived and/or modified CDS sequence (wt) from hemagglutinin__InfluenzaA__ACF22210
augaagaccaucauugcuuugagcuacauuuucugucuggcucucggccaagaccuuccaggaaaugacaacagcacagcaacgcugugccugggacaucaugcggugccaaacggaacacuagugaaaacaaucacagaugaucagauugaagugacuaaugcuacugagcuaguucagagcuccucaacggggaaaauaugcaacaauccucaucgaauccuugauggaauagacugcacacugauagaugcucuauugggggacccucauugugauguuuuucaaaaugagacaugggaccuuuucguugaacgcagcaaagcuuucagcaacuguuacccuuaugaugugccagauuaugccucccuuaggucacuaguugccucgucaggcacucuggaguuuaucacugaggguuucacuuggacuggggucacucagaaugggggaagcaaugcuugcaaaaggggaccugguagcgguuuuuucaguagacugaacugguugaccaaaucaggaagcacauauccagugcugaacgugacuaugccaaacaaugacaauuuugacaaacuauacauuugggggguucaccacccgagcacgaaccaagaacaaaccagccuguauguucaagcaucagggagagucacagucucuaccaggagaagccagcaaacuauaaucccgaauaucggguccagacccuggguaaggggucugucuaguagaauaagcaucuauuggacaauaguuaagccgggagacguacugguaauuaauaguaaugggaaccuaaucgcuccucgggguuauuucaaaaugcgcacugggaaaagcucaauaaugaggucagaugcaccuauugauaccuguauuucugaaugcaucacuccaaauggaagcauucccaaugacaagcccuuucaaaacguaaacaagaucacauauggagcaugccccaaguauguuaagcaaaacacccugaaguuggcaacagggaugcggaauguaccagagaaacaaacuagaggccuauucggcgcaauagcagguuucauagaaaaugguugggagggaaugauagacgguugguacgguuucaggcaucaaaauucugagggcacaggacaagcagcagaucuuaaaagcacucaagcagccaucgaccaaaucaaugggaaauugaacaggguaaucgagaagacgaacgagaaauuccaucaaaucgaaaaggaauucucagaaguagaagggagaauucaggaccucgagaaauacguugaagacacuaaaauagaucucuggucuuacaaugcggagcuucuugucgcucuggagaaucaacauacaauugaccugacugacucggaaaugaacaagcuguuugaaaaaacaaggaggcaacugagggaaaaugcugaagacaugggcaaugguugcuucaaaauauaccacaaaugugacaacgcuugcauagagucaaucagaaaugggacuuaugaccaugauguauacagagacgaagcauuaaacaaccgguuucagaucaaagguguugaacugaagucuggauacaaagacuggauccuguggauuuccuuugccauaucaugcuuuuugcuuuguguuguuuugcugggguucaucaugugggccugccagagaggcaacauuaggugcaacauuugcauuuga

SEQ ID NO: 34331 - RNA, 1701 nt, Artificial Sequence
  derived and/or modified CDS sequence (wt) from hemagglutinin__InfluenzaA__ACF22221
augaagaccaucauugcuuugagcuacauuuucugucuggcucucggccaagaccuuccaggaaaugacaacagcacagcaacgcugugccugggacaucaugcggugccaaacggaacacuagugaaaacaaucacagaugaucagauugaagugacuaaugcuacugagcuaguucagagcuccucaacggggaaaauaugcaacaauccucaucgaauccuugauggaauagacugcacacugauagaugcucuauugggggacccucauugugauguuuuucaaaaugagacaugggaccuuuucguugaacgcagcaaagcuuucagcaacuguuacccuuaugaugugccagauuaugccucccuuaggucacuaguugccucgucaggcacucuggaguuuaucacugaggguuucacuuggacuggggucacucagaaugggggaagcaaugcuugcaaaaggggaccugguagcgguuuuuucaguagacugaacugguugaccaaaucaggaagcacauauccagugcugaacgugacuaugccaaacaaugacaauuuugacaaacuauacauuugggggguucaccacccgagcacgaaccaagaacaaaccagccuguauguucaagcaucagggagagucacagucucuaccagaagaagccagcaaacuauaaucccgaauaucggguccagacccuggguaaggggucugucuaguagaauaagcaucuauuggacaauaguuaagccgggagacguacugguaauuaauaguaaugggaaccuaaucgcuccucgggguuauuucaaaaugcgcacugggaaaagcucaauaaugaggucagaugcaccuauugauaccuguauuucugaaugcaucacuccaaauggaagcauucccaaugacaagcccuuucaaaacguaaacaagaucacauauggagcaugccccaaguauguuaagcaaaacacccugaaguuggcaacagggaugcggaauguaccagagaaacaaacuagaggccuauucggcgcaauagcagguuucauagaaaaugguugggagggaaugauagacgguugguacgguuucaggcaucaaaauucugagggcacaggacaagcagcagaucuuaaaagcacucaagcagccaucgaccaaaucaaugggaaauugaacaggguaaucgagaagacgaacgagaaauuccaucaaaucgaaaaggaauucucagaaguagaagggagaauucaggaccucgagaaauacguugaagacacuaaaauagaucucuggucuuacaaugcggagcuucuugucgcucuggagaaucaacauacaauugaccugacugacucggaaaugaacaagcuguuugaaaaaacaaggaggcaacugagggaaaaugcugaagacaugggcaaugguugcuucaaaauauaccacaaaugugacaacgcuugcauagagucaaucagaaaugggacuuaugaccaugauguauacagagacgaagcauuaaacaaccgguuucagaucaaagguguugaacugaagucuggauacaaagacuggauccuguggauuuccuuugccauaucaugcuuuuugcuuuguguuguuuugcugggguucaucaugugggccugccagagaggcaacauuaggugcaacauuugcauuuga

SEQ ID NO: 34332 - RNA, 1701 nt, Artificial Sequence; identical to SEQ ID NO: 34330
  derived and/or modified CDS sequence (wt) from hemagglutinin__InfluenzaA__ACF22232

SEQ ID NO: 34333 - RNA, 1701 nt, Artificial Sequence; identical to SEQ ID NO: 34331
  derived and/or modified CDS sequence (wt) from hemagglutinin__InfluenzaA__ACF22243

SEQ ID NO: 34334 - RNA, 1701 nt, Artificial Sequence; identical to SEQ ID NO: 34331
  derived and/or modified CDS sequence (wt) from hemagglutinin__InfluenzaA__ACF22254

SEQ ID NO: 34335 - RNA, 1701 nt, Artificial Sequence; identical to SEQ ID NO: 34331
  derived and/or modified CDS sequence (wt) from hemagglutinin__InfluenzaA__ACF22265

SEQ ID NO: 34336 - RNA, 1701 nt, Artificial Sequence; identical to SEQ ID NO: 34330
  derived and/or modified CDS sequence (wt) from hemagglutinin__InfluenzaA__ACF22276

SEQ ID NO: 34337 - RNA, 1701 nt, Artificial Sequence; identical to SEQ ID NO: 34330
  derived and/or modified CDS sequence (wt) from hemagglutinin__InfluenzaA__ACF22287

SEQ ID NO: 34338 - RNA, 1701 nt, Artificial Sequence; identical to SEQ ID NO: 34330
  derived and/or modified CDS sequence (wt) from hemagglutinin__InfluenzaA__ACF22298

SEQ ID NO: 34339 - RNA, 1701 nt, Artificial Sequence; identical to SEQ ID NO: 34330
  derived and/or modified CDS sequence (wt) from hemagglutinin__InfluenzaA__ACF22320

SEQ ID NO: 34340 - RNA, 1701 nt, Artificial Sequence
  derived and/or modified CDS sequence (wt) from hemagglutinin__InfluenzaA__ACF22342
augaagaccaucauugcuuugagcuacauuuucugucuggcucucggccaagaccuuccaggaaaugacaacagcacagcaacgcugugccugggacaucaugcggugccaaacggaacacuagugaaaacaaucacagaugaucagauugaagugacuaaugcuacugagcuaguucagagcuccucaacggggaaaauaugcaacaauccucaucgaauccuugauggaauagacugcacacugauagaugcucuauugggggacccucauugugauguuuuucaaaaugagacaugggaccuuuucguugaacgcagcaaagcuuucagcaacuguuacccuuaugaugugccagauuaugccucccuuaggucacuaguugccucgucaggcacucuggaguuuaucacugaggguuucacuuggacuggggucacucagaaugggggaagcaaugcuugcaaaaggggaccugguagcgguuuuuucaguagacugaacugguugaccaaaucaggaagcacauauccagugcugaacgugacuaugccaaacaaugacaauuuugacaaacuauacauuugggggguucaccacccgagcacgaaccaagaacaaaccagccuguauguucaagcaucagggagagucacagucucuaccagaagaagccagcaaacuauaaucccgaauaucggguccagacccuggguaaggggucugucuaguagaauaagcaucuauuggacaauaguuaagccgggagacguacugguaauuaauaguaaugggaaccuaaucgcuccucgggguuauuucaaaaugcgcacugggaaaagcucaauaaugaggucagaugcaccuauugauaccuguauuucugaaugcaucacuccaaauggaagcauucccaaugacaagcccuuucaaaacguaaacaagaucacauauggagcaugccccaaguauguuaagcaaaacacccugaaguuggcaacagggaugcggaauguaccagagaaacaaacuagaggccuauucggugcaauagcagguuucauagaaaaugguugggagggaaugauagacgguugguacgguuucaggcaucaaaauucugagggcacaggacaagcagcagaucuuaaaagcacucaagcagccaucgaccaaaucaaugggaaauugaacaggguaaucgagaagacgaacgagaaauuccaucaaaucgaaaaggaauucucagaaguagaagggagaauucaggaccucgagaaauacguugaagacacuaaaauagaucucuggucuuacaaugcggagcuucuugucgcucuggagaaucaacauacaauugaccugacugacucggaaaugaacaagcuguuugaaaaaacaaggaggcaacugagggaaaaugcugaagacaugggcaaugguugcuucaaaauauaccacaaaugugacaacgcuugcauagagucaaucagaaaugggacuuaugaccaugauguauacagagacgaagcauuaaacaaccgguuucagaucaaagguguugaacugaagucuggauacaaagacuggauccuguggauuuccuuugccauaucaugcuuuuugcuuuguguuguuuugcugggguucaucaugugggccugccagagaggcaacauuaggugcaacauuugcauuuga

SEQ ID NO: 34341 - RNA, 1701 nt, Artificial Sequence
  derived and/or modified CDS sequence (wt) from hemagglutinin__InfluenzaA__ACF22364
augaagaccaucauugcuuugagcuacauuuucugucuggcucucggccaagaccuuccaggaaaugacaacagcacagcaacgcugugccugggacaucaugcggugccaaacggaacacuagugaaaacaaucacagaugaucagauugaagugacuaaugcuacugagcuaguucagagcuccucaacggggaaaauaugcaacaauccucaucgaauccuugauggaauagacugcacacugauagaugcucuauugggggacccucauugugauguuuuucaaaaugagacaugggaccuuuucguugaacgcagcaaagcuuucagcaacuguuacccuuaugaugugccagauuaugccucccuuaggucacuaguugccucgucaggcacucuggaguuuaucacugaggguuucacuuggacuggggucacucagaaugggggaagcaaugcuugcaaaaggggaccugguagcgguuuuuucaguagacugaacugguugaccaaaucaggaagcacauauccagugcugaacgugacuaugccaaacaaugacaauuuugacaaacuauacauuugggggguucaccacccgagcacgaaccaagaacaaaccagccuguauguucaagcaucagggagagucacagucucuaccaggagaagccagcaaacuauaaucccgaauaucgaguccagacccuggguaaggggucugucuaguagaauaagcaucuauuggacaauaguuaagccgggagacguacugguaauuaauaguaaugggaaccuaaucgcuccucgggguuauuucaaaaugcgcacugggaaaagcucaauaaugaggucagaugcaccuauugauaccuguauuucugaaugcaucacuccaaauggaagcauucccaaugacaagcccuuucaaaacguaaacaagaucacauauggagcaugccccaaguauguuaagcaaaacacccugaaguuggcaacagggaugcggaauguaccagagaaacaaacuagaggccuauucggcgcaauagcaggguucauagaaaaugguugggagggaaugauagacgguugguacgguuucaggcaucaaaauucugagggcacaggacaagcagcagaucuuaaaagcacucaagcagccaucgaccaaaucaaugggaaauugaacaggguaaucgagaagacgaacgagaaauuccaucaaaucgaaaaggaauucucagaaguagaagggagaauucaggaccucgagaaauacguugaagacacuaaaauagaucucuggucuuacaaugcggagcuucuugucgcucuggagaaucaacauacaauugaccugacugacucggaaaugaacaagcuguuugaaaaaacaaggaggcaacugagggaaaaugcugaagacaugggcaaugguugcuucaaaauauaccacaaaugugacaacgcuugcauagagucaaucagaaaugggacuuaugaccaugauguauacagagacgaagcauuaaacaaccgguuucagaucaaagguguugaacugaagucuggauacaaagacuggauccuguggauuuccuuugccauaucaugcuuuuugcuuuguguuguuuugcugggguucaucaugugggccugccagagaggcaacauuaggugcaacauuugcauuuga

SEQ ID NO: 34342 - RNA, 1701 nt, Artificial Sequence
  derived and/or modified CDS sequence (wt) from hemagglutinin__InfluenzaA__ACF22408
augaagacuaucauugcuuugagcuacauucuaugucugguuuucgcucaaaaacuuccuggaaaugacaacagcacggcaacgcugugccuugggcaccaugcaguaccaaacggaacgauagugaaaacaaucacgaaugaccaaauugaaguuacuaaugcuacugagcugguucagaguuccucaacaggugaaauaugcgacaguccucaucagauccuugauggagaaaacugcacacuaauagaugcucuauugggagacccucagugugauggcuuccaaaauaagaaaugggaccuuuuuguugaacgcagcaaagccuacagcaacuguuacccuuaugaugugccggauuaugccucccuuaggucacuaguugccucauccggcacacuggaauuuaacaaugaaagcuucaauuggacuggagucacucaaaacggaacaagcucugcuugcauaaggagaacuaauaacaguuucuuuaguagauugaauugguugacccacuuaaaauucaaauacccagcauugaacgugacuaugccaaacaaugaaaaauuugacaaauuguacauuugggggguucaccacccggguacggacaaugaccaaaucuuccuguaugcucaagcaucaggaagaaucacagucucuaccaaaagaagccaacaaacuguaaucccgaauaucggaucuagacccagaguaaggaauauccccagcagaauaagcaucuauuggacaauaguaaaaccgggagacauacuuuugauuaacagcacagggaaucuaauugcuccuagggguuacuucaaaauacgaagugggaaaagcucaauaaugagaucagaugcacccauuggcaaaugcaauucugaaugcaucacuccaaauggaagcauucccaaugacaaaccauuccaaaauguaaacaggaucacauacggggccugucccagauauguuaagcaaaacacucugaaauuggcaacagggaugcgaaauguaccagagaaacaaacuagaggcauauuuggcgcaaucgcggguuucauagaaaaugguugggagggaaugguggaugguugguacgguuucaggcaucaaaauucugagggaauaggacaagcagcagaucucaaaagcacucaagcagcaaucgaucaaaucaaugggaagcugaauagguugaucgggaaaaccaacgagaaauuccaucagauugaaaaagaauucucagaagucgaagggaggauucaggaccuugagaaauauguugaggacaccaaaauagaucucuggucauacaacgcggagcuucuuguugcccuggagaaccaacauacaauugaucuaacugacucagaaaugaacaaacuguuugaaaaaacaaagaagcaacugagggaaaaugcugaggauaugggcaaugguuguuucaaaauauaccacaaaugugacaaugccugcauaggaucaaucagaaauggaacuuaugaccacgauguauacagagaugaagcauuaaacaaccgguuccagaucaagggcguugagcugaagucaggauacaaagauuggauccuauggauuuccuuugccauaucauguuuuuugcuuuguguugcuuuguugggguucaucaugugggccugccaaaaaggcaacauuaggugcaacauuugcauuuga

SEQ ID NO: 34343 - RNA, 1701 nt, Artificial Sequence; identical to SEQ ID NO: 33980
  derived and/or modified CDS sequence (wt) from hemagglutinin__InfluenzaA__ACF41669

SEQ ID NO: 34344 - RNA, 1698 nt, Artificial Sequence; identical to SEQ ID NO: 34269
  derived and/or modified CDS sequence (wt) from hemagglutinin__InfluenzaA__ACF41680

SEQ ID NO: 34345 - RNA, 1689 nt, Artificial Sequence
  derived and/or modified CDS sequence (wt) from hemagglutinin__InfluenzaA__ACF41691
auggccaucauuuaucucauacuccuguucacagcagugaggggggaccagauaugcauuggauaccaugccaauaauuccacagaaaaggucgacacaauucuagagcggaaugucacugugacucaugccaaggacauccuugagaagacccauaacggaaagcuaugcaaacuaaacggaauuccuccacuugaacuaggggauuguagcauugccggauggcuccuuggaaauccagaaugugauaggcuucuaagggugccagaaugguccuauauaauggagaaagaaaacccgagauacaguuuguguuauccaggcagcuucaaugacuaugaagaauugaaacaucuccucaguagcguaaaacacuucgagaaaguaaagauucugccaaaagauggauggacacagcaugagacagauggagguucaaaggccugcgcagugucagguaaaccaucauucuucaggaacauggucuggcugacaaagaaaggaccuaauuauccgguugccaaaagaucguacaacaauacgagcggagagcaaaugcuaauaauuuggggagugcaccauccuaaugaugaggcagaacaaagagcauuguaccaggaagugggaaccuauguuuccgcaagcacaucaacauuaaacaaaaggucaaccccagaaauagcagcaaggccuaaagugaguggacuaggaaguagaauggaauucucuuggacccucuuggaugugugggacaccauaaguuuugagagcacugguaaucuaguugcaccagaguauggauucaaaauaucgaaaagagguaguucagggaucaugaagacagaaggaacacuugggaacugugagaccaaaugccaaacuccuuugggagcaauaaauacaacacuaccuuuucacaauguccacccacugacaauaggugaaugccccaaauauguaaaaucggagaaauuggucuuagcaacaggacuaaggaauguuccccagauugaaucaagaggauuguuuggggcaauagcuggcuuuauagaaggaggauggcaaggaaugguugaugguugguauggauaccaucacagcaaugaccagggaucaggguaugcagcagacaaagaauccacucaaaaggcauuugacagaaucaccaacaagguaaauucugugauugaaaagaugaacacccaauuugaagcuguugggaaagaauucaguaacuuagagaaaagacuggaaaacuugaacaaaaagauggaagacggguuucuagauguguggacauacaaugcugagcuucuaguucugauggaaaaugagaggacacuugacuuucaugauucuaaugucaagaaccuguaugauaaagucagaaugcagcugagagacaacgucaaagaacuaggaaauggauguuuugaauuuuaucauaaaugugacgaugaaugcaugaauagugugaaaaaugggacguaugauuaucccaaguaugaagaagaaucuaaacuaaagagaaaugaaaucaaagggguggaauugagcagcauggggguuuaccaaauucuugccauuuaugcuacaguugcagguucucugucacuggcaaucaugauagcugggaucucuuucuggaugugcuccaacgggucucugcagugcagaaucugcauauga

SEQ ID NO: 34346 - RNA, 1701 nt, Artificial Sequence; identical to SEQ ID NO: 34328
  derived and/or modified CDS sequence (wt) from hemagglutinin__InfluenzaA__ACF41735

SEQ ID NO: 34347 - RNA, 1701 nt, Artificial Sequence
  derived and/or modified CDS sequence (wt) from hemagglutinin__InfluenzaA__ACF41790
augaagaccaucauugcuuugagcuacauuuucugucuggcucucggccaagaccuuccaggaaaugacaacagcacagcaacgcugugccugggacaucaugcggugccaaacggaacacuagugaaaacaaucacagaugaucagauugaagugacuaaugcuacugagcuaguucagagcuccucaacggggaaaauaugcaacaauccucaucgaauccuugauggaauagacugcacacugauagaugcucuauugggggacccucauugugauguuuuucaaaaugagacaugggaccuuuucguugaacgcagcaaagcuuucagcaacuguuacccuuaugaugugccagauuaugccucccuuaggucacuaguugccucgucaggcacucuggaguuuaucacugaggauuucacuuggacuggggucacucagaaugggggaagcaaugcuugcaaaaggggaccugguagcgguuuuuucaguagacugaacugguugaccaaaucaggaagcacauauccagugcuggacgugacuaugccaaacaaugacaauuuugacaaacuauacauuugggggguucaccacccgagcacgaaccaagaacaaaccagccuguauguucaagcaucagggagagucacagucucuaccagaagaagccagcaaacuauaaucccgaauaucggguccagacccuggguaaggggucugucuaguagaauaagcaucuauuggacaauaguuaagccgggagacguacugguaauuaauaguaaugggaaccuaaucgcuccucgggguuauuucaaaaugcgcacugggaaaagcucaauaaugaggucagaugcaccuauugauaccuguauuucugaaugcaucacuccaaauggaagcauucccaaugacaagcccuuucaaaacguaaacaagaucacauauggagcaugccccaaguauguuaagcaaaacacccugaaguuggcaacagggaugcggaauguaccagagaaacaaacuagaggccuauucggcgcaauagcagguuucauagaaaaugguugggagggaaugauagacgguugguacgguuucaggcaucaaaauucugagggcacaggacaagcagcagaucuuaaaagcacucaagcagccaucgaccaaaucaaugggaaauugaacaggguaaucgagaagacgaacgagaaauuccaucaaaucgaaaaggaauucucagaaguagaagggagaauucaggaccucgagaaauacguugaagacacuaaaauagaucucuggucuuacaaugcggagcuucuugucgcucuggagaaucaacauacaauugaccugacugacucggaaaugaacaagcuguuugaaaaaacaaggaggcaacugagggaaaaugcugaagacaugggcaaugguugcuucaaaauauaccacaaaugugacaacgcuugcauagagucaaucagaaaugggacuuaugaccaugauguauacagagacgaagcauuaaacaaccgguuucagaucaaagguguugaacugaagucuggauacaaagacuggauccuguggauuuccuuugccauaucaugcuuuuugcuuuguguuguuuugcugggguucaucaugugggccugccagagaggcaacauuaggugcaacauuugcauuuga

SEQ ID NO: 34348 - RNA, 1701 nt, Artificial Sequence
  derived and/or modified CDS sequence (wt) from hemagglutinin__InfluenzaA__ACF41823
augaagaccaucauugcuuugagcuacauuuucugucuggcucucggccaagaccuuccaggaaaugacaacagcacagcaacgcugugccugggacaucaugcggugccaaacggaacacuagugaaaacaaucacagaugaucagauugaagugacuaaugcuacugagcuaguucagagcuccucaacggggaaaauaugcaacaauccucaucgaauccuugauggaauagacugcacacugauagaugcucuauugggggacccucauugugauguuuuucaaaaugagacaugggaccuuuucguugaacgcagcaaagcuuucagcaacuguuacccuuaugaugugccagauuaugccucccuuaggucacuaguugccucgucaggcacucuggaguuuaucacugaggguuucacuuggacuggggucacucagaaugggggaagcaaugcuugcaaaaggggaccugguagcgguuuuuucaguagacugaacugguugaccaaaucaggaagcacauauccagugcugaacgugacuaugccaaacaaugacaauuuugacaaacuauacauuugggggguucaccacccgagcacgaaccaagaacaaaccagccuguauguucaagcaucagggagagucacagucucuaccaggagaagccggcaaacuauaaucccgaauaucggguccagacccuggguaaggggucugucuaguagaauaagcaucuauuggacaauaguuaagccgggagacguacugguaauuaauaguaaugggaaccuaaucgcuccucgggguuauuucaaaaugcgcacugggaaaagcucaauaaugaggucagaugcaccuauugauaccuguauuucugaaugcaucacuccaaauggaagcauucccaaugacaagcccuuucaaaacguaaacaagaucacauauggagcaugccccaaguauguuaagcaaaacacccugaaguuggcaacagggaugcggaauguaccagagaaacaaacuagaggccuauucggcgcaauagcagguuucauagaaaaugguugggagggaaugauagacgguugguacgguuucaggcaucaaaauucugagggcacaggacaagcagcagaucuuaaaagcacucaagcagccaucgaccaaaucaaugggaaauugaacaggguaaucgagaagacgaacgagaaauuccaucaaaucgaaaaggaauucucagaaguagaagggagaauucaggaccucgagaaauacguugaagacacuaaaauagaucucuggucuuacaaugcggagcuucuugucgcucuggagaaucaacauacaauugaccugacugacucggaaaugaacaagcuguuugaaaaaacaaggaggcaacugagggaaaaugcugaagacaugggcaaugguugcuucaaaauauaccacaaaugugacaacgcuugcauagagucaaucagaaaugggacuuaugaccauaauguauacagagacgaagcauuaaacaaccgguuucagaucaaagguguugaacugaagucuggauacaaagacuggauccuguggauuuccuuugccauaucaugcuuuuugcuuuguguuguuuugcugggguucaucaugugggccugccagagaggcaacauuaggugcaacauuugcauuuga

SEQ ID NO: 34349 - RNA, 1698 nt, Artificial Sequence
  derived and/or modified CDS sequence (wt) from hemagglutinin__InfluenzaA__ACF41834
augaaggcaaaccuacugguccuguuaugugcacuugcagcugcagaugcagacacaauauguauaggcuaccaugcgaacaauucaaccgacacuguugacacaguacucgagaagaaugugacagugacacacucuguuaaccugcucgaagacagccacaacggaaaacuauguagauuaaaaggaauagccccacuacaauuggggaaauguaacaucgccggauggcucuugggaaacccagaaugcgacccacugcuuccagugagaucaugguccuacauuguagaaacaccaaacucugagaauggaauauguuauccaggagauuucaucgacuaugaggagcugagggagcaauugagcucagugucaucauucgaaagauucgaaauauuucccaaagaaagcucauggcccaaccacaacacaaacggaguaacggcagcaugcucccaugaggggaaaagcaguuuuuacagaaauuugcuauggcugacggagaaggagggcucauacccaaaucugaaaaauucuuaugugaacaaaaaagggaaagaaguccuuguacugugggguauucaucacccgucuaacaguaaggaacaacagaaucucuaucagaaugaaaaugcuuaugucucuguagugacuucaaauuauaacaggagauuuaccccggaaauagcagaaagacccaaaguaagagaucaagcugggaggaugaacuauuacuggaccuugcuaaaacccggagacacaauaauauuugaggcaaauggaaaucuaauagcaccaauguaugcuuucgcacugaguagaggcuuuggguccggcaucaucaccucaaacgcaucaaugcaugaguguaacacgaagugucaaacaccccugggagcuauaaacagcagucucccuuaccagaauauacacccagucacaauaggagagugcccaaaauacgucaggagugccaaauugaggaugguuacaggacuaaggaacauuccguccauucaauccagaggucuauuuggagccauugccgguuuuauugaagggggauggacuggaaugauagauggaugguaugguuaucaucaucagaaugaacagggaucaggcuaugcagcggaucaaaaaagcacacaaaaugccauuaacgggauuacaaacaaggugaacacuguuaucgagaaaaugaacauucaauucacagcuguggguaaagaauucaacaaauuagaaaaaaggauggaaaauuuaaauaaaaaaguugaugauggauuucuggacauuuggacauauaaugcagaauuguuaguucuacuggaaaaugaaaggacucuggauuuccaugacucaaaugugaagaaucuguaugagaaaguaaaaagccaauuaaagaauaaugccaaagaaaucggaaauggauguuuugaguucuaccacaagugugacaaugaaugcauggaaaguguaagaaaugggacuuaugauuaucccaaauauucagaagagucaaaguugaacagggaaaagguagauggagugaaauuggaaucaauggggaucuaucagauucuggcgaucuacucaacugucgccaguucacuggugcuuuuggucucccugggggcaaucaguuucuggauguguucuaauggaucuuugcagugcagaauaugcaucuga

SEQ ID NO: 34350 - RNA, 1701 nt, Artificial Sequence
  derived and/or modified CDS sequence (wt) from hemagglutinin__InfluenzaA__ACF41856
augaagacuaucauugcuuugagcuacauuuuaugucugguuuucgcucaaaaacuucccggaaaugacaacagcacagcaacgcugugccugggacaucaugcagugccaaacggaacgcuagugaaaacaaucacgaaugaucaaauugaagugacuaaugcuacugagcugguucagaguuccucaacagguagaauaugcgacaguccucaccgaauccuugauggaaaaaacugcacacugauagaugcucuauugggagacccucauugugauggcuuccaaaauaaggaaugggaccuuuuuguugaacgcagcaaagcuuacagcaacuguuacccuuaugauguaccggauuaugccucccuuaggucacuaguugccucaucaggcacccuggaguuuaucaaugaagacuucaauuggacuggagucgcucaggaugggggaagcuaugcuugcaaaaggggaucuguuaacaguuucuuuaguagauugaauugguugcacaaaucagaauacaaauauccagcgcugaacgugacuaugccaaacaauggcaaauuugacaaauuguacauuugggggguucaccacccgagcacggacagagaccaaaccagccuauauguucgagcaucagggagagucacagucucuaccaaaagaagccaacaaacuguaaccccgaauaucgggucuagacccuggguaaggggucaguccaguagaauaagcaucuauuggacaauaguaaaaccgggagacauacuuuugauuaauagcacagggaaucuaauugcuccucgggguuacuucaaaauacgaaaugggaaaagcucaauaaugaggucagaugcacccauuggcaccugcaguucugaaugcaucacuccaaauggaagcauucccaaugacaaaccuuuucaaaauguaaacaggaucacauauggggccugccccagauauguuaagcaaaacacucugaaauuggcaacagggaugcggaauguaccagagaaacaaacuagaggcauauucggcgcaaucgcagguuucauagaaaaugguugggagggaaugguagacgguugguacgguuucaggcaucaaaauucugagggcacaggacaagcagcagaucuuaaaagcacucaagcagcaaucgaccaaaucaacgggaaacugaauagguuaaucgagaaaacgaacgagaaauuccaucaaaucgaaaaagaauucucagaaguagaagggagaauucaggaccucgagaaauauguugaagacacuaaaauagaucucuggucuuacaacgcggagcuucuuguugcccuggagaaccaacauacaauugaucuaacugacucagaaaugaacaaacuguuugaaaaaacaaggaagcaacugagggaaaaugcugaggacaugggcaaugguugcuucaaaauauaccacaaaugugacaaugccugcauagggucaaucagaaauggaacuuaugaccaugauguauacagagacgaagcauuaaacaaccgguuccagaucaaagguguugagcugaagucaggauacaaagauuggauccuauggauuuccuuugccauaucaugcuuuuugcuuuguguuguuuugcugggguucaucaugugggccugccaaaaaggcaacauuaggugcaacauuugcauuuga

SEQ ID NO: 34351 - RNA, 1698 nt, Artificial Sequence
  derived and/or modified CDS sequence (wt) from hemagglutinin__InfluenzaA__ACF41867
augaaagcaaaacuacuaguccuguuauguacauuuacagcuacauaugcagacacaauauguauaggcuaccaugccaacaacucaaccgacacuguugacacaguacuugagaagaaugugacagugacacacucugucaaccuacuugaggacagucacaauggaaaacuaugucuacuaaaaggaauagccccacuacaauuggguaauugcagcguugccggauggaucuuaggaaacccagaaugcgaaucacugauuucuaaggaaucaugguccuacauuguagagacaccaaacccugagaauggaacauguuacccaggguauuucgccgacuaugaggaacugagggagcaauugaguucaguaucaucauuugagagauucgaaauauuccccaaagaaagcucauggcccaaccacaccguaacaggaguaacggcaucaugcucccauaaugggaaaagcaguuuuuacagaaauuugcuauggcugacggagaagaauggcuuguacccaaaucugagcaauuccuaugugaacaacaaagagaaagaaguccuuguacuaugggguguucaucacccaucuaacauaagggaccaaagggccaucuaucauacagaaaacgcuuaugucucuguagugucuucacauuauagcagaagauucaccccagaaauagcaaaaagacccaaaguaagaggucaggaaggaagaaucaacuacuacuggacucugcuggaacccggggacacaauaauauuugaggcaaauggaaaucuaauagcgccaugguaugcuuucgcacugaguagaggcuuugggucaggaaucaucaccucaaaugcaccaaugaaugaaugugaugcgaagugucaaacaccucagggagcuauaaacaguagucuuccuuuccagaauguacacccagucacaauaggagaguguccaaaguaugucaggaguacaaaauuaaggaugguuacaggacuaaggaauaucccauccauucaauccagagguuuguuuggagccauugccgguuucauugaagggggguggacuggaaugauggaugggugguaugguuaucaucaucagaaugagcaaggaucuggcuaugcugcagaucaaaaaagcacacaaaaugccauuaacgggauuacaaauaaggugaauucuguaauugagaaaaugaacacucaauucacagcugugggcaaagaauucaacaaauuagaaagaaggauggaaaacuuaaauaaaaaaguugaugauggauuucuagacauuuggacauauaaugcagaauuguugguucuacuggaaaaugaaaggacuuuggauuuccaugacucaaaugugaagaaucuguaugagaaagugaaaagccaauuaaagaauaaugccaaagaaauagggaacggguguuuugaauucuaucacaaguguaacaaugaaugcauggaaagugugaaaaauggaacuuaugacuauccaaaauauuccgaagaaucaaaguuaaacagggagaaaauugauggagugaaauuggaaucaaugggagucuaucagauucuggcgaucuacucaacugucgccaguucacugguucuuuuggucucccugggggcaaucagcuucuggauguguuccaaugggucuuugcaguguagaauaugcaucuga

SEQ ID NO: 34352 - RNA, 1698 nt, Artificial Sequence; identical to SEQ ID NO: 34127
  derived and/or modified CDS sequence (wt) from hemagglutinin__InfluenzaA__ACF41878

SEQ ID NO: 34353 - RNA, 1701 nt, Artificial Sequence
  derived and/or modified CDS sequence (wt) from hemagglutinin__InfluenzaA__ACF41922
augaaagcaaaacuacuaguccuguuaugugcauuuacagcuacauaugcagacacaauauguauaggcuaccaugcgaacaacucaaccgacacuguugacacaguacuugagaagaacgugacagugacacacucugucaaccuacuugaggacagucacaacggaaaacuaugucgacuaaagggaauagccccacuacaauuggguaauugcagcguugccggauggaucuuaggaaacccaaaaugcgaaucacuguuuucuaaggaaucaugguccuacauugcagaaacaccaaacccugagaauggaacauguuacccaggguauuucgccgacuaugaggaacugagggagcaauugaguucaguaucaucauucgagagauucgaaauauuccccaaagaaagcucauggcccaaccacaccguaaccaaaggaguaacggcaucaugcucccauaaugggaaaagcaguuuuuacagaaauuugcuauggcugacggagaagaauggcuuguacccaaaucugagcaaguccuauguaaacaacaaagagaaagaaguccuuguacuaugggguguucaucacccgucuaacauaagggaccaaagggccaucuaucauacagaaaaugcuuaugucucuguagugucuucacauuauagcagaagauucaccccagaaauagcaaaaagacccaaaguaagagaucaagaaggaagaauuaacuacuacuggacucugcuggaacccggggacacaauaauauuugaggcaaauggaaaucuaauagcgccaugguaugcuuucgcacugaguagaggcuuugggucaggaaucaucaccucaaacgcaucaauggaugaaugugacgcgaagugucaaacaccccagggagcuauaaacaguagucuuccuuuccagaauguacacccagucacaauaggagaguguccaaaguaugucaggaguacaaaauuaaggaugguuacaggacuaaggaacaucccauccauucaauccagagguuuguuuggagccauugccgguuucauugaagggggguggacuggaaugauagauggaugguaugguuaucaucaucagaaugaacaaggaucuggcuaugcugcggaccaaaaaagcacacaaaaugccauuaacgggauuacaaacaaggugaauucuguaaucgagaaaaugaacacucaauucacagcugugggcaaagaauucaacaaauuagaaagaaggauggaaaacuuaaauaaaaaaguugaugauggauuucuggacauuuggacauauaaugcagaauuguugguucuacuggaaaauggaaggacuuuggauuuucaugacucaaaugugaagaaucuguaugagaaaguaaaaagccaauugaagaauaaugccaaagaaauagggaacggguguuuugaauucuaucacaaguguaacaaugaaugcauggaaagugugaaaaauggaacuuaugacuauccaaaauauuccgaagaaucaaaguuaaacaggggaaaaauugauggagugaaauuggaaucaaugggagucuaucagauucuggcgaucuacucaacugucgccaguucacuggugcuuuuggucucccugggggcaaucagcuucuggauguguucuaaugggucuuugcaguguagaauaugcaucuga

SEQ ID NO: 34354 - RNA, 1689 nt, Artificial Sequence
  derived and/or modified CDS sequence (wt) from hemagglutinin__InfluenzaA__ACF54389
auggccaucauuuaucucauacuccuguucgcaacagugaggggggaccagauaugcauuggauaccaugccaauaauuccacagaaaaggucgacacaauucuagagcggaaugucacugugacucaugccaaggacauccuugagaagacccacaacgggaagcuaugcaaacuaaacggaaucccuccacuugaacuaggggacuguagcauugccggauggcuccuuggaaauccagaaugugauaggcuucuaagggugccagaaugguccuauauaauggagaaagaaaacccaagguacaguuuguguuacccaggcagcuuaaaugacuaugaagaauugaaacaucuccucagcagcguaaaacauuucgagaaaguaaggauucugcccaaagauagauggacacagcauacaacaacuggagguucaaaggccugugcagugucaggcaaaccaucauucuucaggaacauggucuggcugacaaagaaaggaacaaauuauccgguugccaaaggaucguacaacaauacgagcggagagcaaaugcuaauaauuuggggagugcaccauccuauugaugaggcagaacaaagagcauuguaccaggaagugggaaccuauguuuccgcaagcacuucaacauugaacaaaaggucaaucccugaaauagcagcaaggccugaagugaauggacuuggaaguagaauggaauucucuuggacccuuuuggauguaugggacaccauaaauuuugagagcacugguaaucuaguugcaccagaguauggauucaaaauaucaaaaagagguaguucagggaucaugaagacagaaggaacacuugggaacugugagaccaaaugccaaacuccuuugggagcaauaaauacaacacuaccuuuccacaauguccacccacugacaauaggcgaaugccccaaauauguaaaaucggagaaauugguccuagcaacaggacuaaggaauguuccccaaauugaaucaagaggauuguuuggggcaauagcuggcuuuauagaaggaggauggcaaggaaugguugaugguugguauggauaccaucacagcaaugaacagggaucaggguaugcagcagacaaagaauccacucaaaaggcauuugauggaaucaccaacaaggugaauucugugauugaaaagaugaacacccaauuugaagcuguugggaaagaauucaauaauuuagagaaaagacuggagaacuugaacaaaaagauggaagacggguuccuagauguguggacauacaaugcugagcuucuaguucugauggaaaaugagaggacacuugacuuccaugauucuaauguaaaaaaccuguaugaaaaagucagaaugcagcugagagacaacgucaaagaacuaggaaauggauguuuugaauuuuaucacaaaugugacgaugaaugcaugaauagugugaaaaacggaacguaugauuaucccaaguaugaagaagaaucuaaacuaaagagaaaugaaaucaaagggguaaaauugagcagcauggggguuuaccaaauucuugccauuuaugcuacaguugcagguucucugucacuggcaaucaugguggcugggaucucuuucuggaugugcuccaacgggucucugcagugcagaaucugcauauga

SEQ ID NO: 34355 - RNA, 1701 nt, Artificial Sequence; identical to SEQ ID NO: 34328
  derived and/or modified CDS sequence (wt) from hemagglutinin__InfluenzaA__ACF54400

SEQ ID NO: 34356 - RNA, 1701 nt, Artificial Sequence; identical to SEQ ID NO: 34331
  derived and/or modified CDS sequence (wt) from hemagglutinin__InfluenzaA__ACF54411

SEQ ID NO: 34357 - RNA, 1701 nt, Artificial Sequence; identical to SEQ ID NO: 34330
  derived and/or modified CDS sequence (wt) from hemagglutinin__InfluenzaA__ACF54422

SEQ ID NO: 34358 - RNA, 1701 nt, Artificial Sequence
  derived and/or modified CDS sequence (wt) from hemagglutinin__InfluenzaA__ACF54433
augaagaccaucauugcuuugagcuacauuuucugucuggcucucggccaagaccuuccaggaaaugacaacagcacagcaacgcugugccugggacaucaugcggugccaaacggaacacuagugaaaacaaucacagaugaucagauugaagugacuaaugcuacugagcuaguucagagcuccucaacggggaaaauaugcaacaauccucaucgaauccuugauggaauagacugcacacugauagaugcucuauugggggacccucauugugauguuuuucaaaaugagacaugggaccuuuucguugaacgcagcaaagcuuucagcaacuguuacccuuaugaugugccagauuaugccucccuuagaucacuaguugccucgucaggcacucuggaguuuaucacugaggguuucacuuggacuggggucacucagaaugggggaagcaaugcuugcaaaaggggaccugguagcgguuuuuucaguagacugaacugguugaccaaaucaggaagcacauauccagugcugaacgugacuaugccaaacaaugacaauuuugacaaacuauacauuugggggguucaccacccgagcacgaaccaagaacaaaccagccuguauguucaagcaucagggagagucacagucucuaccagaagaagccagcaaacuauaaucccgaauaucgaguccagacccuggguaaggggucugucuaguagaauaagcaucuauuggacaauaguuaagccgggagacguacugguaauuaauaguaaugggaaccuaaucgcuccucgggguuauuucaaaaugcgcacugggaaaagcucaauaaugaggucagaugcaccuauugauaccuguauuucugaaugcaucacuccaaauggaagcauucccaaugacaagcccuuucaaaacguaaacaagaucacauauggagcaugccccaaguauguuaagcaaaacacccugaaguuggcaacagggaugcggaauguaccagagaaacaaacuagaggccuauucggcgcaauagcagguuucauagaaaaugguugggagggaaugauagacgguugguacgguuucaggcaucaaaauucugagggcacaggacaagcagcagaucuuaaaagcacucaagcagccaucgaccaaaucaaugggaaauugaacaggguaaucgagaagacgaacgagaaauuccaucaaaucgaaaaggaauucucagaaguagaagggagaauucaggaccucgagaaauacguugaagacacuaaaauagaucucuggucuuacaaugcggagcuucuugucgcucuggagaaucaacauacaauugaccugacugacucggaaaugaacaagcuguuugaaaaaacaaggaggcaacugagggaaaaugcugaagacaugggcaaugguugcuucaaaauauaccacaaaugugacaacgcuugcauagagucaaucagaaaugggacuuaugaccaugauguauacagagacgaagcauuaaacaaccgguuucagaucaaagguguugaacugaagucuggauacaaagacuggauccuguggauuuccuuugccauaucaugcuuuuugcuuuguguuguuuugcugggguucaucaugugggccugccagagaggcaacauuaggugcaacauuugcauuuga

SEQ ID NO: 34359 - RNA, 1701 nt, Artificial Sequence
  derived and/or modified CDS sequence (wt) from hemagglutinin__InfluenzaA__ACF54444
augaagaccaucauugcuuugagcuacauuuucugucuggcucucggccaagaccuuccaggaaaugacaacagcacagcaacgcugugccugggacaucaugcggugccaaacggaacacuagugaaaacaaucacagaugaucagauugaagugacuaaugcuacugagcuaguucagagcuccucaacggggaaaauaugcaacaauccucaucgaauccuugacggaauagacugcacacugauagaugcucuauugggggacccucauugugauguuuuucaaaaugagacaugggaccuuuucguugaacgcagcaaagcuuucagcaacuguuacccuuaugaugugccagauuaugccucccuuaggucacuaguugccucgucaggcacucuggaguuuaucacugaggguuucacuuggacuggggucacucagaaugggggaagcaaugcuugcaaaaggggaccugguagcgguuuuuucaguagacugaacugguugaccaaaucaggaagcacauauccagugcugaacgugacuaugccaaacaaugacaauuuugacaaacuauacauuugggggguucaccacccgagcacgaaccaagaacaaaccagccuguauguucaagcaucagggagagucacagucucuaccaggagaagccagcaaacuauaaucccgaauaucggguccagacccuggguaaggggucugucuaguagaauaagcaucuauuggacaauaguuaagccgggagacguacugguaauuaauaguaaugggaaccuaaucgcuccucgggguuauuucaaaaugcgcacugggaaaagcucaauaaugaggucagaugcaccuauugauaccuguauuucugaaugcaucacuccaaauggaagcauucccaaugacaagcccuuucaaaacguaaacaagaucacauauggagcaugccccaaguauguuaagcaaaacacccugaaguuggcaacagggaugcggaauguaccagagaaacaaacuagaggccuauucggcgcaauagcagguuucauagaaaaugguugggagggaaugauagacgguugguacgguuucaggcaucaaaauucugagggcacaggacaagcagcagaucuuaaaagcacucaagcagccaucgaccaaaucaaugggaaauugaacaggguaaucgagaagacgaacgagaaauuccaucaaaucgaaaaggaauucucagaaguagaagggagaauucaggaccucgagaaauacguugaagacacuaaaauagaucucuggucuuacaaugcggagcuucuugucgcucuggagaaucaacauacaauugaccugacugacucggaaaugaacaagcuguuugaaaaaacaaggaggcaacugagggaaaaugcugaagacaugggcaaugguugcuucaaaauauaccacaaaugugacaacgcuugcauagagucaaucagaaaugggacuuaugaccaugauguauacagagacgaagcauuaaacaaccgguuucagaucaaagguguugaacugaagucuggauacaaagacuggauccuguggauuuccuuugccauaucaugcuuuuugcuuuguguuguuuugcugggguucaucaugugggccugccagagaggcaacauuaggugcaacauuugcauuuga

SEQ ID NO: 34360 - RNA, 1701 nt, Artificial Sequence; identical to SEQ ID NO: 34348
  derived and/or modified CDS sequence (wt) from hemagglutinin__InfluenzaA__ACF54466

SEQ ID NO: 34361 - RNA, 1689 nt, Artificial Sequence
  derived and/or modified CDS sequence (wt) from hemagglutinin__InfluenzaA__ACF54477
auggccaucauuuaucucauucuccuguucacagcagugagaggggaccagauaugcauuggauaccaugccaauaauuccacagagaaggucgacacaauucuagagcggaacgucacugugacucaugccaaggacauucuugagaagacccauaacggaaaguuaugcaaacuaaacggaaucccuccacuugaacuaggggacuguagcauugccggauggcuccuuggaaauccagaaugugauaggcuucuaagugugccagaaugguccuauauaauggagaaagaaaacccgagagacgguuuguguuauccaggcagcuucaaugauuaugaagaauugaaacaucuccucagcagcgugaaacauuucgagaaaguaaagauucugcccaaagauagauggacacagcauacaacaacuggagguucacgggccugcgcggugucugguaauccaucauucuucaggaacauggucuggcugacaaagaaaggaucaaauuauccgguugccaaaggaucguacaacaauacaagcggagaacaaaugcuaauaauuuggggggugcaccaucccaaugaugagacagaacaaagaacauuguaccagaaugugggaaccuauguuuccguaggcacaucaacauugaacaaaaggucaaccccagacauagcaacaaggccuaaagugaauggacuaggaaguagaauggaauucucuuggacccuauuggauaugugggacaccauaaauuuugagaguacugguaaucuaauugcaccagaguauggauucaaaauaucgaaaagagguaguucagggaucaugaaaacagaaggaacacuugagaacugugagaccaaaugccaaacuccuuugggagcaauaaauacaacauugccuuuucacaauguccacccacugacaauaggugagugccccaaauauguaaaaucggagaaguuggucuuagcaacaggacuaaggaauguuccccagauugaaucaagaggauuguuuggggcaauagcugguuuuauagaaggaggauggcaaggaaugguugaugguugguauggauaccaucacagcaaugaccagggaucaggguaugcagcagacaaagaauccacucaaaaggcauuugauggaaucaccaacaagguaaauucugugauugaaaagaugaacacccaauuugaagcuguugggaaagaauucaguaacuuagagagaagacuggagaacuugaacaaaaagauggaagacggguuucuagauguguggacauacaaugcugagcuucuaguucugauggaaaaugagaggacacuugacuuucaugauucuaaugucaagaaucuguaugauaaagucagaaugcagcugagagacaacgucaaagaacuaggaaauggauguuuugaauuuuaucacaaaugugaugaugaaugcaugaauagugugaaaaacgggacguaugauuaucccaaguaugaagaagagucuaaacuaaauagaaaugaaaucaaagggguaaaauugagcagcauggggguuuaucaaauccuugccauuuaugcuacaguagcagguucucugucacuggcaaucaugauggcugggaucucuuucuggaugugcuccaacgggucucugcagugcaggaucugcauauga

SEQ ID NO: 34362 - RNA, 1689 nt, Artificial Sequence
  derived and/or modified CDS sequence (wt) from hemagglutinin__InfluenzaA__ACF54499
auggccaucauuuaucucauucuccuguucacagcagugagaggggaccagauaugcauuggauaccaugccaauaauuccacagagacggucgacacaauucuagagcggaacgucacugugacucaugccaaggacauucuugagaagacccauaacggaaaguuaugcaaacuaaacggaaucccuccacuugaacuaggggacuguagcauugccggauggcuccuuggaaauccagaaugugauaggcuucuaagugugccagaaugguccuauauaauggagaaagaaaacccgagagacgguuuguguuauccaggcagcuucaaugauuaugaagaauugaaacaucuccucagcagcgugaaacauuucgagaaaguaaagauucugcccaaagauagauggacacagcauacaacaacuggagguucacgggccugcgcggugucugguaauccaucauucuucaggaacauggucuggcugacaaagaaaggaucaaauuauccgguugccaaaggaucguacaacaauacaagcggagaacaaaugcuaauaauuuggggggugcaccaucccaaugaugagacagaacaaagaacauuguaccagaaugugggaaccuauguuuccguaggcacaucaacauugaacaaaaggucaaccccagacauagcaacaaggccuaaagugaauggacuaggaaguagaauggaauucucuuggacccuauuggauaugugggacaccauaaauuuugagaguacugguaaucuaauugcaccagaguauggauucaaaauaucgaaaagagguaguucagggaucaugaaaacagaaggaacacuugagaacugugagaccaaaugccaaacuccuuugggagcaauaaauacaacauugccuuuucacaauguccacccacugacaauaggugagugccccaaauauguaaaaucggagaaguuggucuuagcaacaggacuaaggaauguuccccagauugaaucaagaggauuguuuggggcaauagcugguuuuauagaaggaggauggcaaggaaugguugaugguugguauggauaccaucacagcaaugaccagggaucaggguaugcagcagacaaagaauccacucaaaaggcauuugauggaaucaccaacaagguaaauucugugauugaaaagaugaacacccaauuugaagcuguugggaaagaauucaguaacuuagagagaagacuggagaacuugaacaaaaagauggaagacggguuucuagauguguggacauacaaugcugagcuucuaguucugauggaaaaugagaggacacuugacuuucaugauucuaaugucaagaaucuguaugauaaagucagaaugcagcugagagacaacgucaaagaacuaggaaauggauguuuugaauuuuaucacaaaugugaugaugaaugcaugaauagugugaaaaacgggacguaugauuaucccaaguaugaagaagagucuaaacuaaauagaaaugaaaucaaagggguaaaauugagcagcauggggguuuaucaaauccuugccauuuaugcuacaguagcagguucucugucacuggcaaucaugauggcugggaucucuuucuggaugugcuccaacgggucucugcagugcaggaucugcauauga

SEQ ID NO: 34363 - RNA, 1689 nt, Artificial Sequence; identical to SEQ ID NO: 34362
  derived and/or modified CDS sequence (wt) from hemagglutinin__InfluenzaA__ACF54510

SEQ ID NO: 34364 - RNA, 1689 nt, Artificial Sequence; identical to SEQ ID NO: 34362
  derived and/or modified CDS sequence (wt) from hemagglutinin__InfluenzaA__ACF54521

SEQ ID NO: 34365 - RNA, 1701 nt, Artificial Sequence
  derived and/or modified CDS sequence (wt) from hemagglutinin__InfluenzaA__ACF54532
augaagacuaucauugcuuugagcuacauucuaugucugguuuucgcucaaaaacuuccuggaaaugacaacagcacggcaacgcugugccuugggcaccaugcaguaccaaacggaacgauagugaaaacaaucacgaaugaccaaauugaaguuacuaaugcuacugagcugguucagaguuccucaacaggugaaauaugcgacaguccucaucagauccuugauggagaaaacugcacacuaauagaugcucuauugggagacccucagugugauggcuuccaaaauaagaaaugggaccuuuuuguugaacgcagcaaagccuacagcaacuguuacccuuaugaugugccggauuaugccucccuuaggucacuaguugccucauccggcacacuggaguuuaacaaugaaagcuucaauuggacuggagucacucaaaacggaacaagcucugcuugcauaaggagaucuaauaacaguuucuuuaguagauugaauugguugacccacuuaaaauucaaauacccagcauugaacgugacuaugccaaacaaugaaaaauuugacaaauuguauauuugggggguucaccacccggguacggacaaugaccaaaucuuccuguaugcucaagcaucaggaagaaucacagucucuaccaaaagaagccaacaaacuguaaucccgaauaucggaucuagacccagaguaaggaauauccccagcagaauaagcaucuauuggacaauaguaaaaccgggagacauacuuuugauuaacagcacagggaaucuaauugcuccuagggguuacuucaaaauacgaagugggaaaagcucaauaaugagaucagaugcacccauuggcaaaugcaauucugaaugcaucacuccaaauggaagcauucccaaugacaaaccauuccaaaauguaaacaggaucacauacggggccugucccagauauguuaagcaaaacacucugaaauuggcaacagggaugcgaaauguaccagagaaacaaacuagaggcauauuuggugcaaucgcggguuucauagaaaaugguugggagggaaugguggaugguugguacgguuucaggcaucaaaauucugagggaauaggacaagcagcagaucucaaaagcacucaagcagcaaucgaucaaaucaaugggaagcugaauagguugaucgggaaaaccaacgagaaauuccaucagauugaaaaagaauucucagaagucgaagggaggauucaggaccuugagaaauauguugaggacaccaaaauagaucucuggucauacaacgcggagcuucuuguugcccuggagaaccaacauacaauugaucuaacugacucagaaaugaacaaacuguuugaaaaaacaaagaagcaacugagggaaaaugcugaggauaugggcaaugguuguuucaaaauauaccacaaaugugacaaugccugcauaggaucaaucagaaauggaacuuaugaccacgauguauacagagaugaagcauuaaacaaccgguuccagaucaagggcguugagcugacgucaggauacaaagauuggauccuauggauuuccuuugccauaucauguuuuuugcuuuguguugcuuuguugggguucaucaugugggccugccaaaaaggcaacauuaggugcaacauuugcauuuga

SEQ ID NO: 34366 - RNA, 1701 nt, Artificial Sequence
  derived and/or modified CDS sequence (wt) from hemagglutinin__InfluenzaA__ACF54543
augaagacuaucauugcuuuaagcuacauucuaugucugguuuucgcucaaaaacuuccuggaaaugacaacagcacggcaacgcugugccuugggcaccaugcaguaccaaacggaacgauagugaaaacaaucacgaaugaccaaauugaaguuacuaaugcuacugagcugguucagaguuccucaacaggugaaauaugcgacaguccucaucagauccuugauggagaaaacugcacacuaauagaugcucuauugggagacccucagugugauggcuuccaaaauaagaaaugggaccuuuuuguugaacgcagcaaagccuacagcaacuguuacccuuaugaugugccggauuaugucucccuuaggucacuaguugccucauccggcacacuggaguuuaacaaugaaagcuucaauuggacuggagucacucaaaacggaacaagcucugcuugcauaaggagaucuaauaacaguuucuuuaguagauugaauugguugacccacuuaaaauucaaauacccagcauugaacgugacuaugccaaacaaugaaaauuuugacaaauuguacauuugggggguucaccacccggguacggacaaugaccaaaucuuccuguaugcucaagcaucaggaagaaucacagucucuaccaaaagaagccaacaaacuguaaucccgaauaucggaucuagacccagaguaaggaauauccccagcagaauaagcaucuauuggacaauaguaaaaccgggagacauacuuuugauuaacagcacagggaaucuaauugcuccuagggguuacuucaaaauacgaagugggaaaagcucaauaaugagaucagaugcacccauuggcaaaugcaauucugaaugcaucacuccaaauggaagcauucccaaugacaaaccauuccaaaauguaaacaggaucacauacggggccugucccagauauguuaagcaaaacacucugaaauuggcaacagggaugcgaaauguaccagagaaacaaacuagaggcauauuuggcgcaaucgcggguuucauagaaaaugguugggagggaaugguggaugguugguacgguuucaggcaucaaaauucugagggaauaggacaagcagcagaucucaaaagcacucaagcagcaaucgaucaaaucaaugggaagcugaauagguugaucgggaaaaccaacgagaaauuccaucagauugaaaaagaauucucagaagucgaagggaggauucaggaccuugagaaauauguugaggacaccaaaauagaucucuggucauacaacgcggagcuucuuguugcccuggagaaccaacauacaauugaucuaacugacucagaaaugaacaaacuguuugaaaaaacaaagaagcaacugagggaaaaugcugaggaucugggcaaugguuguuucaaaauauaccacaaaugugacaaugccugcauaggaucaaucagaaauggaacuuaugaccacgauguauacagagaugaagcauuaaacaaccgguuccagaucaagggcguugagcugaagucaggauacaaagauuggauccuauggauuuccuuugccauaucauguuuuuugcuuuguguugcuuuguugggguucaucaugugggccugccaaaaaggcaacauuaggugcaacauuugcauuuga

SEQ ID NO: 34367 - RNA, 1701 nt, Artificial Sequence
  derived and/or modified CDS sequence (wt) from hemagglutinin__InfluenzaA__ACF54565
augaagacuaucauugcuuuaagcuacauucuaugucugguuuucucucaaaagcuucccggaaaugacaacagcacggcaacgcugugccuugggcaccaugcaguaccaaacggaacgauagugaaaacaaucacgaaugaccaaauugaaguuacuaaugcuacugagcugguucagaguuccucaacagguggaauaugcgacaguccucaucagauccuugauggagaaaacugcacacuaauagaugcucuauugggagacccucagugugauggcuuccaaaauaagaaaugggaccuuuuuguugaacgcagcaaagccuacagcaacuguuacccuuaugaugugccggauuaugccucccuuaggucacuaguugccucauccggcacacuggaguuuaacaaugaaagcuucaauugggcuggagucacucagaauggaacaagcucugcuugcaaaaggagaucuaauaaaaguuucuuuaguagauugaauugguugacccacuuaaaauacaaauacccagcauugaacgugacuaugccaaacaaugaaaaauuugacaaauuguacauuugggggguucaccacccgguuacggacagugaccaaaucagccuauaugcucaagcaucaggaagaaucacagucucuaccaaaagaagccaacaaacuguaaucccgaauaucggauauagacccaggguaagggauaucuccagcagaauaagcaucuauuggacaauaguaaaaccgggagacauacuuuugauuaacagcacaggaaaucuaauugcuccucgggguuacuucaaaauacgaagugggaaaagcucaauaaugagaucagaugcacccauuggcaaaugcaauucugaaugcaucacuccaaauggaagcauucccaaugacaaaccauuucaaaauguaaacaggaucacauauggggccugucccagauauguuaagcaaaacacucugaaauuggcaacagggaugcgaaauguaccagagaaacaaacuagaggcauauuuggcgcaaucgcggguuucauagaaaaugguugggagggaaugguggacgguugguacgguuucaggcaucaaaauucugagggcacaggacaagcagcagaucucaaaagcacucaagcagcaaucaaccaaaucaaugggaaacugaauagguuaaucgggaaaacaaacgagaaauuccaucagauugaaaaagaauucucagaaguagaagggagaauucaggaccucgagaaauauguugaggacacuaaaauagaucucuggucauacaacgcggagcuucuuguugcccuggaaaaccaacauacaauugaucuaacugacucagaaaugaacaaacuguuugaaagaacaaagaagcaacugagggaaaaugcugaggauaugggcaaugguuguuucaaaauauaccacaaaugugacaaugccugcauagagucaaucagaaauggaacuuaugaccaugauguauacagagaugaagcauuaaacaaccgguuccagaucaaagguguugagcugaagucaggauacaaagauuggauccuauggauuuccuuugccauaucauguuuuuugcuuuguguugcuuuguugggguucaucaugugggccugccaaaaaggcaacauuaggugcaacauuugcauuuga

SEQ ID NO: 34368 - RNA, 1701 nt, Artificial Sequence
  derived and/or modified CDS sequence (wt) from hemagglutinin__InfluenzaA__ACF54576
augaagacuaucauugcuuugagcuacauucuaugucugguuuucgcucaaaaacuucccggaaaugacaacagcacggcaacgcugugccuugggcaccaugcaguaccaaacggaacgauagugaaaacaaucacgaaugaccaaauugaaguuacuaaugcuacugagcugguucagaguuccucaacagguggaauaugcgacaguccucaucagauccuugauggagaaaacugcacacuaauagaugcucuauugggagacccucagugugauggcuuccaaaauaagaaaugggaccuuuuuguugaacgcagcaaagccuacagcaacuguuacccuuaugaugugccggauuaugccucccuuaggucacuaguugccucauccggcacacuggaguuuaacgaugaaagcuucaauuggacuggagucacucaaaauggaacaagcucuucuugcaaaaggagaucuaauaacaguuucuuuaguagauugaauugguugacccaauuaaaauucaaauacccagcauugaacgugacuaugccaaacaaugaaaaauuugacaaauuguacauuugggggguucaccacccgguuacggacaaugaccaaaucuuccuguaugcucaagcaucaggaagaaucacagucucuaccaaaagaagccaacaaacuguaaucccgaauaucggaucuagacccagaauaaggaauauccccagcagaauaagcaucuauuggacaauaguaaaaccgggagacauacuuuugauuaacagcacagggaaucuaauugcuccuagggguuacuucaaaauacgaagugggaaaagcucaauaaugagaucagaugcacccauuggcaaaugcaauucugaaugcaucacuccaaauggaagcauucccaaugacaaaccauuucaaaauguaaacaggaucacauauggggccugucccagauauguuaagcaaaacacucugaaauuggcaacagggaugcgaaauguaccagagaaacaaacuagaggcauauuuggcgcaaucgcggguuucauagaaaaugguugggagggaaugguggaugguugguacgguuucaggcaucaaaauucugagggaauaggacaagcagcagaucucaaaagcacucaagcagcaaucaaucaaaucaaugggaagcugaauagguugaucgggaaaaccaacgagaaauuccaucagauugaaaaagaauucucagaaguagaagggagaauucaggaccucgagaaauauguugaggacacuaaaauagaucucuggucauacaacgcggagcuucuuguugcccuggagaaccaacauacaauugaucuaacugacucagaaaugaacaaacuguuugaaagaacaaagaagcaacugagggaaaaugcugaggauaugggcaaugguuguuucaaaauauaccacaaaugugacaaugccugcauaggaucaaucagaaauggaacuuaugaccaugauguauacagagaugaagcauuaaacaaccgguuccagaucaaaggcguugagcugaagucaggauacaaagauuggauccuauggauuuccuuugccauaucauguuuuuugcuuuguguugcuuuguugggguucaucaugugggccugccaaaaaggcaacauuaggugcaacauuugcauuuga

SEQ ID NO: 34369 - RNA, 1698 nt, Artificial Sequence
  derived and/or modified CDS sequence (wt) from hemagglutinin__InfluenzaA__ACF54598
augaaggcaaaacuacugguccuguuauaugcauuuguagcuacagaugcagacacaauauguauaggcuaccaugcgaacaacucaaccgacacuguugacacaauauucgagaagaauguggcagugacacauucuguuaaccugcucgaagacagacacaacgggaaacuauguaaauuaaaaggaauagccccacuacaauuggggaaauguaacaucaucggauggcucuugggaaauccagaaugcgacucacugcuuccagcgagaucaugguccuacauuguagaaacaccaaacucugagaauggagcauguuauccaggagauuucaucgacuaugaggaacugagggagcaauugagcucaguaucaucauuagaaagauucgaaauauuucccaaggaaaguucauggcccaaccacacauucaacggaguaacagcaucaugcucccauaggggaaaaagcaguuuuuacagaaauuugcuauggcugacgaagaagggggauucauacccaaagcugaccaauuccuaugugaacaauaaagggaaagaaguccuuguacuaugggguguucaucacccgucuagcagugaugagcaacagagucucuauaguaauggaaaugcuuaugucucuguagcgucuucaaauuauaacaggagauucaccccggaaauagcugcaaggcccaaaguaaaagaucaacaugggaggaugaacuauuacuggaccuugcuagaacccggagacacaauaauauuugaggcaacugguaaucuaauagcaccaugguaugcuuucgcacugaguagaggguuugaguccggcaucaucaccucaaacgcgucaaugcaugaguguaacacgaagugucaaacaccccagggaucuauaaacagcaaucucccuuuccagaauauacacccagucacaauaggagagugcccaaaauaugucaggaguaccaaauugaggaugguuacaggacuaagaaacaucccauccauucaauacagaggucuauuuggagccauugcugguuuuauugaggggggauggacuggaaugauagauggaugguaugguuaucaucaucagaaugaacagggaucaggcuaugcagcggaucaaaaaagcacacagaaugccauuaacgggauuacaaacaaggugaacucuauuaucgagaaaaugaacacucaauucacagcuguggguaaagaauucaacaacuuagaaaaaaggauggaaaauuuaaauaaaaaaguugaugauggguuucuggacauuuggacauauaaugcagaauuguuaguucuacuggaaaauggaagaacuuuggauuuccaugacuuaaaugugaagaaucuguacgagaaaguaaaaagccaauuaaagaauaaugccaaagaaaucggaaauggguguuuugaguucuaccacaagugugacaaugaaugcauggaaaguguaagaaaugggacuuaugauuauccaaaauauucagaagaaucaaaguugaacagggaaaagauagauggagugaaauuggaaucaauggggguguaucagauucuggcgaucuacucaacugucgccaguucacuggugcuuuuggucucccugggggcaaucaguuucuggauguguucuaaugggucuuugcagugcagaauaugcaucuga

SEQ ID NO: 34370 - RNA, 1704 nt, Artificial Sequence
  derived and/or modified CDS sequence (wt) from hemagglutinin__InfluenzaA__ACG50699
auggagaaaauaguacuucuucuugcaauagucagccuuguuaaaagugaucagauuugcauugguuaccaugcaaacaacucgacagagcagguugacacaauaauggaaaagaacguuacuguuacacaugcccaagacauacuggaaaagacacacaacggaaagcucugcgaucuagauggagugaagccucugauuuuaagagauuguaguguagcuggauggcuccucggaaacccaaugugugacgaauucaucaauguaccggaauggucuuacaugguggagaaagccaauccagccaaugaccucuguuacccaggaaauuucaacgacuaugaagaacugaaacaccuauugagcagaauaaaccauuuugagaaaauacagaucauccccaagaguucuugguccgaucaugaagccucauugggggugagcucagcauguccauaccagggaaguuccuccuuuuucagaaaugugguauggcuuaucaaaaagaacaaugcauacccaacaauaaagaggagcuacaauaauaccaaccaagaagaucucuugguauugugggggauucaccauccuaaugaugaggcagagcagacaaggcucuaucagaauccaaccaccuauauuuccguugggacaucaacacuaaaccagagauugauaccaaaaauagcuacuagauccaaaguaaacgggcaaaguggaaggauggauuucuucuggacaauuuuaaaaccgaaugaugcaaucaacuucgagaguaauggaaauuucauugcuccagaauaugcauacaaaauugucaagaaaggagacucggcaauuaugaaaagugaaguggaauaugguaacugcaacaccaagugucaaacuccaaugggggcgauaaacucuaguaugccauuccacaacauacacccucucaccaucggggaaugucccaaauaugugaaaucaaacaaauuaguucuugcgacugggcucagaaauagcccucaaagagagagaagaagaaaaagaggacuauuuggagcuauagcagguuuuauagagggaggauggcagggaaugguagaugguugguauggguaccaccauagcaaugagcaggggaguggguaugcugcagacaaagaauccacucaaaaagcaauagauggagucaccaauaaggucaacucgaucauugacaaaaugaacacucaguuugaggccguuggaagggaauuuaauaacuuagaaaggagaauagagaauuuaaacaagaagauggaagacggauuccuagaugucuggacuuauaaugcugaacuucugguucucauggaaaaugagagaacucuagacuuccaugacucaaaugucaagaaccuuuacgacaagguccgacuacagcuuagggauaaugcaaaggagcuggguaacgguuguuuugaguucuaucacaaaugugauaaugaauguauggaaaguguaagaaacggaacguaugacuacccgcaguauucagaagaagcaagauuaaaaagagaggaaauaaguggaguaaaauuggaaucaauaggaacuuaccaaauacuaucaauuuauucaacaguggcgaguucccuagcacuggcaaucaugguggcuggucuaucuuuauggaugugcuccaauggguccuuacaaugcagaauuugcauuuaa

SEQ ID NO: 34371 - RNA, 1701 nt, Artificial Sequence; identical to SEQ ID NO: 33980
  derived and/or modified CDS sequence (wt) from hemagglutinin__InfluenzaA__ACG70142

SEQ ID NO: 34372 - RNA, 1701 nt, Artificial Sequence
  derived and/or modified CDS sequence (wt) from hemagglutinin__InfluenzaA__ACG70153
augaagacuaucauugcuuugagcuacauucuaugucugguuuucgcucaaaaacuuccuggaaaugacaacagcacggcaacgcugugccuugggcaccaugcaguaccaaacggaacgauagugaaaacaaucacgaaugaccaaauugaaguuacuaaugcuacugagcugguucagaguuccucaacaggugaaauaugcgacaguccucaucagauccuugauggagaaaacugcacacuaauagaugcucuauugggagacccucagugugauggcuuccaaaauaagaaaugggaccuuuuuguugaacgcagcaaagccuacagcaacuguuacccuuaugaugugccggauuaugccucccuuaggucacuaguugccucauccggcacacuggaguuuaacaaugaaagcuucaauuggacuggagucacucaaaacggaacaagcucugcuugcauaaggagaucuaauaacaguuucuuuaguagauugaauugguugacccacuuaaaauucaaauacccagcauugaacgugacuaugccaaacaaugaaaaauuugacaaauuguacauuugggggguucaccacccggguacggacaaugaccaaaucuuccuguaugcucaagcaucaggaagaaucacagucucuaccaaaagaagccaacaaacuguaaucccgaauaucggaucuagacccagaguaaggaauauccccagcagaauaagcaucuauuggacaauaguaaaaccgggagacauacuuuugauuaacagcacagggaaucuaauugcuccuagggguuacuucaaaauacgaagugggaaaagcucaauaaugagaucagaugcacccauuggcaaaugcaauucugaaugcaucacuccaaauggaagcauuccaaaugacaaaccauuccaaaauguaaacaggaucacauacggggccugucccagauauguuaagcaaaacacucugaaauuggcaacagggaugcgaaauguaccagagaaacaaacuagaggcauauuuggcgcaaucgcggguuucauagaaaaugguugggagggaaugguggaugguugguacgguuucaggcaucaaaauucugagggaauaggacaagcagcagaucucaaaagcacucaagcagcaaucgaucaaaucaaugggaagcugaauagguugaucgggaaaaccaacgagaaauuccaucagauugaaaaagaauucucagaagucgaagggagaauucaggaccuugagaaauauguugaggacaccaaaauagaucucuggucauacaacgcggagcuucuuguugcccuggagaaccaacauacaauugaucuaacugacucagaaaugaacaaacuguuugaaaaaacaaagaagcaacugagggaaaaugcugaggauaugggcaaugguuguuucaaaauauaccacaaaugugacaaugccugcauaggaucaaucaggaauggaacuuaugaccacgauguauacagagaugaagcauuaaacaaccgguuccagaucaagggcguugagcugaagucaggauacaaagauuggauccuauggauuuccuuugccauaucauguuuuuugcuuuguguugcuuuguugggguucaucaugugggccugccaaaaaggcaacauuaggugcaacauuugcauuuga

SEQ ID NO: 34373 - RNA, 1701 nt, Artificial Sequence
  derived and/or modified CDS sequence (wt) from hemagglutinin__InfluenzaA__ACG80410
augaagacuaucauugcuuugagcuacauucuaugucugguuuucgcucaaaaacuuccuggaaaugacaacagcacggcaacgcugugccuugggcaccaugcaguaccaaacggaacaauagugagaacaaucacgaaugaccaaauugaaguuacuaaugcuacugagcugguucagaguuccucaacaggugaaauaugcgacaguccucaucagauccuugauggagaaaacugcacacuaauagaugcucuauugggagacccucagugugauggcuuccaaaauaagaaaugggaccuuuuuguugaacgcagcaaagccuacagcaacuguuacccuuaugaugugccggauuaugccucccuuaggucacuaguugccucauccggcacacuggaguuuaacaaugaaagcuucaauuggacuggagucacucaaaauggaacaagcucugcuugcauaaggagaucuaauaacaguuucuuuaguagauugaauugguugacccacuuaagauucaaauacccagcauugaaugugacuaugccaaacaaugaacaauuugacaaauuguacauuugggggguucaccacccggguacggacaaugaccaaaucuuccuguaugcucaagcaucaggaagaaucacagucucuaccaaaagaagccaacaaacuguaaucccgaauaucggaucuagacccagaguaaggaauaucccuagcagaauaagcaucuauuggacaauaguaaaaccgggagacauacuuuugauuaacagcacagggaaucuaauugcuccuagggguuacuucaaaauacgaaaugggaaaagcucaauaaugagaucagaugcacccauuggcaaaugcaauucugaaugcaucacuccaaauggaagcauucccaaugacaaaccauuccaaaauguaaacaggaucacauacggggccugucccagauauguuaagcaaaacacucugaaauuggcaacagggaugcgaaauguaccagagaaacaaacuagaggcauauuuggcgcaaucgcggguuucauagaaaaugguugggagggaaugguggaugguugguacgguuucaggcaucaaaauucugagggaagaggacaagcagcagaucucaaaagcacucaagcagcaaucgaucaaaucaaugggaagcugaauagauugaucgggaaaaccaacgagaaauuccaucagauugaaaaagaauucucagaagucgaagggagaauucaggaccuugagaaauauguugaggacaccaaaauagaucucuggucauacaacgcggagcuucuuguugcccuggagaaccaacauacaauugaucuaacugacucagaaaugaacaaacuguuugaaaaaacaaagaagcaacugagggaaaaugcugaggauaugggcaaugguuguuucaaaauauaccacaaaugugacaaugccugcauaggaucaaucagaaauggaacuuaugaccacgauguauacagagaugaagcauuaaacaaccgguuccagaucaagggaguugagcugaagucaggguacaaagauuggauccuauggauuuccuuugccauaucauguuuuuugcuuuguguugcuuuguugggguucaucaugugggccugccaaaaaggcaacauuaggugcaacauuugcauuuga

SEQ ID NO: 34374 - RNA, 1701 nt, Artificial Sequence
  derived and/or modified CDS sequence (wt) from hemagglutinin__InfluenzaA__ACG80420
augcagacuaucauugcuuugagcuacauucuaugucugguuuucgcucaaaaacuuccuggaaaugacaacagcacggcaacgcugugccuugggcaccaugcaguaccaaacggaacaauagugagaacaaucacgaaugaccaaauugaaguuacuaaugcuacugagcugguucagaguuccucaacaggugaaauaugcgacaguccucaucagauccuugauggagaaaacugcacacuaauagaugcucuauugggagacccucagugugauggcuuccaaaauaagaaaugggaccuuuuuguugaacgcagcaaagccuacagcaacuguuacccuuaugaugugccggauuaugccucccuuaggucacuaguugccucauccggcacacuggaguuuaacaaugaaagcuucaauuggacuggagucacucaaaauggaacaagcucugcuugcauaaggagaucuaauaacaguuucuuuaguagauugaauugguugacccacuuaagauucaaauacccagcauugaaugugacuaugccaaacaaugaacaauuugacaaauuguacauuugggggguucaccacccggguacggacaaugaccaaaucuuccuguaugcucaagcaucaggaagaaucacagucucuaccaaaagaagccaacaaacuguaaucccgaauaucggaucuagacccagaguaaggaauaucccuagcagaauaagcaucuauuggacaauaguaaaaccgggagacauacuuuugauuaacagcacagggaaucuaauugcuccuagggguuacuucaaaauacgaaaugggaaaagcucaauaaugagaucagaugcacccauuggcaaaugcaauucugaaugcaucacuccaaauggaagcauucccaaugacaaaccauuccaaaauguaaacaggaucacauacggggccugucccagauauguuaagcaaaacacucugaaauuggcaacagggaugcgaaauguaccagagaaacaaacuagaggcauauuuggcgcaaucgcggguuucauagaaaaugguugggagggaaugguggaugguugguacgguuucaggcaucaaaauucugagggaagaggacaagcagcagaucucaaaagcacucaagcagcaaucgaucaaaucaaugggaagcugaauagauugaucgggaaaaccaacgagaaauuccaucagauugaaaaagaauucucagaagucgaagggagaauucaggaccuugagaaauauguugaggacaccaaaauagaucucuggucauacaacgcggagcuucuuguugcccuggagaaccaacauacaauugaucuaacugacucagaaaugaacaaacuguuugaaaaaacaaagaagcaacugagggaaaaugcugaggauaugggcaaugguuguuucaaaauauaccacaaaugugacaaugccugcauaggaucaaucagaaauggaacuuaugaccacgauguauacagagaugaagcauuaaacaaccgguuccagaucaagggaguugagcugaaaucaggguacaaagauuggauccuauggauuuccuuugccauaucauguuuuuugcuuuguguugcuuuguugggguucaucaugugggccugccaaaaaggcaacauuaggugcaacauuugcauuuga

SEQ ID NO: 34375 - RNA, 1701 nt, Artificial Sequence; identical to SEQ ID NO: 34373
  derived and/or modified CDS sequence (wt) from hemagglutinin__InfluenzaA__ACG80426

SEQ ID NO: 34376 - RNA, 1701 nt, Artificial Sequence; identical to SEQ ID NO: 34373
  derived and/or modified CDS sequence (wt) from hemagglutinin__InfluenzaA__ACG80430

SEQ ID NO: 34377 - RNA, 1701 nt, Artificial Sequence
  derived and/or modified CDS sequence (wt) from hemagglutinin__InfluenzaA__ACG80436
augaagacuaucauugcuuugagcuacauucuaugucugguuuucgcucaaaaauuuccuggaaaugacaacagcacggcaacgcugugccuugggcaccaugcaguaccaaacggaacgauagugaaaacaaucacgaaugaccaaauugaaguuaccaaugcuacugagcugguucagaguuccucaacaggugaaauaugcgacaguccucaucagauccuugauggagaaaacugcacacuaauagaugcucuauugggagacccucagugugauggcuuccaaaauaagaaaugggaccuuuuuguugaacgcagcaaagccuacagcaauuguuacccuuaugaugugccggauuaugccucccuuaggucacuaguugccucauccggcacacuggaguuuaacaaugaaagcuucaauuggacuggagucacucaaaacggaacaagcucugcuugcauaaggagaucuaauaacaguuucuuuaguagauugaauugguugacccacuugagauucaaauacccagcauugaacgugacuaugccaaacaaugaaaauuuugacaaauuguacauuugggggguccaccacccggguacggacaaugaccaaaucuucuuguaugcucaagcaucaggaagaaucacagucucuaccaaaagaagccaacaaacuguaaucccgaauaucggauccagacccagaguaaggaauaucccuagcagaauaagcaucuauuggacaauaguaaaaccgggagacauacuuuugauuaacagcacagggaaucuaauugcuccuagggguuacuucaaaauacgaagugggaaaagcucaauaaugagaucagaugcacccauuggcaaaugcaauucugaaugcaucacuccaaauggaagcauucccaaugacaaaccauuccaaaauguaaacaggaucacauacggggccugucccagauauguuaagcaaaacacucugaaauuggcaacagggaugcgaaauguaccagagaaacaaacuagaggcauauuuggcgcaaucgcugguuucauagaaaaugguugggagggaaugguggaugguugguacgguuuccggcaucaaaauucugagggaauaggacaagcagcagaucucaaaagcacucaagcagcacucgaucaaaucaaugggaagcugaauagguugaucgggaaaaccaacgagaaauuccaucagauugaaaaagaauucucagaagucgaagggagaauucaggaccuugagaaauauguugaggacaccaaaauagaucucuggucauacaacgcggagcuucuuguugcccuggagaaccaacauacaauugaucuaacugauucagaaaugaacaaacuguuugaaaaaacaaagaagcaacugagggaaaaugcugaggauaugggcaaugguuguuucaaaaucuaccacaaaugugacaaugccugcauaggaucaaucagaaauggaacuuaugaccacaauguauacagagaugaagcauuaaacaaccgguuccagaucaaaggcguugagcugaagucaggauacaaagauuggauccuauggauuuccuuugccauaucauguuuuuugcuuuguguugcuuuguugggguucaucaugugggccugccaaaaaggcaacauuaggugcaacauuugcauuuga

SEQ ID NO: 34378 - RNA, 1701 nt, Artificial Sequence
  derived and/or modified CDS sequence (wt) from hemagglutinin__InfluenzaA__ACG80445
augaagacuaucauugcuuugagcuacauucuaugucugguuuucgcucaaaaacuuccuggaaaugacaacagcacggcaacgcugugccuugggcaccaugcaguaccaaacggaacaauagugagaacaaucacgaaugaccaaauugaaguuacuaaugcuacugagcugguucagaguuccucaacaggugaaauaugcgacaguccucaucagauccuugauggagaaaacugcacacuaauagaugcucuauugggagacccucagugugauggcuuccaaaauaagaaaugggaccuuuuuguugaacgcagcaaagccuacagcaacuguuacccuuaugaugugccggauuaugccucccuuaggucacuaguugccucauccggcacacuggaguuuaacaaugaaagcuucaauuggacuggagucacucaaaauggaacaagcucugcuugcauaaggagaucuaauaacaguuucuuuaguagauugaauugguugacccacuuaagauucaaauacccagcauugaaugugacuaugccaaacaaugaacaauuugacaaauuguacauuugggggguucaccacccggguacggacaaugaccaaaucuuccuguaugcucaagcaucaggaagaaucacagucucuaccaaaagaagccaacaaacuguaaucccgaauaucggaucuagacccagaguaaggaauaucccuagcagaauaagcaucuauuggacaauaguaaaaccgggagacauacuuuugauuaacagcacagggaaucuaauugcuccuagggguuacuucaaaauacgaaaugggaaaagcucaauaaugagaucagaugcacccauuggcaaaugcaauucugaaugcaucacuccaaauggaagcauucccaaugacaaaccauuccaaaauguaaacaggaucacauacggggccugucccagauauguuaagcaaaacacucugaaauuggcaacagggaugcgaaauguaccagagaaacaaacuagaggcauauuuggcgcaaucgcggguuucauagaaaaugguugggagggaaugguggaugguugguacgguuucaggcaucaaaauucugagggaagaggacaagcagcagaucucaaaagcacucaagcagcaaucgaucaaaucaaugggaagcugaauagauugaucgggaaaaccaacgagaaauuccaucagauugaaaaagaauucucagaagucgaagggagaauucaggaccuugagaaauauguugaggacaccaaaauagaucucuggucauacaacgcggagcuucuuguugcccuggagaaccaacauacaauugaucuaacugacucagaaaugaacaaacuguuugaaaaaacaaagaaucaacugagggaaaaugcugaggauaugggcaaugguuguuucaaaauauaccacaaaugugacaaugccugcauaggaucaaucagaaauggaacuuaugaccacgauguauacagagaugaagcauuaaacaaccgguuccagaucaagggaguugagcugaagucaggguacaaagauuggauccuauggauuuccuuugccauaucauguuuuuugcuuuguguugcuuuguugggguucaucaugugggccugccaaaaaggcaacauuaggugcaacauuugcauuuga

SEQ ID NO: 34379 - RNA, 1701 nt, Artificial Sequence; identical to SEQ ID NO: 34373
  derived and/or modified CDS sequence (wt) from hemagglutinin__InfluenzaA__ACG80454

SEQ ID NO: 34380 - RNA, 1701 nt, Artificial Sequence; identical to SEQ ID NO: 34373
  derived and/or modified CDS sequence (wt) from hemagglutinin__InfluenzaA__ACG80463

SEQ ID NO: 34381 - RNA, 1701 nt, Artificial Sequence
  derived and/or modified CDS sequence (wt) from hemagglutinin__InfluenzaA__ACG80472
augaagacuaucauugcuuugagcuacauucuaugucugguuuucgcucaaaaacuuccuggaaaugacaacagcacggcaacgcugugccuugggcaccaugcaguaccaaacggaacaauagugagaacaaucacgaaugaccaaauugaaguuacuaaugcuacugagcugguucagaguuccucaacaggugaaauaugcgacaguccucaucagauccuugauggagaaaacugcacacuaauagaugcucuauugggagacccucagugugauggcuuccaaaauaagaaaugggaccuuuuuguugaacgcagcaaagccuacagcaacuguuacccuuaugaugugccggauuaugccucccuuaggucacuaguugccucauccggcacacuggaguuuaacaaugaaagcuucaauuggacuggagucacucaaaauggaacaagcucugcuugcauaaggagaucuaauaacaguuucuuuaguagauugaauugguugacccacuuaagauucaaauacccagcauugaaugugacuaugccaaacaaugaacaauuugacaaauuguacauuugggggguucaccacccggguacggacaaugaccaaaucuuccuguaugcucaagcaucaggaagaaucacagucucuaccaaaagaagccaacaaacuguaaucccgaauaucggauccagacccagaguaaggaauaucccuagcagaauaagcaucuauuggacaauaguaaaaccgggagacauacuuuugauuaacagcacagggaaucuaauugcuccuagggguuacuucaaaauacgaagugggaaaagcucaauaaugagaucagaugcacccauuggcaaaugcaauucugaaugcaucacuccaaauggaagcauucccaaugacaaaccauuccaaaauguaaacaggaucacauacggggccugucccagauauguuaagcaaaacacucugaaauuggcaacagggaugcgaaauguaccagagaaacaaacuagaggcauauuuggcgcaaucgcugguuucauagaaaaugguugggagggaaugguggaugguugguacgguuuccggcaucaaaauucugagggaauaggacaagcagcagaucucaaaagcacucaagcagcacucgaucaaaucaaugggaagcugaauagguugaucgggaaaaccaacgagaaauuccaucagauugaaaaagaauucucagaagucgaagggagaauucaggaccuugagaaauauguugaggacaccaaaauagaucucuggucauacaacgcggagcuucuuguugcccuggagaaccaacauacaauugaucuaacugauucagaaaugaacaaacuguuugaaaaaacaaagaagcaacugagggaaaaugcugaggauaugggcaaugguuguuucaaaaucuaccacaaaugugacaaugccugcauaggaucaaucagaaauggaacuuaugaccacaauguauacagagaugaagcauuaaacaaccgguuccagaucaaaggcguugagcugaagucaggauacaaagauuggauccuauggauuuccuuugccauaucauguuuuuugcuuuguguugcuuuguugggguucaucaugugggccugccaaaaaggcaacauuaggugcaacauuugcauuuga

SEQ ID NO: 34382 - RNA, 1701 nt, Artificial Sequence
  derived and/or modified CDS sequence (wt) from hemagglutinin__InfluenzaA__ACH69558
augaagacuaucauugcuuugagcuacauucuaugucugguuuucgcucaaaaacuucccggaaaugacaacagcacggcaacgcugugccuugggcaccaugcaguaccaaacggaacgauagugaaaacaaucacgaaugaccaaauugaaguuacuaaugcuacugagcugguucagaguuccucaacagguggaauaugcaacaguccucaucagauccuugauggagaaaacugcacacuaauagaugcucuauugggagacccucagugugauggcuuccaaaauaagaaaugggaccuuuuuguugaacgcagcaaagccuacagcaacuguuacccuuaugaugugccggauuaugccucccuuaggucacuaguugccucauccggcacacuggaguuuaacaaugaaagcuucaauuggacuggagucacucaaaauggaacaagcucugcuugcaaaaggagaucuaauaacaguuucuuuaguagauugaauugguugacccacuuaagauucaaauacccagcauugaacgugacuaugccaaacaaugaaaaauuugacaaauuguacauuugggggguucaccacccggguacggacaaugaccaaaucuuccuguaugcucaagcaucaggaagaaucacagucucuaccaaaagaagccaacaaacuguaaucccgaauaucggaucuagacccagaguaaggaauauccccagcagaauaagcaucuauuggacaauaguaaaaccgggagacauacuuuugauuaacagcacagggaaucuaauugcuccuagggguuacuucaaaauacgaagugggaaaagcucaauaaugagaucagaugcacccauuggcaaaugcaauucugaaugcaucacuccaaauggaagcauucccaaugacaaaccauuucaaaauguaaacaggaucacauauggggccugucccagauauguuaagcaaaacacucugaaauuggcaacagggaugcgaaauguaccagagaaacaaacuagaggcauauuuggcgcaaucgcggguuucauagaaaaugguugggagggaaugguggaugguugguacgguuucaggcaucaaaauucugagggaauaggacaagcagcagaucucaaaagcacucaagcagcaaucaaucaaaucaaugggaagcugaauagguugaucgggaaaaccaacgagaaauuccaucagauugaaaaagaauucucagaaguagaagggagaauucaggaccucgagaaauauguugaggacacuaaaauagaucucuggucauacaacgcggagcuucuuguugcccuggagaaccaacauacaauugaucuaacugacucagaaaugaacaaacuguuugaaagaacaaagaagcaacugagggaaaaugcugaggauaugggcaaugguuguuucaaaauauaccacaaaugugacaaugccugcauaggaucaaucagaaauggaacuuaugaccaugauguauacagagaugaagcauuaaacaaccgguuccagaucaaaggcguugagcugaagucaggauacaaagauuggauccuauggauuuccuuugccauaucauguuuuuugcuuuguguugcuuuguugggguucaucaugugggccugccaaaaaggcaacauuaggugcaacauuugcauuuga

SEQ ID NO: 34383 - RNA, 1701 nt, Artificial Sequence
  derived and/or modified CDS sequence (wt) from hemagglutinin__InfluenzaA__ACH69569
augaagacuaucauugcuuugagcuacauucuaugucugguuuucgcucaaaaacuucccggaaaugacaacagcacggcaacgcugugccuugggcaccaugcaguaccaaacggaacgauagugaaaacaaucacgaaugaccaaauugaaguuacuaaugcuacugagcugguucagaguuccucaacagguggaauaugcaacaguccucaucagauccuugauggagaaaacugcacacuaauagaugcucuauugggagacccucagugugauggcuuccaaaauaagaaaugggaccuuuuuguugaacgcagcaaagccuacagcaacuguuacccuuaugaugugccggauuaugccucccuuaggucacuaguugccucauccggcacacuggaguuuaacaaugaaagcuucaauuggacuggagucacucaaaauggaacaagcucugcuugcaaaaggagaucuaauaacaguuucuuuaguagauugaauugguugacccacuuaaaauucaaauacccagcauugaacgugacuaugccaaacaaugaaaaauuugacaaauuguacauuugggggguucaccacccggguacggacaaugaccaaaucuuccuguaugcucaagcaucaggaagaaucacagucucuaccaaaagaagccaacaaacuguaaucccgaauaucggaucuagacccagaguaaggaauauccccagcagaauaagcaucuauuggacaauaguaaaaccgggagacauacuuuugauuaacagcacagggaaucuaauugcuccuagggguuacuucaaaauacgaagugggaaaagcucaauaaugagaucugaugcacccauuggcaaaugcaauucugaaugcaucacuccaaauggaagcauucccaaugacaaaccauuucaaaauguaaacaggaucacauauggggccugucccagauauguuaagcaaaacucucugaaauuggcaacagggaugcgaaauguaccagagaaacaaacuagaggcauauuuggcgcaaucgcggguuucauagaaaaugguugggagggaaugguggaugguugguacgguuucaggcaucaaaauucugagggaauaggacaagcagcagaucucaaaagcacucaagcagcaaucaaucaaaucaaugggaagcugaauagguugaucgggaaaaccaacgagaaauuccaucagauugaaaaagaauucucagaaguagaagggagaauucaggaccucgagaaauauguugaggacacuaaaauagaucucuggucauacaacgcggagcuucuuguugcccuggagaaccaacauacaauugaucuaacugacucagaaaugaacaaacuguuugaaagaacaaagaagcaacugagggaaaaugcugaggauaugggcaaugguuguuucaaaauauaucacaaaugugacaaugccugcauaggaucaaucagaaauggaacuuaugaccaugauguauacagagaugaagcauuaaacaaccgguuccagaucaaaggcgucgagcugaagucaggauacaaagauuggauccuauggauuuccuuugccauaucauguuuuuugcuuuguguugcuuuguugggguucaucaugugggccugccaaaaaggcaacauuaggugcaacauuugcauuuga

SEQ ID NO: 34384 - RNA, 1701 nt, Artificial Sequence
  derived and/or modified CDS sequence (wt) from hemagglutinin__InfluenzaA__ACH69580
augaagacuaucauugcuuugagcuacauucuaugucugguuuucgcucaaaaacuucccggaaaugacaacagcacggcaacgcugugccuugggcaccaugcaguaccaaacggaacgauagugaaaacaaucacgaaugaccaaauugaaguuacuaaugcuacugagcugguucagaguuccucaacagguggaauaugcgacaguccucaucagauccuugauggagaaaacugcacacuaauagaugcucuauugggagacccucagugugaugacuuccaaaauaagaaaugggaccuuuuuguugaacgcagcaaagccuacagcaacuguuacccuuaugaugugccggauuaugccucccuuaggucacuaguugccucauccggcacacuggaguuuaacaaugaaagcuucaauuggacuggagucacucaaaauggaacaagcucugcuugcaaaaggagaucuaauaacaguuucuuuaguagauugaauugguugacccacuuaaaauucaaauacccagcauugaacgugacuaugccaaacaaugaaaaauuugacaaauuguacauuugggggguucaccacccggguacggacaaugaccaaaucuuccuguaugcucaagcaucaggaagaaucacagucucuaccaaaagaagccaacaaacuguaaucccgaauaucggaucuagacccaggguaaggaauauccccagcagaauaagcaucuauuggacaauaguaaaaccgggagacauacuuuugauuaacagcacagggaaucuaauugcuccuagggguuacuucaaaauacgaagugggaaaagcucaauaaugagaucagaugcacccauuggcaaaugcaauucugaaugcaucacuccaaauggaagcauucccaaugacaaaccauuucaaaauguaaacaggaucacauauggggccugucccagauauguuaagcaaaacacucugaaauuggcaacagggaugcgaaauguaccagagaaacaaacuagaggcauauuuggcgcaaucgcggguuucauagaaaaugguugggagggaaugguggaugguugguacgguuucaggcaucaaaauucugagggaauaggacaagcagcagaucucaaaagcacucaagcagcaaucaaucaaaucaaugggaagcugaauagguugaucgggaaaaccaacgagaaauuccaucagauugaaaaagaauucucagaaguagaagggagaauucaggaccucgagaaauauguugaggacacuaaaauagaucucuggucauacaacgcggagcuucuuguugcccuggagaaccaacauacaauugaucuaacugacucagaaaugaacaaacuguuugaaagaacaaagaagcaacugagggaaaaugcugaggauaugggcaaugguuguuucaaaauauaccacaaaugugacaaugccugcauaggaucaaucagaaauggaacuuaugaccaugauguauacagagaugaagcauuaaacaaccgguuccagaucaaaggcguugagcugaagucaggauacaaagauuggauccuauggauuuccuuugccauaucauguuuuuugcuuuguguugcuuuguugggguucaucaugugggccugccaaaaaggcaacauuaggugcaacauuugcauuuga

SEQ ID NO: 34385 - RNA, 1701 nt, Artificial Sequence
  derived and/or modified CDS sequence (wt) from hemagglutinin__InfluenzaA__ACH69591
augaagacuaucauugcuuugagcuacauuuuaugucuggcuuucgcucaaaaacuucccggaaaugacaacagcacggcaacgcugugccugggacaccaugcagugccaaacggaacgcuagugaaaacaaucacgaaugaccaaauugaagugacuaaugcuacugagcugguucagaguuccucaacagguagaauaugcgacaguccucaccaaauccuugauggagaaaacugcacacugauagaugcucuauugggagacccacauugugauggcuuccaaaauaaggaaugggaccuuuuuguugaacgcagcaaagccuacagcaacuguuacccuuaugaugugccggauuaugccucccuuaggucacuaguugccucauccggcacccuggaguuuaacaaugaaagcuucaauuggacuggagucgcucagaauggaacaagcucugcuugcaaaaggagaucuauuaacaguuucuuuaguagauugaauugguugcaccaauuaaaauacagauauccagcacugaacgugacuaugccaaacaaugacaaauuugacaaauuguacauuugggggguucaccacccgaguacggacagugaccaaaucagcguauaugcccaagcaucagggagagucacagucucuaccaaaagaagccaacaaacuguaaucccgaauaucggauccagacccuggguaagggguaucuccagcagaauaagcaucuauuggacaauaguaaaaccgggagacauacuuuugauuaacagcacagggaaucuaauugcuccucgggguuacuucaaaauacgaagugggaaaagcucaauaaugaggucagaugcacccauuggcaaaugcaauucugaaugcaucacuccaaauggaagcauucccaaugacaaaccauuucaaaauguaaacaggaucacauauggggccugucccagauauguuaagcaaaacacucugaaauuggcaacagggaugcggaauguaccagagaaacaaacuagaggcauauucggcgcaaucgcggguuucauagaaaaugguugggagggaaugauggacgguugguacgguuucaggcaucaaaauucugagggcacaggacaagcagcagaucuuaaaagcacucaagcagcaaucaaccaaaucaacgggaaacugaauaaguuaaucgagaaaacgaacgagaaauuccaucaaauugaaaacgaauucucagaaguagaagggagaauucaggaccucgagaaauauguugaggacacuaaaauagaucucuggucguacaacgcggagcuucuuguugcccuggagaaccaacauacaauugaucuaacugacucagaaaugaacaaacuguuugaaagaacaaggaagcaacugagagaaaaugcugaggauaugggcaaugguuguuucaaaauauaccacaaaugugacaaugccugcauagggucaaucagaaauggaacuuaugaccaugauguauacagagacgaagcauuaaacaaccgguuccagaucaaagguguugagcugaagucaggauacaaagauuggauccuauggauuuccuuugccauaucauguuuuuugcuuuguguuguuuugcugggguucauuaugugggccugccaaaaaggcaacauuaggugcaacauuugcauuuga

SEQ ID NO: 34386 - RNA, 1701 nt, Artificial Sequence
  derived and/or modified CDS sequence (wt) from hemagglutinin__InfluenzaA__ACH69602
augaagacuaucauugcuuugagcuacauuuuaugucuggcuuucgcucaaaaacuucccggaaaugacaacagcacggcaacgcugugccugggacaccaugcagugccaaacggaacgcuagugaaaacaaucacgaaugaccaaauugaagugacuaaugcuacugagcugguucagaguuccucaacagguagaauaugcgacaguccucaccaaauccuugauggagaaaacugcacacugauagaugcucuauugggagacccacauugugauggcuuccaaaauaaggaaugggaccuuuuuguugaacgcagcaaagccuacagcaacuguuacccuuaugaugugccggauuaugccucccuuaggucacuaguugccucauccggcacccuggaguuuaacaaugaaagcuucaauuggacuggagucgcucagaauggaacaagcucugcuugcaaaaggagaucuauuaacaguuucuuuaguagauugaauugguugcaccaauuaaaauacagauauccagcacugaacgugacuaugccaaacaaugacaaauuugacaaauuguacauuugggggguucaccacccgaguacggacagugaccaaaucagcguauaugcccaagcaucagggagagucacagucucuaccaaaagaagccaacaaacuguaaucccgaauaucggauccagacccuggguaagggguaucuccagcagaauaagcaucuauuggacaauaguaaaaccgggagacauacuuuugauuaacagcacagggaaucuaauugcuccucgggguuacuucaaaauacgaagugggaaaagcucaauaaugaggucagaugcacccauuggcaaaugcaauucugaaugcaucacuccaaauggaagcauucccaaugacaaaccauuucaaaauguaaacaggaucacauauggggccugucccagauauguuaagcaaaacacucugaaauuggcaacagggaugcggaauguaccagagaaacaaacuagaggcauauucggcgcaaucgcggguuucauagaaaaugguugggagggaaugauggacgguugguacgguuucaggcaucaaaauucugagggcacaggacaagcagcagaucuuaaaagcacucaagcagcaaucaaccaaaucaacgggaaacugaauaaguuaaucgagaaaacgaacgagaaauuccaucaaauugaaaaagaauucucagaaguagaagggagaauucaggaccucgagaaauauguugaggacacuaaaauagaucucuggucguacaacgcggagcuucuuguugcccuggagaaccaacauacaauugaucuaacugacucagaaaugaacaaacuguuugaaagaacaaggaagcaacugagagaaaaugcugaggauaugggcaaugguuguuucaaaauauaccacaaaugugacaaugccugcauagggucaaucagaaauggaacuuaugaccaugauguauacagagacgaagcauuaaacaaccgguuccagaucaaagguguugagcugaagucaggauacaaagauuggauccuauggauuuccuuugccauaucauguuuuuugcuuuguguuguuuugcugggguucauuaugugggccugccaaaaaggcaacauuaggugcaacauuugcauuuga

SEQ ID NO: 34387 - RNA, 1701 nt, Artificial Sequence
  derived and/or modified CDS sequence (wt) from hemagglutinin__InfluenzaA__ACH69613
augaagacuaucauugcuuugagcuacauuuuaugucuggcuuucgcucaaaaacuucccggaaaugacaacagcacgccaacgcugugccugggacaccaugcagugccaaacggaacgcuagugaaaacaaucacgaaugaccaaauugaagugacuaaugcuacugagcugguucagaguuccucaacagguggaauaugcgacaguccucaccaaaucauugacggagaaaacugcacacugauagaugcucuauugggagacccacauugugauggcuuccaaaauaaggaaugggaccuuuuuguugaacgcagcaaagccuacagcaacuguuacccuuaugaugugccggauuaugccucccuuaggucacuaguugccucauccggcacccuggaguuuaacaaugaaagcuucaauuggacuggagucgcucagaauggaacaagcucugcuugcaaaaggagaucuauuaacaguuucuuuaguagauugaauugguugcaccaauuaaaauacagauauccagcacugaacgugacuaugccaaacaaugacaaauuugacaaauuguacauuugggggguucaccacccgaguacggacagugaccaaaucagcguauaugcccaagcaucagggagagucacagucucuaccaaaagaagccaacaaacuguaaucccgaauaucggauccagacccuggguaagggguaucuccagcagaauaagcaucuauuggacaauaguaaaaccgggagacauacuuuugauuaacagcacagggaauccaauugcuccucgggguuacuucaaaauacgaagugggaaaagcucaauaaugaggucagaugcacccauuggcaaaugcaauucugaaugcaucacuccaaauggaagcauucccaaugacaaaccauuucaaaauguaaacaggaucacauauggggccugucccagauauguuaagcaaaacacucugaaauuggcaacagggaugcggaauguaccagagaaacaaacuagaggcauauucggcgcaaucgcggguuucauagaaaaugguugggagggaaugauggacgguugguacggucucaggcaucaaaauucugagggcacaggacaggcagcagaucuuaaaagcacucaagcagcaaucaaccaaaucaacgggaaacugaauaaguuaaucgagaaaacgaacgagaaauuccaucaaauugaaaacgaauucucagaaguagaagggagaauucaggaccucgagaaauauguugaggacacuaaaauagaucucuggucguacaacgcggagcuucuuguugcccuggagaaccaacauacaauugaucuaacugacucagaaaugaacaaacuguuugaaagaacaaggaagcaacugagagaaaaugcugaggauaugggcaaugguuguuucaaaauauaccacaaaugugacaaugccugcauagggucgaucagaaauggaacuuaugaccaugauguauacagagacgaagcauuaaacaaccgguuccagaucaaagguguugagcugaagucaggauacaaagauuggauccuauggauuuccuuugccauaucauguuuuuugcuuuguguuguuuugcugggguucauuaugugggccugccaaaaaggcaacauuaggugcaacauuugcauuuga

SEQ ID NO: 34388 - RNA, 1701 nt, Artificial Sequence; identical to SEQ ID NO: 32647
  derived and/or modified CDS sequence (wt) from hemagglutinin__InfluenzaA__ACH82060

SEQ ID NO: 34389 - RNA, 1701 nt, Artificial Sequence; identical to SEQ ID NO: 34328
  derived and/or modified CDS sequence (wt) from hemagglutinin__InfluenzaA__ACI06123

SEQ ID NO: 34390 - RNA, 1701 nt, Artificial Sequence; identical to SEQ ID NO: 34328
  derived and/or modified CDS sequence (wt) from hemagglutinin__InfluenzaA__ACI06126

SEQ ID NO: 34391 - RNA, 1701 nt, Artificial Sequence; identical to SEQ ID NO: 34328
  derived and/or modified CDS sequence (wt) from hemagglutinin__InfluenzaA__ACI06127

SEQ ID NO: 34392 - RNA, 1701 nt, Artificial Sequence; identical to SEQ ID NO: 34328
  derived and/or modified CDS sequence (wt) from hemagglutinin__InfluenzaA__ACI06129

SEQ ID NO: 34393 - RNA, 1701 nt, Artificial Sequence; identical to SEQ ID NO: 34328
  derived and/or modified CDS sequence (wt) from hemagglutinin__InfluenzaA__ACI06130

SEQ ID NO: 34394 - RNA, 1701 nt, Artificial Sequence; identical to SEQ ID NO: 34329
  derived and/or modified CDS sequence (wt) from hemagglutinin__InfluenzaA__ACI06132

SEQ ID NO: 34395 - RNA, 1701 nt, Artificial Sequence; identical to SEQ ID NO: 34330
  derived and/or modified CDS sequence (wt) from hemagglutinin__InfluenzaA__ACI06133

SEQ ID NO: 34396 - RNA, 1701 nt, Artificial Sequence; identical to SEQ ID NO: 34331
  derived and/or modified CDS sequence (wt) from hemagglutinin__InfluenzaA__ACI06134

SEQ ID NO: 34397 - RNA, 1701 nt, Artificial Sequence; identical to SEQ ID NO: 34330
  derived and/or modified CDS sequence (wt) from hemagglutinin__InfluenzaA__ACI06135

SEQ ID NO: 34398 - RNA, 1701 nt, Artificial Sequence; identical to SEQ ID NO: 34331
  derived and/or modified CDS sequence (wt) from hemagglutinin__InfluenzaA__ACI06136

SEQ ID NO: 34399 - RNA, 1701 nt, Artificial Sequence; identical to SEQ ID NO: 34331
  derived and/or modified CDS sequence (wt) from hemagglutinin__InfluenzaA__ACI06137

SEQ ID NO: 34400 - RNA, 1701 nt, Artificial Sequence; identical to SEQ ID NO: 34331
  derived and/or modified CDS sequence (wt) from hemagglutinin__InfluenzaA__ACI06138

SEQ ID NO: 34401 - RNA, 1701 nt, Artificial Sequence; identical to SEQ ID NO: 34331
  derived and/or modified CDS sequence (wt) from hemagglutinin__InfluenzaA__ACI06139

SEQ ID NO: 34402 - RNA, 1701 nt, Artificial Sequence; identical to SEQ ID NO: 34330
  derived and/or modified CDS sequence (wt) from hemagglutinin__InfluenzaA__ACI06140

SEQ ID NO: 34403 - RNA, 1701 nt, Artificial Sequence; identical to SEQ ID NO: 34330
  derived and/or modified CDS sequence (wt) from hemagglutinin__InfluenzaA__ACI06141

SEQ ID NO: 34404 - RNA, 1701 nt, Artificial Sequence; identical to SEQ ID NO: 34330
  derived and/or modified CDS sequence (wt) from hemagglutinin__InfluenzaA__ACI06142

SEQ ID NO: 34405 - RNA, 1701 nt, Artificial Sequence; identical to SEQ ID NO: 34330
  derived and/or modified CDS sequence (wt) from hemagglutinin__InfluenzaA__ACI06143

SEQ ID NO: 34406 - RNA, 1701 nt, Artificial Sequence
  derived and/or modified CDS sequence (wt) from hemagglutinin__InfluenzaA__ACI06144
augaagaccaucauugcuuugagcuacauuuucugucuggcucucggccaagaccuuccaggaaaugacaacagcacagcaacgcugugccugggacaucaugcggugccaaacggaacacuagugaaaacaaucacagaugaucagauugaagugacuaaugcuacugagcuaguucagagcuccucaacggggaaaauaugcaacaauccucaucgaauccuugauggaauagacugcacacugauagaugcucuauugggggacccucauugugauguuuuucaaaaugagacaugggaccuuuucguugaacgcagcaaagcuuucagcaacuguuacccuuaugaugugccagauuaugccucccuuaggucacuaguugccucgucaggcacucuggaguuuaucacugaggguuucacuuggacuggggucacucagaaugggggaagcaaugcuugcaaaaggggaccugguagcgguuuuuucaguagacugaacugguugaccaaaucaggaagcacauauccagugcugaacgugacuaugccaaacaaugacaauuuugacaaacuauacauuugggggguucaccacccgagcacgaaccaagaacaaaccagccuguauguucaagcaucagggagagucacagucucuaccaggagaagccagcaaacuauaaucccgaauaucggguccagacccuggguaaggggucugucuaguagaauaagcaucuauuggacaauaguuaagccgggagacguacugguaauuaauaguaaugggaaccuaaucgcuccucgggguuauuucaaaaugcgcacugggaaaagcucaauaaugaggucagaugcaccuauugauaccuguauuucugaaugcaucacuccaaauggaagcauucccaaugacaagcccuuucaaaacguaaacaagaucacauauggagcaugccccaaguauguuaagcaaaacacccugaaguuggcaacagggaugcggaauguaccagagaaacaaacuagaggccuauucggcgcaauagcagguuucauagaaaaugguugggagggaaugauagacgguugguacgguuucaggcaucaaaauucugagggcacaggacaagcagcagaucuuaaaagcacucaagcagccaucgaccaaaucaaugggaaauugaacaggguaaucgagaagacgaacgagaaauuccaucaaaucgaaaaggaauucucagaaguagaagggagaauucaggaccucgagaaauacguugaagacacuaaaauagaucucuggucuuacaaugcggagcuucuugucgcccuggagaaucaacauacaauugaccugacugacucggaaaugaacaggcuguuugaaaaaacaaggaggcaacugagggaaaaugcugaagacaugggcaaugguugcuucaaaauauaccacaaaugugacaacgcuugcauagagucaaucagaaaugggacuuaugaccaugauguauacagagacgaagcauuaaacaaccgguuucagaucaaagguguugaacugaagucuggauacaaagacuggauccuguggauuuccuuugccauaucaugcuuuuugcuuuguguuguuuugcugggguucaucaugugggccugccagagaggcaacauuaggugcaacauuugcauuuga

SEQ ID NO: 34407 - RNA, 1701 nt, Artificial Sequence; identical to SEQ ID NO: 34330
  derived and/or modified CDS sequence (wt) from hemagglutinin__InfluenzaA__ACI06145

SEQ ID NO: 34408 - RNA, 1701 nt, Artificial Sequence
  derived and/or modified CDS sequence (wt) from hemagglutinin__InfluenzaA__ACI06146
augaagaccaucauugcuuugagcuacauuuucugucuggcucucggccaagaccuuccaggaaaugacaacagcacagcaacgcugugccugggacaucaugcggugccaaacggaacacuagugaaaacaaucacagaugaucagauugaagugacuaaugcuacugagcuaguucagagcuccucaacggggaaaauaugcaacaauccucaucgaauccuugauggaauagacugcacacugauagaugcucuauugggggacccucauugugauguuuuucaaaaugagacaugggaccuuuucguugaacgcagcaaagcuuucagcaacuguuacccuuaugaugugccagauuaugccucccuuaggucacuaguugccucgucaggcacucuggaguuuaucacugaggguuucacuuggacuggggucacucagaaugggggaagcaaugcuugcaaaaggggaccugguagcgguuuuuucaguagacugaacugguugaccaaaucaggaagcacauauccagugcugaacgugacuaugccaaacaaugacaauuuugacaaacuauacauuugggggguucaccacccgagcacgaaccaagaacaaaccagccuguauguucaagcaucagggagagucacagucucuaccaggagaagccagcaaacuauaaucccgaauaucggguccagccccuggguaaggggucugucuaguagaauaagcaucuauuggacaauaguuaagccgggagacguacugguaauuaauaguaaugggaaccuaaucgcuccucgggguuauuucaaaaugcgcacugggaaaagcucaauaaugaggucagaugcaccuauugauaccuguauuucugaaugcaucacuccaaauggaagcauucccaaugacaagcccuuucaaaacguaaacaagaucacauauggagcaugccccaaguauguuaagcaaaacacccugaaguuggcaacagggaugcggaauguaccagagaaacaaacuagaggccuauucggcgcaauagcagguuucauagaaaaugguugggagggaaugauagacgguugguacgguuucaggcaucaaaauuaugagggcacaggacaagcagcagaucuuaaaagcacucaagcagccaucgaccaaaucaaugggaaauugaacaggguaaucgagaagacgaacgagaaauuccaucaaaucgaaaaggaauucucagaaguagaagggagaauucaggaccucgagaaauacguugaagacacuaaaauagaucucuggucuuacaaugcggagcuucuugucgcucuggagaaucaacauacaauugaccugacugacucggaaaugaacaagcuguuugaaaaaacaaggaggcaacugagggaaaaugcugaagacaugggcaaugguugcuucaaaauauaccacaaaugugacaacgcuugcauagagucaaucagaaaugggacuuaugaccaugauguauacagagacgaagcauuaaacaaccgguuucagaucaaagguguugaacugaagucuggauacaaagacuggauccuguggauuuccuuugccauaucaugcuuuuugcuuuguguuguuuugcugggguucaucaugugggccugccagagaggcaacauuaggugcaacauuugcauuuga

SEQ ID NO: 34409 - RNA, 1701 nt, Artificial Sequence; identical to SEQ ID NO: 34330
  derived and/or modified CDS sequence (wt) from hemagglutinin__InfluenzaA__ACI06147

SEQ ID NO: 34410 - RNA, 1701 nt, Artificial Sequence; identical to SEQ ID NO: 34340
  derived and/or modified CDS sequence (wt) from hemagglutinin__InfluenzaA__ACI06148

SEQ ID NO: 34411 - RNA, 1701 nt, Artificial Sequence
  derived and/or modified CDS sequence (wt) from hemagglutinin__InfluenzaA__ACI06149
augaagaccaucauugcuuugagcuacauuuucugucuggcucucggccaagaccuuccaggaaaugacaacagcacagcaacgcugugccugggacaucaugcggugccaaacggaacacuagugaaaacaaucacagaugaucagauugaagugacuaaugcuacugagcuaguucagagcuccucaacggggaaaauaugcaacaauccucaucgaauccuugauggaauagacugcacacugauagaugcucuauugggggacccucauugugauguuuuucaaaaugagacaugggaccuuuucguugaacgcagcaaagcuuucagcaacuguuacccuuaugaugugccagauuaugccucccuuaggucacuaguugccucgucaggcacucuggaguuuaucacugaggguuucacuuggacuggggucacucagaaugggggaagcaaugcuugcaaaaggggaccugguagcgguuuuuucaguagacugaacugguugaccaaaucaggaagcacauauccagugcugaacgugacuaugccaaacaaugacaauuuugacaaacuauacauuugggggguucaccacccgagcacgaaccaagaacaaaccagccuguauguucaagcaucagggagagucacagucucuaccagaagaagccggcaaacuauaaucccgaauaucggguccagacccuggguaaggggucugucuaguagaauaagcaucuauuggacaauaguuaagccgggagacguacugguaauuaauaguaaugggaaccuaaucgcuccucgggguuauuucaaaaugcgcacugggaaaagcucaauaaugaggucagaugcaccuauugauaccuguauuucugaaugcaucacuccaaauggaagcauucccaaugacaagcccuuucaaaacguaaacaagaucacauauggagcaugccccaaguauguuaagcaaaacacccugaaguuggcaacagggaugcggaauguaccagagaaacaaacuagaggccuauucggcgcaauagcagguuucauagaaaaugguugggagggaaugauagacgguugguacgguuucaggcaucaaaauucugagggcacaggacaagcagcagaucuuaaaagcacucaagcagccaucgaccaaaucaaugggaaauugaacaggguaaucgagaagacgaacgagaaauuccaucaaaucgaaaaggaauucucagaaguagaagggagaauucaggaccucgagaaauacguugaagacacuaaaauagaucucuggucuuacaaugcggagcuucuugucgcucuggagaaucaacauacaauugaccugacugacucggaaaugaacaagcuguuugaaaaaacaaggaggcaacugagggaaaaugcugaagacaugggcaaugguugcuucaaaauauaccacaaaugugacaacgcuugcauagagucaaucagaaaugggacuuaugaccaugauguauacagagacgaagcauuaaacaaccgguuucagaucaaagguguugaacugaagucuggauacaaagacuggauccuguggauuuccuuugccauaucaugcuuuuugcuuuguguuguuuugcugggguucaucaugugggccugccagagaggcaacauuaggugcaacauuugcauuuga

SEQ ID NO: 34412 - RNA, 1701 nt, Artificial Sequence
  derived and/or modified CDS sequence (wt) from hemagglutinin__InfluenzaA__ACI06151
augaagaccaucauugcuuugagcuacauuuucugucuggcucucggccaagaccuuccaggaaaugacaacagcacagcaacgcugugccugggacaucaugcggugccaaacggaacacuagugaaaacaaucacagaugaucagauugaagugacuaaugcuacugagcuaguucagagcuccucaacggggaaaauaugcaacaauccucaucgaauccuugauggaauagacugcacacugauagaugcucuauugggggacccucauugugauguuuuucaaaaugagacaugggaccuuuucguugaacgcagcaaagcuuucagcaacuguuacccuuaugaugugccagauuaugccucccuuaggucacuaguugccucgucaggcacucuggaguuuaucacugaggguuucacuuggacuggggucacucagaaugggggaagcaaugcuugcaaaaggggaccugguagcgguuuuuucaguagacugaacugguugaccaaaucaggaagcacauauccagugcugaacgugacuaugccaaacaaugacaauuuugacaaacuauacauuugggggguucaccacccgagcacgaaccaagaacaaaccagccuguauguucaagcaucagggagagucacagucucuaccaggagaagccagcaaacuauaaucccgaauaucgaguccagacccuggguaaggggucugucuaguagaauaagcaucuauuggacaauaguuaagccgggagacguacugguaauuaauaguaaugggaaccuaaucgcuccucgggguuauuucaaaaugcgcacugggaaaagcucaauaaugaggucagaugcaccuauugauaccuguauuucugaaugcaucacuccaaauggaagcauucccaaugacaagcccuuucaaaacguaaacaagaucacauauggagcaugccccaaguauguuaagcaaaacacccugaaguuggcaacagggaugcggaauguaccagagaaacaaacuagaggccuauucggcgcaauagcagguuucauagaaaaugguugggagggaaugauagacgguugguacgguuucaggcaucaaaauucugagggcacaggacaagcagcagaucuuaaaagcacucaagcagccaucgaccaaaucaaugggaaauugaacaggguaaucgagaagacgaacgagaaauuccaucaaaucgaaaaggaauucucagaaguagaagggagaauucaggaccucgagaaauacguugaagacacuaaaauagaucucuggucuuacaaugcggagcuucuugucgcucuggagaaucaacauacaauugaccugacugacucggaaaugaacaagcuguuugaaaaaacaaggaggcaacugagggaaaaugcugaagacaugggcaaugguugcuucaaaauauaccacaaaugugacaacgcuugcauagagucaaucagaaaugggacuuaugaccaugauguauacagagacgaagcauuaaacaaccgguuucagaucaaagguguugaacugaagucuggauacaaagacuggauccuguggauuuccuuugccauaucaugcuuuuugcuuuguguuguuuugcugggguucaucaugugggccugccagagaggcaacauuaggugcaacauuugcauuuga

SEQ ID NO: 34413 - RNA, 1701 nt, Artificial Sequence; identical to SEQ ID NO: 34341
  derived and/or modified CDS sequence (wt) from hemagglutinin__InfluenzaA__ACI06152

SEQ ID NO: 34414 - RNA, 1701 nt, Artificial Sequence
  derived and/or modified CDS sequence (wt) from hemagglutinin__InfluenzaA__ACI06153
augaagaccaucauugcuuugagcuacauuuucugucuggcucucggccaagaccuuccaggaaaugacaacagcacagcaacgcugugccugggacaucaugcggugccaaacggaacacuagugaaaacaaucacagaugaucagauugaagugacuaaugcuacugagcuaguucagagcuccucaacggggaaaauaugcaacaauccucaucgaauccuugauggaauagacugcacacugauagaugcucuauugggggacccucauugugauguuuuucaaaaugagacaugggaccuuuucguugaacgcagcaaagcuuucagcaacuguuacccuuaugaugugccagauuaugccucccuuaggucacuaguugccucgucaggcacucuggaguuuaucacugaggguuucacuuggacuggggucacucagaaugggggaagcaaugcuugcaaaaggggaccugguagcgguuuuuucaguagacugaacugguugaccaaaucaggaagcacauauccagugcugaacgugacuaugccaaacaaugacaauuuugacaaacuauacauuugggggguucaccacccgagcacgaaccaagaacaaaccagccuguauguucaagcaucagggagagucacagucucuaccaggagaagccagcaaacuauaaucccgaauaucggguccagacccuggguaaggggucugucuaguagaauaagcaucuauuggacaauaguuaagccgggagacgaacugguaauuaauaguaaugggaaccuaaucgcuccucgggguuauuucaaaaugcgcacugggaaaagcucaauaaugaggucagaugcaccuauugauaccuguauuucugaaugcaucacuccaaauggaagcauucccaaugacaagcccuuucaaaacguaaacaagaucacauauggagcaugccccaaguauguuaagcaaaacacccugaaguuggcaacagggaugcggaauguaccagagaaacaaacuagaggccuauucggcgcaauagcagguuucauagaaaaugguugggagggaaugauagacgguugguacgguuucaggcaucaaaauucugagggcacaggacaagcagcagaucuuaaaagcacucaagcagccaucgaccaaaucaaugggaaauugaacaggguaaucgagaagacgaacgagaaauuccaucaaaucgaaaaggaauucucagaaguagaagggagaauucaggaccucgagaaauacguugaagacacuaaaauagaucucuggucuuacaaugcggagcuucuugucgcucuggagaaucaacauacaauugaccugacugacucggaaaugaacaagcuguuugaaaaaacaaggaggcaacugagggaaaaugcugaagacaugggcaaugguugcuucaaaauauaccacaaaugugacaacgcuugcauagagucaaucagaaaugggacuuaugaccaugauguauacagagacgaagcauuaaacaaccgguuucagaucaaagguguugaacugaagucuggauacaaagacuggauccuguggauuuccuuugccauaucaugcuuuuugcuuuguguuguuuugcugggguucaucaugugggccugccagagaggcaacauuaggugcaacauuugcauuuga

SEQ ID NO: 34415 - RNA, 1701 nt, Artificial Sequence
  derived and/or modified CDS sequence (wt) from hemagglutinin__InfluenzaA__ACI06155
augaagaccaucauugcuuugagcuacauuuucugucuggcucucggccaagaccuuccaggaaaugacaacagcacagcaacgcugugccugggacaucaugcggugccaaacggaacacuagugaaaacaaucacagaugaucagauugaagugacuaaugcuacugagcuaguucagagcuccucaacggggaaaauaugcaacaauccucaucgaauccuugauggaauagacugcacacugauagaugcucuauugggggacccucauugugauguuuuucaaaaugagacaugggaccuuuucguugaacgcagcaaagcuuucagcaacuguuacccuuaugaugugccagauuaugccucccuuaggucacuaguugccucgucaggcacucuggaguuuaucacugaggguuucacuuggacuggggucacucagaaugggggaagcaaugcuugcaaaaggggaccugguagcgguuuuuucaguagacugaacugguugaccaaaucaggaagcacauauccagugcugaacgugacuaugccaaacaaugacaauuuugacaaacuauacauuugggggguucaccacccgagcacgaaccaagaacaaaccagccuguauguucaagcaucagggagagucacagucucuaccagaagaagccagcaaacuauaaucccgaauaucgaguccagacccuggguaaggggucugucuaguagaauaagcaucuauuggacaauaguuaagccgggagacguacugguaauuaauaguaaugggaaccuaaucgcuccucgggguuauuucaaaaugcgcacugggaaaagcucaauagugaggucagaugcaccuauugauaccuguauuucugaaugcaucacuccaaauggaagcauucccaaugacaagcccuuucaaaacguaaacaagaucacauauggagcaugccccaaguauguuaagcaaaacacccugaaguuggcaacagggaugcggaauguaccagagaaacaaacuagaggccuauucggcgcaauagcagguuucauagaaaaugguugggagggaaugauagacgguugguacgguuucaggcaucaaaauucugagggcacaggacaagcagcagaucuuaaaagcacucaagcagccaucgaccaaaucaaugggaaauugaacaggguaaucgagaagacgaacgagaaauuccaucaaaucgaaaaggaauucucagaaguagaagggagaauucaggaccucgagaaauacguugaagacacuaaaauagaucucuggucuuacaaugcggagcuucuugucgcucuggagaaucaacauacaauugaccugacugacucggaaaugaacaagcuguuugaaaaaacaaggaggcaacugagggaaaaugcugaagacaugggcaaugguugcuucaaaauauaccacaaaugugacaacgcuugcauagagucaaucagaaaugggacuuaugaccaugauguauacagagacgaagcauuaaacaaccgguuucagaucaaagguguugaacugaagucuggauacaaagacuggauccuguggauuuccuuugccauaucaugcuuuuugcuuuguguuguuuugcugggguucaucaugugggccugccagagaggcaacauuaggugcaacauuugcauuuga

SEQ ID NO: 34416 - RNA, 1701 nt, Artificial Sequence
  derived and/or modified CDS sequence (wt) from hemagglutinin__InfluenzaA__ACI06156
augaagaccaucauugcuuugagcuacauuuucugucuggcucucggccaagaccuuccaggaaaugacaacagcacagcaacgcugugccugggacaucaugcggugccaaacggaacacuagugaaaacaaucacagaugaucagauugaagugacuaaugcuacugagcuaguucagagcuccucaacggggaaaauaugcaacaauccucaucgaauccuugauggaauagacugcacacugauagaugcucuauugggggacccucauugugauguuuuucaaaaugagacaugggaccuuuucguugaacgcagcaaagcuuucagcaacuguuacccuuaugaugugccagauuaugccucccuuaggucacuaguugccucgucaggcacucuggaguuuaucacugaggguuucacuuggacuggggucacucagaaugggggaagcaaugcuugcaaaaggggaccugguagcgguuuuuucaguagacugaacugguugaccaaaucaggaagcacauauccagugcugaacgugacuaugccaaacaaugacaauuuugacaaacuauacauuugggggguucaccacccgagcacgaaccaagaacaaaccagccuguauguucaagcaucagggagagucacagucucuaccagaagaagccagcaaacuauaaucccgaauaucgaguccagacccuggguaaggggucugucuaguagaauaagcaucuauuggacaauaguuaagccgggagacguacugguaauuaauaguaaugggaaccuaaucgcuccucgggguuauuucaaaaugcgcacugggaaaagcucaauaaugaggucagaugcaccuauugauaccuguauuucugaaugcaucacuccaaauggaagcauucccaaugacaagcccuuucaaaacguaaacaagaucacauauggagcaugccccaaguauguuaagcaaaacacccugaaguuggcaacagggaugcggaauguaccagagaaacaaacuagaggccuauucggcgcaauagcagguuucauagaaaaugguugggagggaaugauagacgguugguacgguuucaggcaucaaaauucugagggcacaggacaagcagcagaucuuaaaagcacucaagcagccaucgaccaaaucaaugggaaauugaacaggguaaucgagaagacgaacgagaaauuccaucaaaucgaaaaggaauucucagaaguagaagggagaauucaggaccucgagaaauacguugaagacacuaaaauagaucucuggucuuacaaugcggagcuucuugucgcucuggagaaucaacauacaauugaccugacugacucggaaaugaacaagcuguuugaaaaaacaaggaggcaacugagggaaaaugcugaagacaugggcaaugguugcuucaaaauauaccacaaaugugacaacgcuugcauagagucaaucagaaaugggacuuaugaccaugauguauacagagacgaagcauuaaacaaccgguuucagaucaaagguguugaacugaagucuggauacaaagacuggauccuguggauuuccuuugccauaucaugcuuuuugcuuuguguuguuuugcugggguuuaucaugugggccugccagagaggcaacauuaggugcaacauuugcauuuga

SEQ ID NO: 34417 - RNA, 1701 nt, Artificial Sequence
  derived and/or modified CDS sequence (wt) from hemagglutinin__InfluenzaA__ACI06157
augaagaccaucauugcuuugagcuacauuuucugucuggcucucggccaagaccuuccaggaaaugacaacagcacagcaacgcugugccugggacaucaugcggugccaaacggaacacuagugaaaacaaucacagaugaucagauugaagugacuaaugcuacugagcuaguucagagcuccucaacggggaaaauaugcaacaauccucaucgaauccuugauggaauagacugcacacugauagaugcucuauugggggacccucauugugauguuuuucaaaaugagacaugggaccuuuucguugaacgcagcaaagcuuucagcaacuguuacccuuaugaugugccagauuaugccucccuuaggucacuaguugccucgucaggcacucuggaguuuaucacugaggguuucacuuggacuggggucacucagaaugggggaagcaaugcuugcaaaaggggaccugguagcgguuuuuucaguagacugaacugguugaccaaaucaggaagcacauauccagugcugaacgugacuaugccaaacaaugacaauuuugacaaacuauacauuugggggguucaccacccgagcacgaaccaagaacaaaccagccuguauguucaagcaucagggagagucacagucucuaccagaagaagccagcaaacuauaaucccgaauaucgaguccagacccuggguaaggggucugucuaguagaauaagcaucuauuggacaauaguuaagccgggagacguacugguaauuaauaguaaugggaaccuaaucgcuccucgggguuauuucaaaaugcgcacugggaaaagcucaauaaugaggucagaugcaccuauugauaccuguauuucugaaugcaucacuccaaauggaagcauucccaaugacaagcccuuucaaaacguaaacaagaucacauauggagcaugccccaaguauguuaagcaaaacacccugaaguuggcaacagggaugcggaauguaccagagaaacaaacuagaggccuauucggcgcaauagcagguuucauagaaaaugguugggagggaaugauagacgguugguacgguuucaggcaucaaaauucugagggcacaggacaagcagcagaucuuaaaagcacucaagcagccaucgaccaaaucaaugggaaauugaacaggguaaucgagaagacgaacgagaaauuccaucaaaucgaaaaggaauucucagaaguagaagggagaauucaggaccucgagaaauacguugaagacacuaaaauagaucucuggucuuacaaugcggagcuucuugucgcucuggagaaucaacauacaauugaccugacugacucggaaaugaacaagcuguuugaaaaaacaaggaggcaacugagggaaaaugcugaagacaugggcaaugguugcuucaaaauauaccacaaaugugacaacgcuugcauagagucaaucagaaaugggacuuaugaccaugauguauacagagacgaagcauuaaacaaccgguuucagaucaaagguguugaacugaagucuggauacaaagacuggauccuguggauuuccuuugccauaucaugcuuuuugcuuuguguuguuuugcugggguucaucaugugggccugccagagaggcaacauuaggugcaacauuugcauuuga

SEQ ID NO: 34418 - RNA, 1701 nt, Artificial Sequence; identical to SEQ ID NO: 34358
  derived and/or modified CDS sequence (wt) from hemagglutinin__InfluenzaA__ACI06158

SEQ ID NO: 34419 - RNA, 1701 nt, Artificial Sequence
  derived and/or modified CDS sequence (wt) from hemagglutinin__InfluenzaA__ACI06159
augaagaccaucauugcuuugagcuacauuuucugucuggcucucggccaagaucuuccaggaaaugacaacagcacagcaacgcugugccugggacaucaugcggugccaaacggaacacuagugaaaacaaucacagaugaucagauugaagugacuaaugcuacugagcuaguucagagcuccucaacggggaaaauaugcaacaauccucaucgaauccuugauggaauagacugcacacugauagaugcucuauugggggacccucauugugauguuuuucaaaaugagacaugggaccuuuucguugaacgcagcaaagcuuucagcaacuguuacccuuaugaugugccagauuaugccucccuuaggucacuaguugccucgucaggcacucuggaguuuaucacugaggguuucacuuggacuggggucacucagaaugggggaagcaaugcuugcaaaaggggaccugguagcgguuuuuucaguagacugaacugguugaccaaaucaggaagcacauauccagugcugaacgugacuaugccaaacaaugacaauuuugacaaacuauacauuugggggguucaccacccgagcacgaaccaagaacaaaccagccuguauguucaagcaucagggagagucacagucucuaccagaagaagccagcaaacuauaaucccgaauaucgaguccagacccuggguaaggggucugucuaguagaauaagcaucuauuggacaauaguuaagccgggagacguacugguaauuaauaguaaugggaaccuaaucgcuccucgggguuauuucaaaaugcgcacugggaaaagcucaauaaugaggucagaugcaccuauugauaccuguauuucugaaugcaucacuccaaauggaagcauucccaaugacaagcccuuucaaaacguaaacaagaucacauauggagcaugccccaaguauguuaagcaaaacacccugaaguuggcaacagggaugcggaauguaccagagaaacaaacuagaggccuauucggcgcaauagcagguuucauagaaaaugguugggagggaaugauagacgguugguacgguuucaggcaucaaaauucugagggcacaggacaagcagcagaucuuaaaagcacucaagcagccaucgaccaaaucaaugggaaauugaacaggguaaucgagaagacgaacgagaaauuccaucaaaucgaaaaggaauucucagaaguagaagggagaauucaggaccucgagaaauacguugaagacacuaaaauagaucucuggucuuacaaugcggagcuucuugucgcucuggagaaucaacauacaauugaccugacugacucggaaaugaacaagcuguuugaaaaaacaaggaggcaacugagggaaaaugcugaagacaugggcaaugguugcuucaaaauauaccacaaaugugacaacgcuugcauagagucaaucagaaaugggacuuaugaccaugauguauacagagacgaagcauuaaacaaccgguuucagaucaaagguguugaacugaagucuggauacaaagacuggauccuguggauuuccuuugccauaucaugcuuuuugcuuuguguuguuuugcugggguucaucaugugggccugccagagaggcaacauuaggugcaacauuugcauuuga

SEQ ID NO: 34420 - RNA, 1701 nt, Artificial Sequence; identical to SEQ ID NO: 34359
  derived and/or modified CDS sequence (wt) from hemagglutinin__InfluenzaA__ACI06160

SEQ ID NO: 34421 - RNA, 1701 nt, Artificial Sequence
  derived and/or modified CDS sequence (wt) from hemagglutinin__InfluenzaA__ACI06161
augaagaccaucauugcuuugagcuacauuuucugucuggcucucggccaagaccuuccaggaaaugacaacagcacagcaacgcugugccugggacaucaugcggugccaaacggaacacuagugaaaacaaucacagaugaucagauugaagugacuaaugcuacugagcuaguucagagcuccucaacggggaaaauaugcaacaauccucaucgaauccuugauggaauagacugcacacugauagaugcucuauugggggacccucauugugauguuuuucaaaaugagacaugggaccuuuucguugaacgcagcaaagcuuucagcaacuguuacccuuaugaugugccagauuaugccucccuuaggucacuaguugccucgucaggcacucuggaguuuaucacugaggguuucacuuggacuggggucacucagaaugggggaagcaaugcuugcaaaaggggaccugguagcgguuuuuucaguagacugaacugguugaccaaaucaggaagcacauauccagugcugaacgugacuaugccaaacaaugacaauuuugacaaacuauacauuugggggguucaccacccgagcacgaaccaagaacaaaccagccuguauguucaagcaucagggagagucacagucucuaccaggagaagccagcaaacuauaaucccgaauaucgaguccagacccuggguaaggggucugucuaguagaauaagcaucuauuggacaauaguuaagccgggagacguacugguaauuaauaguaaugggaaccuaaucgcuccucgggguuauuucaaaaugcgcacugggaaaagcucaauaaugaggucagaugcaccuauugauaccuguauuucugaaugcaucacuccaaauggaagcauucccaaugacaagcccuuucaaaacguaaacaagaucacauauggagcaugccccaaguauguuaagcaaaacacccugaaguuggcaacagggaugcggaauguaccagagaaacaaacuagaggccuauucggcgcaauagcagguuucauagaaaaugguugggagggaaugauagacgguugguacgguuucaggcaucaaaauucugagggcacaggacaagcagcagaucuuaaaagcacucaagcagccaucgaccaaaucaaugggaaauugaacaggguaaucgagaagacgaacgagaaauuccaucaaaucgaaaaggaauucucagaaguagaagggagaauucaggaccucgagaaauacguugaagacacuaaaauagaucucuggucuuacaaugcggagcuucuugucgcucuggagaaucaacauacaauugaccugacugacucggaaaugaacaagcuguuugaaaaaacaaggaggcaacugagggaaaaugcugaagacaugggcaaugguugcuucaaaauauaccacaaaugugacaacgcuugcauagagucaaucagaaaagggacuuaugaccaugauguauacagagacgaagcauuaaacaaccgguuucagaucaaagguguugaacugaagucuggauacaaagacuggauccuguggauuuccuuugccauaucaugcuuuuugcuuuguguuguuuugcugggguucaucaugugggccugccagagaggcaacauuaggugcaacauuugcauuuga

SEQ ID NO: 34422 - RNA, 1701 nt, Artificial Sequence
  derived and/or modified CDS sequence (wt) from hemagglutinin__InfluenzaA__ACI06162
augaagaccaucauugcuuugagcuacauuuucugucuggcucucggccaagaccuuccaggaaaugacaacagcacagcaacgcugugccugggacaucaugcggugccaaacggaacacuagugaaaacaaucacagaugaucagauugaagugacuaaugcuacugagcuaguucagagcuccucaacggggaaaauaugcaacaauccucaucgaauccuugauggaauagacugcacacugauagaugcucuauugggggacccucauugugauguuuuucaaaaugagacaugggaccuuuucguugaacgcagcaaagcuuucagcaacuguuacccuuaugaugugccagauuaugccucccuuaggucacuaguugccucgucaggcacucuggaguuuaucacugaggguuucacuuggacuggggucacucagaaugggggaagcaaugcuugcaaaaggggaccugguagcgguuuuuucaguagacugaacugguugaccaaaucaggaagcacauauccagugcugaacgugacuaugccaaacaaugacaauuuugacaaacuauacauuugggggguucaccacccgagcacgaaccaagaacaaaccagccuguauguucaagcaucagggagagucacagucucuaccaggagaagccagcaaacuauaaucccgaauaucgaguccagacccuggguaaggggucugucuaguagaauaagcaucuauuggacaauaguuaauccgggagacguacugguaauuaauaguaaugggaaccuaaucgcuccucgggguuauuucaaaaugcgcacugggaaaagcucaauaaugaggucagaugcaccuauugauaccuguauuucugaaugcaucacuccaaauggaagcauucccaaugacaagcccuuucaaaacguaaacaagaucacauauggagcaugccccaaguauguuaagcaaaacacccugaaguuggcaacagggaugcggaauguaccagagaaacaaacuagaggccuauucggcgcaauagcagguuucauagaaaaugguugggagggaaugauagacgguugguacgguuucaggcaucaaaauucugagggcacaggacaagcagcagaucuuaaaagcacucaagcagccaucgaccaaaucaaugggaaauugaacaggguaaucgagaagacgaacgagaaauuccaucaaaucgaaaaggaauucucagaaguagaagggagaauucaggaccucgagaaauacguugaagacacuaaaauagaucucuggucuuacaaugcggagcuucuugucgcucuggagaaucaacauacaauugaccugacugacucggaaaugaacaagcuguuugaaaaaacaaggaggcaacugagggaaaaugcugaagacaugggcaaugguugcuucaaaauauaccacaaaugugacaacgcuugcauagagucaaucagaaaugggacuuaugaccaugauguauacagagacgaagcauuaaacaaccgguuucagaucaaagguguugaacugaagucuggauacaaagacuggauccuguggauuuccuuugccauaucaugcuuuuugcuuuguguuguuuugcugggguucaucaugugggccugccagagaggcaacauuaggugcaacauuugcauuuga

SEQ ID NO: 34423 - RNA, 1701 nt, Artificial Sequence
  derived and/or modified CDS sequence (wt) from hemagglutinin__InfluenzaA__ACI06163
augaagaccaucauugcuuugagcuacauuuucugucuggcucucggccaagaccuuccaggaaaugacaacagcacagcaacgcugugccugggacaucaugcggugccaaacggaacacuagugaaaacaaucacagaugaucagauugaagugacuaaugcuacugagcuaguucagagcuccucaacggggaaaauaugcaacaauccucaucgaauccuugauggaauagacugcacacugauagaugcucuauugggggacccucauugugauguuuuucaaaaugagacaugggaccuuuucguugaacgcagcaaagcuuucagcaacuguuacccuuaugaugugccagauuaugccucccuuaggucacuaguugccucgucaggcacucuggaguuuaucacugaggguuucacuuggacuggggucacucagaaugggggaagcaaugcuugcaaaaggggaccugguagcgguuuuuucaguagacugaacugguugaccaaaucaggaagcacauauccagugcugaacgugacuaugccaaacaaugacaauuuugacaaacuauacauuugggggguucaccacccgagcacgaaccaagaacaaaccagccuguauguucaagcaucagggagagucacagucucuaccaggagaagccagcaaacuauaaucccgaauaucggguccagacccuggguaaggggucugucuaguagaauaagcaucuauuggacaauaguuaagccgggagacguacugguaauuaauaguaaugggaaccuaaucgcuccucgggguuauuucaaaaugcgcacugggaaaagcucaauaaugaggucagaugcaccuauugauaccuguauuucugaaugcaucacuccaaauggaagcauucccaaugacaagcccuuucaaaacguaaacaagaucacauauggagcaugccccaaguauguuaagcaaaacacccugaaguuggcaacagggaugcggaauguaccagagaaacaaacuagaggccuauucggcgcaauagcagguuucauagaaaaugguugggagggaaugauagacgguugguacgguuucaggcaucaaaauucugagggcacaggacaagcagcagaucuuaaaagcacucaagcagccaucgaccaaaucaaugggaaauugaacaggguaaucgagaagacgaacgagaaauuccaucaaaucgaaaaggaauucucagaaguagaagggagaauucaggaccucgagaaauacguugaagacacuaaaauagaucucuggucuuacaaugcggagcuucuugucgcucuggagaaucaacauacaauugaccugacugacucggaaaugaacaagcuguuugaaaaaacaaggaggcaacugagggaaaaugcugaagacaugggcaaugguugcuucaaaauauaccacaaaugugacaacgcuugcauagagucaaucagaaaagggacuuaugaccaugauguauacagagacgaagcauuaaacaaccgguuucagaucaaagguguugaacugaagucuggauacaaagacuggauccuguggauuuccuuugccauaucaugcuuuuugcuuuguguuguuuugcugggguucaucaugugggccugccagagaggcaacauuaggugcaacauuugcauuuga

SEQ ID NO: 34424 - RNA, 1701 nt, Artificial Sequence
  derived and/or modified CDS sequence (wt) from hemagglutinin__InfluenzaA__ACI06164
augaagaccaucauugcuuugagcuacauuuucugucuggcucucggccaagaccuuccaggaaaugacaacagcacagcaacgcugugccugggacaucaugcggugccaaacggaacacuagugaaaacaaucacagaugaucagauugaagugacuaaugcuacugagcuaguucagagcuccucaacggggaaaauaugcaacaauccucaucgaauccuugauggaauagacugcacacugauagaugcucuauugggggacccucauugugauguuuuucaaaaugagacaugggaccuuuucguugaacgcagcaaagcuuucagcaacuguuacccuuaugaugugccagauuaugccucccuuaggucacuaguugccucgucaggcacucuggaguuuaucacugaggguuucacuuggacuggggucacucagaaugggggaagcaaugcuugcaaaaggggaccugguagcgguuuuuucaguagacugaacugguugaccaaaucaggaagcacauauccagugcugaacgugacuaugccaaacaaugacaauuuugacaaacuauacauuugggggguucaccacccgagcacgaaccaagaacaaaccagccuguauguucaagcaucagggagagucacagucucuaccagaagaagccagcaaacuauaaucccgaauaucggguccagacccuggguaaggggucugucuaguagaauaaacaucuauuggacaauaguuaagccgggagacguacugguaauuaauaguaaugggaaccuaaucgcuccucgggguuauuucaaaaugcgcaaugggaaaagcucaauaaugaggucagaugcaccuauugauaccuguauuucugaaugcaucacuccaaauggaagcauucccaaugacaagcccuuucaaaacguaaacaagaucacauauggagcaugccccaaguauguuaagcaaaacacccugaaguuggcaacagggaugcggaauguaccagagaaacaaacuagaggccuauucggcgcaauagcagguuucauagaaaaugguugggagggaaugauagacgguugguacgguuucaggcaucaaaauucugagggcacaggacaagcagcagaucuuaaaagcacucaagcagccaucgaccaaaucaaugggaaauugaacaggguaaucgagaagacgaacgagaaauuccaucaaaucgaaaaggaauucucagaaguagaagggagaauucaggaccucgagaaauacguugaagacacuaaaauagaucucuggucuuacaaugcggagcuucuugucgcucuggagaaucaacauacaauugaccugacugacucggaaaugaacaagcuguuugaaaaaacaaggaggcaacugagggaaaaugcugaagacaugggcaaugguugcuucaaaauauaccacaaaugugacaacgcuugcauagagucaaucagaaaugggacuuaugaccaugauguauacagagacgaagcauuaaacaaccgguuucagaucaaagguguugaacugaagucuggauacaaagacuggauccuguggauuuccuuugccauaucaugcuuuuugcuuuguguuguuuugcugggguucaucaugugggccugccagagaggcaacauuaggugcaacauuugcauuuga

SEQ ID NO: 34425 - RNA, 1701 nt, Artificial Sequence
  derived and/or modified CDS sequence (wt) from hemagglutinin__InfluenzaA__ACI06165
augaagaccaucauugcuuugagcuacauuuucugucuggcucucggccaagaccuuccaggaaaugacaacagcacagcaacgcugugccugggacaucaugcggugccaaacggaacacuagugaaaacaaucacagaugaucagauugaagugacuaaugcuacugagcuaguucagagcuccucaacggggaaaauaugcaacaauccucaucgaauccuugauggaauagacugcacacugauagaugcucuauugggggacccucauugugauguuuuucaaaaugagacaugggaccuuuucguugaacgcagcaaagcuuucagcaacuguuacccuuaugaugugccagauuaugccucccuuaggucacuaguugccucgucaggcacucuggaguuuaucacugaggguuucacuuggacuggggucacucagaaugggggaagcaaugcuugcaaaaggggaccugguagcgguuuuuucaguagacugaacugguugaccaaaucaggaagcacauauccagugcugaacgugacuaugccaaacaaugacaauuuugacaaacuauacauuugggggguucaccacccgagcacgaaccaagaacaaaccagccuguauguucaagcaucagggagagucacagucucuaccagaagaagccagcaaacuauaaucccgaauaucggguccagacccuggguaaggggucugucuaguagaauaagcaucuauuggacaauaguuaagccgggagacguacugguaauuaauaguaaugggaaccuaaucgcuccucgggguuauuucaaaaugcgcaaugggaaaagcucaauaaugaggucagaugcaccuauugauaccuguauuucugaaugcaucacuccaaauggaagcauucccaaugacaagcccuuucaaaacguaaacaagaucacauauggagcaugccccaaguauguuaagcaaaacacccugaaguuggcaacagggaugcggaauguaccagagaaacaaacuagaggccuauucggcgcaauagcagguuucauagaaaaugguugggagggaaugauagacgguugguacgguuucaggcaucaaaauucugagggcacaggacaagcagcagaucuuaaaagcacucaagcagccaucgaccaaaucaaugggaaauugaacaggguaaucgagaagacgaacgagaaauuccaucaaaucgaaaaggaauucucagaaguagaagggagaauucaggaccucgagaaauacguugaagacacuaaaauagaucucuggucuuacaaugcggagcuucuugucgcucuggagaaucaacauacaauugaccugacugacucggaaaugaacaagcuguuugaaaaaacaaggaggcaacugagggaaaaugcugaagacaugggcaaugguugcuucaaaauauaccacaaaugugacaacgcuugcauagagucaaucagaaaugggacuuaugaccaugauguauacagagacgaagcauuaaacaaccgguuucagaucaaagguguugaacugaagucuggauacaaagacuggauccuguggauuuccuuugccauaucaugcuuuuugcuuuguguuguuuugcugggguucaucaugugggccugccagagaggcaacauuaggugcaacauuugcauuuga

SEQ ID NO: 34426 - RNA, 1701 nt, Artificial Sequence
  derived and/or modified CDS sequence (wt) from hemagglutinin__InfluenzaA__ACI06166
augaagaccaucauugcuuugagcuacauuuucugucuggcucucggccaagaccuuccaggaaaugacaacagcacagcaacgcugugccugggacaucaugcggugccaaacggaacacuagugaaaacaaucacagaugaucagauugaagugacuaaugcuacugagcuaguucagagcuccucaacggggaaaauaugcaacaauccucaucgaauccuugauggaauagacugcacacugauagaugcucuauugggggacccucauugugauguuuuucaaaaugagacaugggaccuuuucguugaacgcagcaaagcuuucagcaacuguuacccuuaugaugugccagauuaugccucccuuaggucacuaguugccucgucaggcacucuggaguuuaucacugaggguuucacuuggacuggggucacucagaaugggggaagcaaugcuugcaaaaggggaccugguagcgguuuuuucaguagacugaacugguugaccaaaucaggaagcacauauccagugcugaacgugacuaugccaaacaaugacaauuuugacaaacuauacauuugggggguucaccacccgagcacgaaccaagaacaaaccagccuguauguucaagcaucagggagagucacagucucuaccagaagaagccagcaaacuauaaucccgaauaucggguccagacccuggauaaggggucugucuaguagaauaaacaucuauuggacaauaguuaagccgggagacguacugguaauuaauaguaaugggaaccuaaucgcuccucgggguuauuucaaaaugcgcaaugggaaaagcucaauaaugaggucagaugcaccuauugauaccuguauuucugaaugcaucacuccaaauggaagcauucccaaugacaagcccuuucaaaacguaaacaagaucacauauggagcaugccccaaguauguuaagcaaaacacccugaaguuggcaacagggaugcggaauguaccagagaaacaaacuagaggccuauucggcgcaauagcagguuucauagaaaaugguugggagggaaugauagacgguugguacgguuucaggcaucaaaauucugagggcacaggacaagcagcagaucuuaaaagcacucaagcagccaucgaccaaaucaaugggaaauugaacaggguaaucgagaagacgaacgagaaauuccaucaaaucgaaaaggaauucucagaaguagaagggagaauucaggaccucgagaaauacguugaagacacuaaaauagaucucuggucuuacaaugcggagcuucuugucgcucuggagaaucaacauacaauugaccugacugacucggaaaugaacaagcuguuugaaaaaacaaggaggcaacugagggaaaaugcugaagacaugggcaaugguugcuucaaaauauaccacaaaugugacaacgcuugcauagagucaaucagaaaugggacuuaugaccaugauguauacagagacgaagcauuaaacaaccgguuucagaucaaagguguugaacugaagucuggauacaaagacuggauccuguggauuuccuuugccauaucaugcuuuuugcuuuguguuguuuugcugggguucaucaugugggccugccagagaggcaacauuaggugcaacauuugcauuuga

SEQ ID NO: 34427 - RNA, 1701 nt, Artificial Sequence; identical to SEQ ID NO: 34411
  derived and/or modified CDS sequence (wt) from hemagglutinin__InfluenzaA__ACI06167

SEQ ID NO: 34428 - RNA, 1701 nt, Artificial Sequence
  derived and/or modified CDS sequence (wt) from hemagglutinin__InfluenzaA__ACI06168
augaagaccaucauugcuuugagcuacauuuucugucuggcucucggccaagaccuuccaggaaaugacaacagcacagcaacgcugugccugggacaucaugcggugccaaacggaacacuagugaaaacaaucacagaugaucagauugaagugacuaaugcuacugagcuaguucagagcuccucaacggggaaaauaugcaacaauccucaucgaauccuugauggaauagacugcacacugauagaugcucuauugggggacccucauugugauguuuuucaaaaugagacaugggaccuuuucguugaacgcagcaaagcuuucagcaacuguuacccuuaugaugugccagauuaugccucccuuaggucacuaguugccucgucaggcacucuggaguuuaucacugaggguuucacuuggacuggggucacucagaaugggggaagcaaugcuugcaaaaggggaccugguagcgguuuuuucaguagacugaacugguugaccaaaucaggaagcacauauccagugcugaacgugacuaugccaaacaaugacaauuuugacaaacuauacauuugggggguucaccacccgagcacgaaccaagaacaaaccagccuguauguucaagcaucagggagagucacagucucuaccaggagaagccagcaaacuauaaucccgaauaucggguccagacccuggguaaggggucugucuaguagaauaagcaucuauuggacaauaguuaagccgggagacguacugguaauuaauaguaaugggaaccuaaucgcuccucgggguuauuucaaaaugcgcacugggaaaagcucaauaaugaggucagaugcaccuauugauaccuguauuucugaaugcaucacuccaaauggaagcauucccaaugacaagcccuuucaaaacguaaacaagaucacauauggagcaugccccaaguauguuaagcaaaacacccugaaguuggcaacagggaugcggaauguaccagagaaacaaacuagaggccuauucggcgcaauagcagguuucauagaaaaugguugggagggaaugauagacgguugguacgguuucaggcaucaaaauucugagggcacaggacaagcagcagaucuuaaaagcacucaagcagccaucgaccaaaucaaugggaaauugaacaggguaaucgagaagacgaacgagaaauuccaucaaaucgaaaaggaauucucagaaguagaagggagaauucaggaccucgagaaauacguugaagacacuaaaauagaucucuggucuuacaaugcggagcuucuugucgcucuggagaaucaacauacaauugaccugacugacucggaaaugaacaagcuguuugaaaaaacaaggaagcaacugagggaaaaugcugaagacaugggcaaugguugcuucaaaauauaccacaaaugugacaacgcuugcauagagucaaucagaaaugggacuuaugaccaugauguauacagagacgaagcauuaaacaaccgguuucagaucaaagguguugaacugaagucuggauacaaagacuggauccuguggauuuccuuugccauaucaugcuuuuugcuuuguguuguuuugcugggguucaucaugugggccugccagagaggcaacauuaggugcaacauuugcauuuga

SEQ ID NO: 34429 - RNA, 1701 nt, Artificial Sequence; identical to SEQ ID NO: 34330
  derived and/or modified CDS sequence (wt) from hemagglutinin__InfluenzaA__ACI06169

SEQ ID NO: 34430 - RNA, 1701 nt, Artificial Sequence; identical to SEQ ID NO: 34347
  derived and/or modified CDS sequence (wt) from hemagglutinin__InfluenzaA__ACI06171

SEQ ID NO: 34431 - RNA, 1701 nt, Artificial Sequence
  derived and/or modified CDS sequence (wt) from hemagglutinin__InfluenzaA__ACI06172
augaagaccaucauugcuuugagcuacauuuucugucuggcucucggccaagaccuuccaggaaaugacaacagcacagcaacgcugugccugggacaucaugcggugccaaacggaacacuagugaaaacaaucacagaugaucagauugaagugacuaaugcuacugagcuaguucagagcuccucaacggggaaaauaugcaacaauccucaucgaauccuugauggaauagacugcacacugauagaugcucuauugggggacccucauugugauguuuuucaaaaugagacaugggaccuuuucguugaacgcagcaaagcuuucagcaacuguuacccuuaugaugugccagauuaugccucccuuaggucacuaguugccucgucaggcacucuggaguuuaucacugaggauuucacuuggacuggggucacucagaaugggggaagcaaugcuugcaaaaggggaccugguagcgguuuuuucaguagacugaacugguugaccaaaucaggaagcacauauccagugcuggacgugacuaugccaaacaaugacaauuuugacaaacuauacauuugggggguucaccacccgagcacgaaccaagaacaaaccagccuguauguucaagcaucagggagagucacagucucuaccaggagaagccagcaaacuauaaucccgaauaucggguccagacccuggguaaggggucugucuaguagaauaagcaucuauuggacaauaguuaagccgggagacguacugguaauuaauaguaaugggaaccuaaucgcuccucgggguuauuucaaaaugcgcacugggaaaagcucaauaaugaggucagaugcaccuauugauaccuguauuucugaaugcaucacuccaaauggaagcauucccaaugacaagcccuuucaaaacguaaacaagaucacauauggagcaugccccaaguauguuaagcaaaacacccugaaguuggcaacagggaugcggaauguaccagagaaacaaacuagaggccuauucggcgcaauagcagguuucauagaaaaugguugggagggaaugauagacgguugguacgguuucaggcaucaaaauucugagggcacaggacaagcagcagaucuuaaaagcacucaagcagccaucgaccaaaucaaugggaaauugaacaggguaaucgagaagacgaacgagaaauuccaucaaaucgaaaaggaauucucagaaguagaagggagaauucaggaccucgagaaauacguugaagacacuaaaauagaucucuggucuuacaaugcggagcuucuugucgcucuggagaaucaacauacaauugaccugacugacucggaaaugaacaagcuguuugaaaaaacaaggaggcaacugagggaaaaugcugaagacaugggcaaugguugcuucaaaauauaccacaaaugugacaacgcuugcauagagucaaucagaaaugggacuuaugaccaugauguauacagagacgaagcauuaaacaaccgguuucagaucaaagguguugaacugaagucuggauacaaagacuggauccuguggauuuccuuugccauaucaugcuuuuugcuuuguguuguuuugcugggguucaucaugugggccugccagagaggcaacauuaggugcaacauuugcauuuga

SEQ ID NO: 34432 - RNA, 1701 nt, Artificial Sequence
  derived and/or modified CDS sequence (wt) from hemagglutinin__InfluenzaA__ACI06173
augaagaccaucauugcuuugagcuacauuuucugucuggcucucggccaagaccuuccaggaaaugacaacagcacagcaacgcugugccugggacaucaugcggugccaaacggaacacuagugaaaacaaucacagaugaucagauugaagugacuaaugcuacugagcuaguucagagcuccucaacggggaaaauaugcaacaauccucaucgaauccuugauggaauagacugcacacugauagaugcucuauugggggacccucauugugauguuuuucaaaaugagacaugggaccuuuucguugaacgcagcaaagcuuucagcaacuguuacccuuaugaugugccagauuaugccucccuuaggucacuaguugccucgucaggcacucuggaguuuaucacugaggguuucacuuggacuggggucacucagaaugggggaagcaaugcuugcaaaaggggaccugguagcgguuuuuucaguagacugaacugguugaccaaaucaggaagcacauauccagugcugaacgugacuaugccaaacaaugacaauuuugacaaacuauacauuugggggguucaccacccgagcacgaaccaagaacaaaccagccuguauguucaagcaucagggagagucacagucucuaccaggagaagccagcaaacuauaaucccgaauaucggguccagacccuggguaaggggucugucuaguagaauaagcaucuauuggacaauaguuaagccgggagacguacuggaaauuaauaguaaugggaaccuaaucgcuccucgggguuauuucaaaaugcgcacugggaaaagcucaauaaugaggucagaugcaccuauugauaccuguauuucugaaugcaucacuccaaauggaagcauucccaaugacaagcccuuucaaaacguaaacaagaucacauauggagcaugccccaaguauguuaagcaaaacacccugaaguuggcaacagggaugcggaauguaccagagaaacaaacuagaggccuauucggcgcaauagcagguuucauagaaaaugguugggagggaaugauagacgguugguacgguuucaggcaucaaaauucugagggcacaggacaagcagcagaucuuaaaagcacucaagcagccaucgaccaaaucaaugggaaauugaacaggguaaucgagaagacgaacgagaaauuccaucaaaucgaaaaggaauucucagaaguagaagggagaauucaggaccucgagaaauacguugaagacacuaaaauagaucucuggucuuacaaugcggagcuucuugucgcucuggagaaucaacauacaauugaccugacugacucggaaaugaacaagcuguuugaaaaaacaaggaggcaacugagggaaaaugcugaagacaugggcaaugguugcuucaaaauauaccacaaaugugacaacgcuugcauagagucaaucagaaaugggacuuaugaccaugauguauacagagacgaagcauuaaacaaccgguuucagaucaaagguguugaacugaagucuggauacaaagacuggauccuguggauuuccuuugccauaucaugcuuuuugcuuuguguuguuuugcugggguucaucaugugggccugccagagaggcaacauuaggugcaacauuugcauuuga

SEQ ID NO: 34433 - RNA, 1701 nt, Artificial Sequence; identical to SEQ ID NO: 34347
  derived and/or modified CDS sequence (wt) from hemagglutinin__InfluenzaA__ACI06174

SEQ ID NO: 34434 - RNA, 1701 nt, Artificial Sequence; identical to SEQ ID NO: 34348
  derived and/or modified CDS sequence (wt) from hemagglutinin__InfluenzaA__ACI06175

SEQ ID NO: 34435 - RNA, 1701 nt, Artificial Sequence; identical to SEQ ID NO: 34348
  derived and/or modified CDS sequence (wt) from hemagglutinin__InfluenzaA__ACI06176

SEQ ID NO: 34436 - RNA, 1701 nt, Artificial Sequence; identical to SEQ ID NO: 34348
  derived and/or modified CDS sequence (wt) from hemagglutinin__InfluenzaA__ACI06177

SEQ ID NO: 34437 - RNA, 1689 nt, Artificial Sequence
  derived and/or modified CDS sequence (wt) from hemagglutinin__InfluenzaA__ACI25724
auggccaucauuuaucucauacuccuguucgcaacagugaggggggaccagauaugcauuggauaccaugccaauaauuccacagaaaaggucgacacaauucuagagcggaaugucacugugacucaugccaaggacauccuugagaagacccacaacggaaagcuaugcaaacuaaacggaaucccuccacuugaacuaggggacuguagcauugccggauggcuccuuggaaauccagaaugugauaggcuucuaagggugccagaaugguccuauauaauggagagagaaaacccaagauacaguuuguguuacccaggcagcuuaaaugacuaugaagaauugaaacaucuccucagcagcguaaaacacuucgagaaaguaaggauucugcccaaagauagauggacacagcauacaacaacuggagguucaaaggccugcgcagugucagguaaaccaucauucuucaggaacauggucuggcugacaaagaaaggaccaaauuauccgguugccaaaggaucguacaacaauacgagcggagagcaaaugcuaauaauuuggggagugcaccauccuaaagaugaggcagaacaaagagcauuguaccaggaagugggaaccuauguuuccgcaagcacaucaacauugaacaaaaggucaaucccugaaauagcagcaaggccugaagugaauggacuuggaaguagaauggaauucucuuggacccucuuggauguaugggacaccauaaauuuugagagcacugguaaucuaguugcaccagaguauggauucaaaauaucaaaaagagguaguucagggaucaugaagacagaaggaacacuugggaacugugagaccaaaugccaaacuccuuugggagcaauaaauacaacacuaccuuuucacaauguccacccacugacaauaggugaaugccccaaauauguaaaaucggagaaauuggucuuagcaacaggacuaaggaauguuccccaaauugaaucaagaggauuguuuggggcaauagcuggcuuuauagaaggaggauggcaaggaaugguugaugguugguauggauaccaucacagcaaugaccaaggaucaggguaugcagcagacaaagaauccacucaaaaggcauuugauggaaucaccaacaagguaaauucugugauugaaaagaugaacacccaauuugaagcuguugggaaagaauucaauaauuuagagaaaagacuggagaacuugaacaaaaagauggaagacggguuccuagauguguggacauacaaugcugagcuucugguucugauggaaaaugagaggacacuugacuuccaugauucuaauguaaaaaaccuguaugaaaaagucagaaugcagcugagagacaacgucaaagaacuaggaaauggauguuuugaauuuuaucacaaaugugacgaugaaugcaugaauagugugaaaaacggaacguaugauuaucccaaguaugaagaagaaucuaaacuaaagagaaaugaaaucaaagggguaaaauugagcagcauggggguuuaccaaauucuugcuauuuaugcuacaguugcagguucucugucacuggcaaucaugguggcugggaucucuuucuggaugugcuccaacgggucucugcagugcagaaucugcauauga

SEQ ID NO: 34438 - RNA, 1701 nt, Artificial Sequence
  derived and/or modified CDS sequence (wt) from hemagglutinin__InfluenzaA__ACI25746
augaagaccaucauugcuuugagcuacauuuucugucuggcucucggccaauaccuuccaggaaaugacaacagcacagcaacgcugugccugggacaucaugcggugccaaacggaacacuagugaaaacaaucacagaugaucagauugaagugacuaaugcuacugagcuaguucagagcuccucaacggggaaaauaugcaacaauccucaucgaauccuugauggaauagacugcacacugauagaugcucuauugggggacccucauugugauguuuuucaaaaugagacaugggaccuuuucguugaacgcagcaaagcuuucagcaacuguuacccuuaugaugugccagauuaugccucccuuaggucacuaguugccucgucaggcacucuggaguuuaucacugaggguuucacuuggacuggggucacucagaaugggggaagcaaugcuugcaaaaggggaccugguagcgguuuuuucaguagacugaacugguugaccaaaucaggaagcacauauccagugcugaacgugacuaugccaaacaaugacaauuuugacaaacuauacauuugggggguucaccacccgagcacgaaccaagaacaaaccagccuguauguucaagcaucagggagagucacagucucuaccagaagaagccagcaaacuauaaucccgaauaucggguccagacccuggguaaggggucugucuaguagaauaagcaucuauuggacaauaguuaagccgggagacguacugguaauugauaguaaugggaaccuaaucgcuccucgggguuauuucaaaaugcgcacugggaaaagcucaauaaugaggucagaugcaccuauugauaccuguauuucugaaugcaucacuccaaauggaagcauucccaaugacaagcccuuucaaaacguaaacaagaucacauauggagcaugccccaaguauguuaagcaaaacacccugaaguuggcaacagggaugcggaauguaccagagaaacaaacuagaggccuauucggcgcaauagcagguuucauagaaaaugguugggagggaaugauagacgguugguacgguuucaggcaucaaaauucugagggcacaggacaagcagcagaucuuaaaagcacucaagcagccaucgaccaaaucaaugggaaauugaacaggguaaucgagaagacgaacgagaaauuccaucaaaucgaaaaggaauucucagaaguagaagggagaauucaggaccucgagaaauacguugaagacacuaaaauagaucucuggucuuacaaugcggagcuucuugucgcucuggagaaucaacauacaauugaccugacugacucggaaaugaacaagcuguuugaaaaaacaaggaggcaacugagggaaaaugcugaagacaugggcaaugguugcuucaaaauauaccacaaaugugacaacgcuugcauagagucaaucagaaaugggacuuaugaccaugauguauacagagacgaagcauuaaacaaccgguuucagaucaaagguguugaacugaagucuggauacaaagacuggauccuguggauuuccuuugccauaucaugcuuuuugcuuuguguuguuuugcugggguucaucaugugggccugccagagaggcaacauuaggugcaacauuugcauuuga

SEQ ID NO: 34439 - RNA, 1701 nt, Artificial Sequence
  derived and/or modified CDS sequence (wt) from hemagglutinin__InfluenzaA__ACI25757
augaagaccaucauugcuuugagcuacauuuucugucuggcucucggccaagaccuuccaggaaaugacaacagcacagcaacgcugugccugggacaucaugcggugccaaacggaacacuagugaaaacaaucacagaugaucagauugaagugacuaaugcuacugagcuaguucagagcuccucaacggggaaaauaugcaacaauccucaucgaauccuugauggaauagacugcacacugauagaugcucuauugggggacccucauugugauguuuuucaaaaugagacaugggaccuuuucguugaacgcagcaaagcuuucagcaacuguuacccuuaugaugugccagauuaugccucccuuaggucacuaguugccucgucaggcacucuggaguuuaucacugaggguuucacuuggacuggggucacucagaaugggggaagcaaugcuugcaaaaggggaccugguagcgguuuuuucaguagacugaacugguugaccaaaucaggaagcacauaucuagugcugaacgugacuaugccaaacaaugacaauuuugacaaacuauacauuugggggguucaccacccgagcacgaaccaagaacaaaccagccuguauguucaagcaucagggagagucacagucucuaccagaagaagccagcaaacuauaaucccgaauaucggguccagacccuggguaaggggucugucuaguagaauaagcaucuauuggacaauaguuaagccgggagacguacugguaauuaauaguaaugggaaccuaaucgcuccucgggguuauuucaaaaugcgcacugggaaaagcucaauaaugaggucagaugcaccuauugauaccuguauuucugaaugcaucacuccaaauggaagcauucccaaugacaagcccuuucaaaacguaaacaagaucacauauggagcaugccccaaguauguuaagcaaaacacccugaaguuggcaacagggaugcggaauguaccagagaaacaaacuagaggccuauucggcgcaauagcagguuucauagaaaaugguugggagggaaugauagacgguugguacgguuucaggcaucaaaauucugagggcacaggacaagcagcagaucuuaaaagcacucaagcagccaucgaccaaaucaaugggaaauugaacaggguaaucgagaagacgaacgagaaauuccaucaaaucgaaaaggaauucucagaaguagaagggagaauucaggaccucgagaaauacguugaagacacuaaaauagaucucuggucuuacaaugcggagcuucuugucgcucuggagaaucaacauacaauugaccugacugacucggaaaugaacaagcuguuugaaaaaacaaggaggcaacugagggaaaaugcugaagacaugggcaaugguugcuucaaaauauaccacaaaugugacaacgcuugcauagagucaaucagaaaugggacuuauaaccaugauguauacagagacgaagcauuaaacaaccgguuucagaucaaagguguugaacugaagucuggauacaaagacuggauccuguggauuuccuuugccauaucaugcuuuuugcuuuguguuguuuugcugggguucaucaugugggccugccagagaggcaacauuaggugcaacauuugcauuuga

SEQ ID NO: 34440 - RNA, 1701 nt, Artificial Sequence; identical to SEQ ID NO: 34328
  derived and/or modified CDS sequence (wt) from hemagglutinin__InfluenzaA__ACI25768

SEQ ID NO: 34441 - RNA, 1701 nt, Artificial Sequence
  derived and/or modified CDS sequence (wt) from hemagglutinin__InfluenzaA__ACI25779
augaagaccaucauugcuuugagcuacauuuucugucuggcucucggccaagaccuuccaggaaaugacaacagcacagcaacgcugugccugggacaucaugcggugccaaacggaacacuagugaaaacaaucacagaugaucagauugaagugacuaaugcuacugagcuaguucagagcuccucaacggggaaaauaugcaacaauccucaucgaauccuugauggaauagacugcacacugauagaugcucuauugggggacccucauugugauguuuuucaaaaugagacaugggaccuuuucguugaacgcagcaaagcuuucagcaacuguuacccuuaugaugugccagauuaugccucccuuaggucacuaguugccucgucaggcacucuggaguuuaucacugaggguuucacuuggacuggggucacucagaaugggggaagcaaugcuugcaaaaggggaccugguagcgguuuuuucaguagacugaacugguugaccaaaucaggaagcacauauccagugcugaacgugacuaugccaaacaaugacaauuuugacaaacuauacauuugggggguucaccacccgagcacgaaccaagaacaaaccagccuguauguucaagcaucagggagagucacagucucuaccagaagaagccagcaaacuauaaucccgaauaucugguccagacccuggguaaggggucugucuaguagaauaagcaucuauuggacaauaguuaagccgggagacguacugguaauuaauaguaaugggaaccuaaucgcuccucgggguuauuucaaaaugcgcacugggaaaagcucaauaaugaggucagaugcaccuauugauaccuguauuucugaaugcaucacuccaaauggaagcauucccaaugacaagcccuuucaaaacguaaacaagaucacauauggagcaugccccaaguauguuaagcaaaacacccugaaguuggcaacagggaugcggaauguaccagagaaacaaacuagaggccuauucggcgcaauagcagguuucauagaaaaugguugggagggaaugauagacgguugguacgguuucaggcaucaaaauucugagggcacaggacaagcagcagaucuuaaaagcacucaagcagccaucgaccaaaucaaugggaaauugaacaggguaaucgagaagacgaacgagaaauuccaucaaaucgaaaaggaauucucagaaguagaagggagaauucaggaccucgagaaauacguugaagacacuaaaauagaucucuggucuuacaaugcggagcuucuugucgcucuggagaaucaacauacaauugaccugacugacucggaaaugaacaagcuguuugaaaaaacaaggaggcaacugagggaaaaugcugaagacaugggcaaugguugcuucaaaauauaccacaaaugugacaacgcuugcauagagucaaucagaaaugggacuuaugaccaugauguauacagagacgaagcauuaaacaaccgguuucagaucaaagguguugaacugaagucuggauacaaagacuggauccuguggauuuccuuugccauaucaugcuuuuugcuuuguguuguuuugcugggguucaucaugugggccugccagagaggcaacauuaggugcaacauuugcauuuga

SEQ ID NO: 34442 - RNA, 1701 nt, Artificial Sequence
  derived and/or modified CDS sequence (wt) from hemagglutinin__InfluenzaA__ACI25790
augaagaccaucauugcuuugagcuacauuuucugucuggcucucggccaagaccuuccaggaaaugacaacagcacagcaacgcugugccugggacaucaugcggugccaaacggaacacuagugaaaacaaucacagaugaucagauugaagugacuaaugcuacugagcuaguucagagcuccucaacggggaaaauaugcaacaauccucaucgaauccuugauggaauagacugcacacugauagaugcucuauugggggacccucauugugauguuuuucaaaaugagacaugggaccuuuucguugaacgcagcaaagcuuucagcaacuguuacccuuaugaugugccagauuaugccucccuuaggucacuaguugccucgucaggcacucuggaguuuaucacugaggguuucacuuggacuggggucacucagaaugggggaagcaaugcuugcaaaaggggaccugguagcgguuuuuucaguagacugaacugguugaccaaaucaggaagcacauauccagugcugaacgugacuaugccaaacaaugacaauuuugacaaacuauacauuugggggguucaccacccgagcacgaaccaagaacaaaccagccuguauguucaagcaucagggagagucacagucucuaccagaagaagccagcaaacuauaaucccgaauaucugguccagacccuggguaaggggucugucuaguagaauaagcaucuauuggacaauaguuaagccgggagacguacugguaauuaauaguaaugggaaccuaaucgcuccucgggguuauuucaaaaugcgcacugggaaaagcucaauaaugaggucagaugcaccuauugauaccuguauuucugaaugcaucacuccaaauggaagcauucccaaugacaagcccuuucaaaacguaaacaagaucacauauggagcaugccccaaguauguuaagcaaaacacccugaaguuggcaacagggaugcggaauguaccagagaaacaaacuagaggccuauucggcgcaauagcagguuucauagaaaaugguugggagggaaugauagacgguugguacgguuucaggcaucaaaauucugagggcacaggacaagcagcagaucuuaaaagcacucaagcagccaucgaccaaaucaaugggaaauugaacaggguaaucgagaagacgaacgagaaauuccaucaaaucgaaaaggaauucucagaaguagaagggagaauucaggaccucgagaaauacguugaagacacuaaaauagaucucuggucuuacaaugcggagcuucuugucgcucuggagaaucaacauacaauugaccugacugacucggaaaugaacaagcuguuugaaaaaacaaggaggcaacugagggaaaaugcugaagacaugggcaaugguugcuucaaaauauaccacaaaugugacaacgcuugcauagagucaaucagaagugggacuuaugaccaugauguauacagagacgaagcauuaaacaaccgguuucagaucaaagguguugaacugaagucuggauacaaagacuggauccuguggauuuccuuugccauaucaugcuuuuugcuuuguguuguuuugcugggguucaucaugugggccugccagagaggcaacauuaggugcaacauuugcauuuga

SEQ ID NO: 34443 - RNA, 1701 nt, Artificial Sequence
  derived and/or modified CDS sequence (wt) from hemagglutinin__InfluenzaA__ACI25801
augaagaccaucauugcuuugagcuacauuuucugucuggcucucggccaagaccuuccaggaaaugacaacagcacagcaacgcugugccugggacaucaugcggugccaaacggaacacuagugaaaacaaucacagaugaucagauugaagugacuaaugcuacugagcuaguucagagcuccucaacggggaaaauaugcaacaauccucaucgaauccuugauggaauaaacugcacacugauagaugcucuauugggggacccucauugugauguuuuucaaaaugagacaugggaccuuuucguugaacgcagcaaagcuuucagcaacuguuacccuuaugaugugccagauuaugccucccuuaggucacuaguugccucgucaggcacucuggaguuuaucacugaggauuucacuuggacuggggucacucagaaugggggaagcaaugcuugcaaaaggggaccugguagcgguuuuuucaguagacugaacugguugaccaaaucaggaagcacauauccagugcuggacgugacuaugccaaacaaugacaauuuugacaaacuauacauuugggggguucaccacccgagcacgaaccaagaacaaaccagccuguauguucaagcaucagggagagucacagucucuaccagaagaagccagcaaacuauaaucccgaauaucggguccagacccuggguaaggggucugucuaguagaauaagcaucuauuggacaauaguuaagccgggagacguacugguaauuaauaguaaugggaaccuaaucgcuccucgggguuauuucaaaaugcgcacugggaaaagcucaauaaugaggucagaugcaccuauugauaccuguauuucugaaugcaucacuccaaauggaagcauucccaaugacaagcccuuucaaaacguaaacaagaucacauauggagcaugccccaaguauguuaagcaaaacacccugaaguuggcaacagggaugcggaauguaccagagaaacaaacuagaggccuauucggcgcaauagcagguuucauagaaaaugguugggagggaaugauagacgguugguacgguuucaggcaucaaaauucugagggcacaggacaagcagcagaucuuaaaagcacucaagcagccaucgaccaaaucaaugggaaauugaacaggguaaucgagaagacgaacgagaaauuccaucaaaucgaaaaggaauucucagaaguagaagggagaauucaggaccucgagaaauacguugaagacacuaaaauagaucucuggucuuacaaugcggagcuucuugucgcucuggagaaucaacauacaauugaccugacugacucggaaaugaacaagcuguuugaaaaaacaaggaggcaacugagggaaaaugcugaagacaugggcaaugguugcuucaaaauauaccacaaaugugacaacgcuugcauagagucaaucagaaaugggacuuaugaccaugauguauacagagacgaagcauuaaacaaccgguuucagaucaaagguguugaacugaagucuggauacaaagacuggauccuguggauuuccuuugccauaucaugcuuuuugcuuuguguuguuuugcugggguucaucaugugggccugccagagaggcaacauuaggugcaacauuugcauuuga

SEQ ID NO: 34444 - RNA, 1689 nt, Artificial Sequence; identical to SEQ ID NO: 34362
  derived and/or modified CDS sequence (wt) from hemagglutinin__InfluenzaA__ACI26274

SEQ ID NO: 34445 - RNA, 1698 nt, Artificial Sequence
  derived and/or modified CDS sequence (wt) from hemagglutinin__InfluenzaA__ACI26307
augaagacuaucauugcuuugagcuacauucuaugucugguuuuuacucaaaaacuucccggaaaugacaacagcacggcaacgcugugccuugggcaccaugcaguaccaaacggaacgauagugaaaacaaucacgaaugaccaaauugaaguuacuaaugcuacugagcugguucagaguuccucaacaggugaaauaugcgacaguccucaucagauccuugauggagaaaacugcacacuaauagaugcucuauugggagacccucagugugauggcuuccaaaauaagaaaugggaccuuuuuguugaacgcagcaaagccuacagcaacuguuacccuuaugaugugccggauuaugccucccuuaggucacuaguugccucauccggcacacuggaguuuaacaaugaaagcuucaauuggacuggagucacucaaaacggaacaagcucugcuugcauaaggagaucuaauaacaguuucuuuaguagauugaauugguugacccacuuaaaauucaaauacccagcauugaacgugacuaugccaaacaaugaaaaauuugacaaauuguacauuugggggguucaccacccgguuacggacaaugaccaaaucuuccuguaugcucaaucaggaagaaucacagucucuaccaaaagaagccaacaaacuguaaucccgaauaucggaucuagacccagaguaaggaauagccccagcagaauaagcaucuauuggacaauaguaaaaccgggagacauacuuuugauuaacagcacagggaaucuaauugcuccuagggguuacuucaaaauacgaagugggaaaagcucaauaaugagaucagaugcacccauuggcaaaugcaauucugaaugcaucacuccaaacggaagcauucccaaugacaaaccauuccaaaauguaaacaggaucacauacggggccugucccagauauguuaagcaaaacacucugaaauuggcaacagggaugcgaaauguaccagagaaacaaacuagaggcauauuuggcgcaaucgcggguuucauagaaaaugguugggagggaaugguggaugguugguacgguuucaggcaucaaaauucugagggaauaggacaagcagcagaucucaaaagcacucaagcagcaaucgaucaaaucaaugggaagcugaauagguugaucgggaaaaccaacgagaaauuccaucagauugaaaaagaauucucagaagucgaagggagaauucaggaccuugagaaauauguugaggacaccaaaauagaucucuggucauacaacgcggagcuucuuguugcccuggagaaccaacauacaauugaucuaacugacucagaaaugaacaaacuguuugaaaaaacaaagaagcaacugagggaaaaugcugaggauaugggcaaugguuguuucaaaauauaccacaaaugugacaaugccugcauaggaucaaucagaaauggaacuuaugaccacgauguauacagagaugaagcauuaaacaaccgguuccagaucaagggcguugagcugaagucaggauacaaagauuggauccuauggauuuccuuugccauaucauguuuuuugcuuuguguugcuuuguugggguucaucaugugggccugccaaaaaggcaacauuaggugcaacauuugcauuuga

SEQ ID NO: 34446 - RNA, 1701 nt, Artificial Sequence
  derived and/or modified CDS sequence (wt) from hemagglutinin__InfluenzaA__ACI26362
augaagacuaucauugcuuugagcuacauucuaugucugguuuucgcucaaaaacuuccuggaaaugacaacagcacggcaacgcugugccuugggcaccaugcaguaccaaacggaacgauagugaaaacaaucacgaaugaccaaauugaaguuacuaaugcuacugagcugguucagaguuccucaacaggugaaauaugcgacaguccucaucagauccuugauggagaaaacugcacacuaauagaugcucuauugggagacccucagugugauggcuuccaaaauaagaaaugggaccuuuuuguugaacgcagcaaagccuacagcaacuguuacccuuaugaugugccggauuaugccucccuuaggucacuaguugccucauccggcacacuggaguuuaacaaugaaagcuucaauuggacuggagucacucaaaacggaacaagcucugcuugcauaaggagaucuaauaacaguuucuuuaguagauugaauuggcugacccacuuaaaauucaaauacccagcauugaacgugacuaugccaaacaaugaacaauuugacaaauuguacauuugggggguucaccacccggguacggacaaugaccaaaucuuccuguaugcucaagcaucaggaagaaucacagucucuaccaaaagaagccaacaaacuguaaucccgaauaucggaucuagacccagaguaaggaauaucccuagcagaauaagcaucuauuggacaauaguaaaaccgggagacauacuuuugauuaacagcacagggaaucuaauugcuccuagggguuacuucaaaauacgaagugggaaaagcucaauaaugagaucagaugcacccauuggcaaaugcaauucugaaugcaucacuccaaauggaagcauucccaaugacaaaccauuccaaaauguaaacaggaucacauacggggccugucccagauauguuaagcaaaacacucugaaauuggcaacagggaugcgaaauguaccagagaaacaaacuagaggcauauuuggcgcaaucgcggguuucauagaaaaugguugggagggaaugguggaugguugguacgguuucaggcaucaaaauucugagggaagaggacaagcagcagaucucaaaagcacucaagcagcaaucgaucaaaucaaugggaagcugaauagauugaucgggaaaaccaacgagaaauuccaucagauugaaaaagaauucucagaagucgaagggagaauucaggaccuugagaaauauguugaggacaccaaaauagaucucuggucauacaacgcggagcuucuuguugcccuggagaaccaacauacaauugaucuaacugacucagaaaugaacaaacuguuugaaaaaacaaagaagcaacugagggaaaaugcugaggauaugggcaaugguuguuucaaaauauaccacaaaugugacaaugccugcauaggaucaaucagaaauggaacuuaugaccacgauguauacagagaugaagcauuaaacaaccgguuccagaucaagggaguugagcugaagucaggguacaaagauuggauccuauggauuuccuuugccauaucauguuuuuugcuuuguguugcuuuguugggguucaucaugugggccugccaaaaaggcaacauuaggugcaacauuugcauuuga

SEQ ID NO: 34447 - RNA, 1701 nt, Artificial Sequence
  derived and/or modified CDS sequence (wt) from hemagglutinin__InfluenzaA__ACI26373
augaagacuaucauugcuuugagcuacauucuaugucugguuuucgcucaaaaacuuccuggaaaugacaacagcacggcaacgcugugccuugggcaccaugcaguaccaaacggaacgauagugaaaacaaucacgaaugaccaaauugaaguuacuaaugcuacugagcugguucagaguuccucaacaggugaaauaugcgacaguccucaccagauccuugauggagaaaacugcacacuaauagaugcucuauugggagacccucagugugauggcuuccaaaauaagaaaugggaccuuuuuguugaacgcagcaaagccuacagcaacuguuacccuuaugaugugccggauuaugccucccuuaggucacuaguugccucauccggcacacuggaguuuaacaaugaaagcuucaauugggcuggagucacucaaaacggaacaagcucugcuugcauaaggaaaucuaauaacaguuucuuuaguagauugaauugguugacccacuuaaaauucaaauacccagcauugaacgugacuaugccaaacaaugaacaauuugacaaauuguacauuugggggguucaccacccggguacggacaaugaccaaaucuuccuguaugcucaagcaucaggaagaaucacagucucuaccaaaagaagccaacaaacuguaaucccgaauaucggaucuagacccagaguaaggaauaucccuagcagaauaagcaucuauuggacaauaguaaaaccgggagacauacuuuugauuaacagcacagggaaucuaauugcuccuagggguuacuucaaaauacgaagugggaaaagcucaauaaugagaucagaugcacccauuggcaaaugcaauucugaaugcaucacuccaaauggaagcauucccaaugacaaaccauuccaaaauguaaacaggaucacauacggggccugucccagauauguuaagcaaaacacucugaaauuggcaacagggaugcgaaauguaccagagaaacaaacuagaggcauauuuggcgcaaucgcggguuucauagaaaaugguugggagggaaugguggaugguugguacgguuucaggcaucaaaauucugagggaagaggacaagcagcagaucucaaaagcacucaagcagcaaucgaucaaaucaaugggaagcugaauagauugaucgggaaaaccaacgagaaauuccaucagauugaaaaagaauucucagaagucgaagggagaauucaggaccuugagaaauauguugaggacaccaaaauagaucucuggucauacaacgcggagcuucuuguugcccuggagaaccaacauacaauugaucuaacugacucagaaaugaacaaacuguuugaaaaaacaaagaagcaacugagggaaaaugcugaggauaugggcaaugguuguuucaaaauauaccacaaaugugacaaugccugcauaggaucaaucagaaauggaacuuaugaccacgauguauacagagaugaagcauuaaacaaccgguuccagaucaaaggaguugagcugaagucaggguacaaagauuggauccuauggauuuccuuugccauaucauguuuuuugcuuuguguugcuuuguugggguucaucaugugggccugccaaaaaggcaacauuaggugcaacauuugcauuuga

SEQ ID NO: 34448 - RNA, 1701 nt, Artificial Sequence; identical to SEQ ID NO: 34314
  derived and/or modified CDS sequence (wt) from hemagglutinin__InfluenzaA__ACI26395

SEQ ID NO: 34449 - RNA, 1701 nt, Artificial Sequence
  derived and/or modified CDS sequence (wt) from hemagglutinin__InfluenzaA__ACI26406
augaagacuaucauugcuuugagcuacauucuaugucugguuuucgcucaaaaacuuccuggaaaugacaacagcacggcaacgcugugccuugggcaccaugcaguaccaaacggaacgauagugaaaacaaucacgaaugaccaaauugaaguuacuaaugcuacugagcugguucagaguuccucaacaggugaaauaugcgacaguccucaucagauccuugauggagaaaacugcacacuaauagaugcucuauugggagacccucagugugauggcuuccaaaauaagaaaugggaccuuuuuguugaacgcagcaaagccuacagcaacuguuacccuuaugaugugccggauuaugccucccuuaggucacuaguugccucauccggcacacuggaguuuaacaaugaaagcuucaauuggacuggagucacucaaaacggaacaagcucugcuugcauaaggagaucuaauaacaguuucuuuaguagauugaauugguugacccacuuaaaauucaaacacccagcauugaacgugacuaugccaaacaaugaaaaauuugacaaauuguauauuugggggguucaccacccggguacggacaaugaccaaaucuuccuguaugcucaagcaucaggaagaaucacagucucuaccaaaagaagccaacaaacuguaaucccgaauaucggaucuagacccagaguaaggaauauccccagcagaauaagcaucuauuggacaauaguaaaaccgggagacauacuuuugauuaacagcacagggaaucuaauugcuccuagggguuacuucaaaauacgaagugggaaaagcucaauaaugagaucagaugcacccauuggcaaaugcaauucugaaugcaucacuccaaauggaagcauucccaaugacaaaccauuccaaaauguaaacaggaucacauacggggccugucccagauauguuaagcaaaacacucugaaauuggcaacagggaugcgaaauguaccagagaaacaaacuagaggcauauuuggcgcaaucgcggguuucauagaaaaugguugggagggaaugguggaugguugguacgguuucaggcaucaaaauucugagggaauaggacaagcagcagaucucaaaagcacucaagcagcaaucgaucaaaucaaugggaagcugaauagguugaucgggaaaaccaacgagaaauuccaucagauugaaaaagaauucucagaagucgaagggaggauucaggaccuugagaaauauguugaggacaccaaaauagaucucuggucauacaacgcggagcuucuuguugcccuggagaaccaacauacaauugaucuaacugacucagaaaugaacaaacuguuugaaaaaacaaagaagcaacugagggaaaaugcugaggauaugggcaaugguuguuucaaaauauaccacaaaugugacaaugccugcauaggaucaaucagaaauggaacuuaugaccacgauguauacagagaugaagcauuaaacaaccgguuccagaucaagggcguugagcugaagucaggauacaaagauuggauccuauggauuuccuuugccauaucauguuuuuugcuuuguguugcuuuguugggguucaucaugugggccugccaaaaaggcaacauuaggugcaacauuugcauuuga

SEQ ID NO: 34450 - RNA, 1701 nt, Artificial Sequence
  derived and/or modified CDS sequence (wt) from hemagglutinin__InfluenzaA__ACI26417
augaagacuaucauugcuuugagcuacauucuaugucugguuuucgcucaaaaacuuccuggaaaugacaacagcacggcaacgcugugccuugggcaccaugcaguaccaaacggaacgauagugaaaacaaucacgaaugaccaaauugaaguuacuaaugcuacugagcugguucagaguuccucaacaggugaaauaugcgacaguccucaucagauccuugauggagaaaacugcacacuaauagaugcucuauugggagacccucagugugauggcuuccaaaauaagaaaugggaccuuuuuguugaacgcagcaaagccuacagcaacuguuacccuuaugaugugccggauuaugccucccuuaggucacuaguugccucauccggcacacuggaguuuaacaaugaaagcuucaauuggacuggagucacucaaaacggaacaagcucugcuugcauaaggagaucuaauaacaguuucuuuaguagauugaauugguugacccacuuaaaauucaaauacccagcauugaacgugacuaugccaaacaaugaaaaauuugacaaauuguauauuugggggguucaccacccggguacggacaaugaccaaaucuuccuguaugcucaagcaucaggaagaaucacagucucuaccaaaagaagccaacaaacuguaaucccgaauaucggaucuagacccagaguaaggaauauccccagcagaauaagcaucuauuggacaauaguaaaaccgggagacauacuuuugauuaacagcacagggaaucuaauugcuccuagggguuacuucaaaauacgaagugggaaaagcucaauaaugagaucagaugcacccauuggcaaaugcaauucugaaugcaucacuccaaaugggagcauucccaaugacaaaccauuccaaaauguaaacaggaucacauacggggccugucccagauauguuaagcaaaacacucugaaauuggcaacagggaugcgaaauguaccagagaaacaaacuagaggcauauuuggcgcaaucgcggguuucauagaaaaugguugggagggaaugguggaugguugguacgguuucaggcaucaaaauucugagggaauaggacaagcagcagaucucaaaagcacucaagcagcaaucgaucaaaucaaugggaagcugaauagguugaucgggaaaaccaacgagaaauuccaucagauugaaaaagaauucucagaagucgaagggaggauucaggaccuugagaaauauguugaggacaccaaaauagaucucuggucauacaacgcggagcuucuuguugcccuggagaaccaacauacaauugaucuaacugacucagaaaugaacaaacuguuugaaaaaacaaagaagcaacugagggaaaaugcugaggauaugggcaaugguuguuucaaaauauaccacaaaugugacaaugccugcauaggaucaaucagaaauggaacuuaugaccacgauguauacagagaugaagcauuaaacaaccgguuccagaucaagggcguugagcugaagucaggauacaaagauuggauccuauggauuuccuuugccauaucauguuuuuugcuuuguguugcuuuguugggguucaucaugugggccugccaaaaaggcaacauuaggugcaacauuugcauuuga

SEQ ID NO: 34451 - RNA, 1701 nt, Artificial Sequence
  derived and/or modified CDS sequence (wt) from hemagglutinin__InfluenzaA__ACI26428
augaagacuaucauugcuuugagcuacauucuaugucugguuuucgcccaaaaacuucccggaaaugacaacagcacggcaacgcugugccuugggcaccaugcaguaccaaacggaacgauagugaaaacaaucacgaaugaccaaauugaaguuacuaaugcuacugagcugguucagauuuccucaacagguggaauaugcgacaguccucaucagauccuugauggagaaaacugcacacuaauagaugcucuauugggagacccucagugugauggcuuccaaaauaagaaaugggaccuuuuuguugaacgcagcaaagccuacagcaacuguuacccuuaugauguaccggauuaugccucccuuaggucacuaguugccucauccggcacacuggaguuuaacaaugaaagcuucaauuggacuggagucacucaaaauggaacaagcucuucuugcaaaaggagaucuaauaacaguuucuuuaguagauugaauugguugacccacuuaaaauucaaauacccagcauugaacgugacuaugccaaacaaugaaaaauuugacaaauuguacauuugggggguucaccacccgguuacggacaaugaccaaaucagacuauaugcucaagcuucaggaagaaucacagucucuaccaaaagaagccaacaaacuguaaucccgaauaucggauauagacccaggguaagggauauccccagcagaauaagcaucuauuggacaauaguaaaaccgggagacauacuuuugauuaacagcacagggaaucuaauugcuccucgggguuacuucaaaauacgaagugggaaaagcucaauaaugagaucagaugcacccauuggcaaaugcaauucugaaugcaucacuccaaauggaagcauucccaaugacaaaccauuucaaaauguaaacaggaucacauauggggccugucccagauauguuaagcaaaacacucugaaauuggcaacagggaugcgaaauguaccagagaaacaaacuagaggcauauuuggcgcaaucgcggguuucauagaaaaugguugggagggaaugguggaugguugguacgguuucaggcaucaaaauucugagggaauaggacaagcagcagaucucaaaagcacucaagcagcaaucaaccaaaucaaugggaaacugaauagguugaucgggaaaaccaacgagaaauuccaucagauugaaaaagaauucucagaaguagaagggagaauucaggaccucgagaaauauguugaggacacuaaaauagaucucuggucauacaacgcggagcuucuuguugcccuggagaaccaacauacaauugaucuaacugacucagaaaugaacaaacuguuugaaagaacaaagaagcaacugagggaaaaugcugaggauaugggcaaugguuguuucaaaauauaccacaaaugugacaaugccugcauagggucaaucagaaauggaacuuaugaccaugauguauacagagaugaagcauuaaacaaccgguuccagaucaaagguguugagcugaagucaggauacaaagauuggauccuauggauuuccuuugccauaucauguuuuuugcuuuguguuguuuuguugggguucaucaugugggccugccaaaaaggcaacauuaggugcaacauuugcauuuga

SEQ ID NO: 34452 - RNA, 1698 nt, Artificial Sequence
  derived and/or modified CDS sequence (wt) from hemagglutinin__InfluenzaA__ACI26439
augaaaguaaaacuacugguccuauuaugcacauuuacagcuacauaugcagacacaauauguauaggcuaccaugccaacaacucaaccgacacuguugacacaguacuugaaaagaaugugacagugacacacucuguaaaccugcuugaggacagccacaauggaaaauuaugucuauuaaaaggaauagccccacuacaauuggguaauugcagcguugccgguuggaucuuaggaaacccagaaugcgaauuacugauuuccaaggagucaugguccuacauuguagaaaaaccaaauccugagaauggaacauguuacccagggcauuucgccgacuaugaggaacugagggagcaauugaguucaguaucuucauuugagagguucgaaauauuccccaaagaaagcucauggcccaaccacaccguaaccggaguaucagcaucaugcucccauaaugggaaaagcaguuuuuacaaaaauuugcuauggcugacgggaaagaaugguuuguacccaaaccugagcaaguccuaugcaaacaacaaagagaaagaaguccuuguacuaugggguguucaucacccgccaaacauagguaaccaaagggcccucuaucauacagaaaaugcuuaugucucuguagugucuucacauuauagcagaaaauucaccccagaaauagccaaaagacccaaaguaagagaucaagaaggaagaaucaacuacuacuggacucugcuugaacccggggauacaauaauauuugaggcaaauggaaaucuaauagcgccaagauaugcuuucgcacugaguagaggcuuuggaucaggaaucaucaacucaaaugcaccaauggaugaaugugaugcgaagugccaaacaccucagggagcuauaaacagcagucuuccuuuucagaauguacacccagucacaauaggagaauguccaaaguaugucaggagugcaaaauuaaggaugguuacaggacuaaggaacaucccauccauucaauccagagguuuguuuggagccauugccgguuucauugaagggggguggacuggaaugguagaugguugguaugguuaucaucaccagaaugagcaaggaucuggcuaugcugcagaucaaaaaagcacacaaaaugccauuaaugggauuacaaacaaggugaauucuguaauugagaagaugaacacucaguucacagcugugggcaaagaauucaacaaauuggaaagaaggauggaaaacuuaaauaaaaaaguugaugacggguuuauagacguuuggacauauaaugcagaacuguugguucuacuggaaaaugaaaggacuuuggauuuccaugacuccaaugugaagaauuuguacgagaaaguaaaaagccaauuaaagaauaaugccaaagaaauaggaaauggguguuuugaauuuuaucacaaguguaacgaugaaugcauggagaguguaaaaaauggaacuuaugacuauccaaaauauuccgaagaaucaaaguuaagcagggagaaaauugauggagugaaauuggaaucaaugggagucuaucagauucuggcgaucuacucaacagucgccaguucucugguucuuuuggucucccugggggcaaucagcuucuggauguguuccaaugggucuuugcaguguagaauaugcaucuaa

SEQ ID NO: 34453 - RNA, 1698 nt, Artificial Sequence
  derived and/or modified CDS sequence (wt) from hemagglutinin__InfluenzaA__ACI26450
augaaaguaaaacuacugguccuauuaugcacauuuacagcuacauaugcagacacaauauguauaggcuaccaugccaacaacucaaccgacacuguugacacaguacuugaaaagaaugugacagugacacacucuguaaaccugcuugaggacagccacaauggaaaauuaugucuauuaaaaggaauagccccacuacaauuggguaauugcagcguugccgguuggaucuuaggaaacccagaaugcgaauuacugauuuccaaggagucaugguccuacauuguagaaaaaccaaauccugagaauggaacauguuacccagggcauuucgccgacuaugaggaacugagggagcaauugaguucaguaucuucauuugagagguucgaaauauuccccaaagaaagcucauggcccaaccacaccguaaccggaguaucagcaucaugcucccauaaugggaaaagcaguuuuuacaaaaauuugcuauggcugacgggaaagaaugguuuguacccaaaccugagcaaguccuaugcaaacaacaaagagaaagaaguccuuguacuaugggguguucaucacccgccaaacauagguaaccaaagggcccucuaucauacagaaaaugcuuaugucucuguagugucuucacauuauagcagaaaauucaccccagaaauagccaaaagacccaaaguaagagaucaagaaggaagaaucaacuacuacuggacucugcuugaacccggggauacaauaauauuugaggcaaauggaaaucuaauagcgccaagauaugcuuucgcacugaguagaggcuuuggaucaggaaucaucaacucaaaugcaccaauggaugaaugugaugcgaagugccaaacaccucagggagcuauaaacagcagucuuccuuuucagaauguacacccagucacaauaggagaauguccaaaguaugucaggagugcaaaauuaaggaugguuacaggacuaaggaacaucccauccauucaauccagagguuuguuuggagccauugccgguuucauugaagggggguggacuggaaugguagaugguugguaugguuaucaucaccagaaugagcaaggaucuggcuaugcugcagaucaaaaaagcacacaaaaugccauuaaugggauuacaaacaaggugaauucuguaauugagaagaugaacacucaguucacagcugugggcaaagaauucaacaaauuggaaagaaggauggaaaacuuaaauaaaaaaguugaugacggguuuauagacguuuggacauauaaugcagaacuguugguucuacuggaaaaugaaaggacuuuggauuuccaugacuccaaugugaagaauuuguaugagaaaguaaaaagccaauuaaagaauaaugccaaagaaauaggaaauggguguuuugaauuuuaucacaaguguaacgaugaaugcauggagaguguaaaaaauggaacuuaugacuauccaaaauauuccgaagaaucaaaguuaagcagggagaaaauugauggagugaaauuggaaucaaugggagucuaucagauucuggcgaucuacucaacagucgccaguucucugguucuuuuggucucccugggggcaaucagcuucuggauguguuccaaugggucuuugcaguguagaauaugcaucuaa

SEQ ID NO: 34454 - RNA, 1701 nt, Artificial Sequence
  derived and/or modified CDS sequence (wt) from hemagglutinin__InfluenzaA__ACI26461
augaagacuaucauugcuuugagcuacauucuaugucugguuuucacucaaaaacuucccggaaaugacaacagcacggcaacgcugugccuugggcaccaugcaguaccaaacggaacgauagugaaaacaaucacgaaugaccaaauugaaguuacuaaugcuacugagcugguucagaguuccucgacaggugaaauaugcgacaguccucaucagauccuugauggagaaaacugcacacuaauagaugcucuauugggagacccucagugugauggcuuccaaaauaagaaaugggaccuuuuuguugaacgcagcaaagccuacagcaacuguuacccuuaugaugugccggauuaugccucccuuaggucacuaguugccucauccggcacacuggaguuuaacaaugaaagcuucaauuggacuggagucacucaaaacggaacaagcucugcuugcauaaggagaucuaauaacaguuucuuuaguagauugaauugguugacccacuuaaaauucaaauacccagcauugaacgugacuaugccaaacaaugaaaaauuugacaaauuguacauuugggggguucaccacccggguacggacaaugaccaaaucuucccguaugcucaagcaucaggaagaaucacagucucuaccaaaagaagccaacaaacuguaaucccgaauaucggaucuagacccagaguaaggaauauccccagcagaauaagcaucuauuggacaauaguaaaaccgggagacauacuuuugauuaacagcacagggaaucuaauugcuccuagggguuacuucaaaauacgaagugggaaaagcucaauaaugagaucagaugcacccauuggcaaaugcaauucugaaugcaucacuccaaacggaagcauucccaaugacaaaccauuccaaaauguaaacaggaucacauacggggccugucccagauauguuaagcaaaacacucugaaauuggcaacagggaugcgaaauguaccagagaaacaaacuagaggcauauuuggcgcaaucgcggguuucauagaaaaugguugggagggaaugguggaugguugguacgguuucaggcaucaaaauucugagggaauaggacaagcagcagaucucaaaagcacucaagcagcaaucgaucaaaucaaugggaagcugaauagguugaucgggaaaaccaacgagaaauuccaucagauugaaaaagaauucucagaagucgaagggagaauucaggaccuugagaaauauguugaggacaccaaaauagaucucuggucauacaacgcggagcuucuuguugcccuggagaaccaacauacaauugaucuaacugacucagaaaugaacaaacuguuugaaaaaacaaagaagcaacugagggaaaaugcugaggauaugggcaaugguuguuucaaaauauaccacaaaugugacaaugccugcauaggaucaaucagaaauggaacuuaugaccacaauguauacagagaugaagcauuaaacaaccgguuccagaucaagggcguugagcugaagucaggauacaaagauuggauccuauggauuuccuuugccauaucauguuuuuugcuuuguguugcuuuguugggguucaucaugugggccugccaaaaaggcaacauuaggugcaacauuugcauuuga

SEQ ID NO: 34455 - RNA, 1698 nt, Artificial Sequence
  derived and/or modified CDS sequence (wt) from hemagglutinin__InfluenzaA__ACI26472
augaagacuaucauugcuuugagcuacauucuaugucugguuuucacucaaaaacuucccggaaaugacaacagcacggcaacgcugugccuugggcaccaugcaguaccaaacggaacgauagugaaaacaaucacgaaugaccaaauugaaguuacuaaugcuacugagcugguucagaguuccucaacaggugaaauaugcgacaguccucaucagauccuugauggagaaaacugcacacuaauagaugcucuauugggagacccucagugugauggcuuccaaaauaagaaaugggaccuuuuuguugaacgcagcaaagccuacagcaacuguuacccuuaugaugugccggauuaugccucccuuaggucacuaguugccucauccggcacacuggaguuuaacaaugaaagcuucaauuggacuggagucacucaaaacggaacaagcucugcuugcauaaggagaucuaauaacaguuucuuuaguagauugaauugguugacccacuuaaaauucaaauacccagcauugaacgugacuaugccaaacaaugaaaaauuugacaaauuguacauuugggggguucaccacccgguuacggacaaugaccaaaucuuccuguaugcucaaucaggaagaaucacagucucuaccaaaagaagccaacaaacuguaaucccgaauaucggauauagacccagaguaaggaauauccccagcagaauaagcaucuauuggacaauaguaaaaccgggagacauacuuuugauuaacagcacagggaaucuaauugcuccuagggguuacuucaaaauacgaagugggaaaagcucaauaaugagaucagaugcacccauuggcaaaugcaauucugaaugcaucacuccaaacggaagcauucccaaugacaaaccauuccaaaauguaaacaggaucacauacggggccugucccagauauguuaagcaaaacacucugaaauuggcaacagggaugcgaaauguaccagagaaacaaacuagaggcauauuuggcgcaaucgcggguuucauagaaaaugguugggagggaaugguggaugguugguacgguuucaggcaucaaaauucugagggaauaggacaagcagcagaucucaaaagcacucaagcagcaaucgaucaaaucaaugggaagcugaauagguugaucgggaaaaccaacgagaaauuccaucagauugaaaaagaauucucagaagucgaagggagaauucaggaccuugagaaauauguugaggacaccaaaauagaucucuggucauacaacgcggagcuucuuguugcccuggagaaccaacauacaauugaucuaacugacucagaaaugaacaaacuguuugaaaaaacaaagaagcaacugagggaaaaugcugaggauaugggcaaugguuguuucaaaauauaccacaaaugugacaaugccugcauaggaucaaucagaaauggaacuuaugaccacgauguauacagagaugaagcauuaaacaaccgguuccagaucaagggcguugagcugaagucaggauacaaagauuggauccuauggauuuccuuugccauaucauguuuuuugcuuuguguugcuuuguugggguucaucaugugggccugccaaaaaggcaacauuaggugcaacauuugcauuuga

SEQ ID NO: 34456 - RNA, 1701 nt, Artificial Sequence
  derived and/or modified CDS sequence (wt) from hemagglutinin__InfluenzaA__ACI26483
augaagacuaucauugcuuugagcuacauucuaugucugguuuucgcucaaaaacuuccuggaaaugacaacagcacggcaacgcugugccuugggcaccaugcaguaccaaacggaacgauagugaaaacaaucacgaaugaccaaauugaaguuacuaaugcuacugagcugguucagaguuccucaacaggugaaauaugcgacaguccucaccagauccuugauggagaaaacugcacacuaauagaugcucuauugggagacccucagugugauggcuuccaaaauaagaaaugggaccuuuuuguugaacgcagcaaagccuacagcaacuguuacccuuaugaugugccggauuaugccucccuuaggucacuaguugccucauccggcacacuggaguuuaacaaugaaagcuucaauugggcuggagucacucaaaacggaacaagcucugcuugcauaaggaaaucuaauaacaguuucuuuaguagauugaauugguugacccacuuaaaauucaaauacccagcauugaacgugacuaugccaaacaaugaacaauuugacaaauuguacauuugggggguucaccacccggguacggacaaugaccaaaucuuccuguaugcucaagcaucaggaagaaucacagucucuaccaaaagaagccaacaaacuguaaucccgaauaucggaucuagacccagaguaaggaauaucccuagcagaauaagcaucuauuggacaauaguaaaaccgggagacauacuuuugauuaacagcacagggaaucuaauugcuccuagggguuacuucaaaauacgaagugggaaaagcucaauaaugagaucagaugcacccauuggcaaaugcaauucugaaugcaucacuccaaauggaagcauucccaaugacaaaccauuccaaaauguaaacaggaucacauacggggccugucccagauauguuaagcaaaacacucugaaauuggcaacagggaugcgaaauguaccagagaaacaaacuagaggcauauuuggcgcaaucgcggguuucauagaaaaugguugggagggaaugguggaugguugguacgguuucaggcaucaaaauucugagggaagaggacaagcagcagaucucaaaagcacucaagcagcaaucgaucaaaucaaugggaagcugaauagauugaucgggaaaaccaacgagaaauuccaucagauugaaaaagaauucucagaagucgaagggagaauucaggaccuugagaaauauguugaggacaccaaaauagaucucuggucauacaacgcggagcuucuuguugcccuggagaaccaacauacaauugaucuaacugacucagaaaugaacaaacuguuugaaaaaacaaagaagcaacugagggaaaaugcugaggauaugggcaaugguuguuucaaaauauaccacaaaugugacaaugccugcauaggaucaaucagaaauggaacuuaugaccacgauguauacagagaugaagcauuaaacaaccgguuccagaucaagggaguugagcugaagucaggguacaaagauuggauccuauggauuuccuuugccauaucauguuuuuugcuuuguguugcuuuguugggguucaucaugugggccugccaaaaaggcaacauuaggugcaacauuugcauuuga

SEQ ID NO: 34457 - RNA, 1701 nt, Artificial Sequence
  derived and/or modified CDS sequence (wt) from hemagglutinin__InfluenzaA__ACI26505
augaagacuaucauugcuuugagcuacauucuaugucugguuuucgcucaaaaacuuccuggaaaugacaacagcacggcaacgcugugccuugggcaccaugcaguaccaaacggaacgauagugaaaacaaucacgaaugaccaaauugaaguuacuaaugcuacugagcugguucagaguuccucaacaggugaaauaugcgacaguccucaccagauccuugauggagaaaacugcacacuaauagaugcucuauugggagacccucagugugauggcuuccaaaauaagaaaugggaccuuuuuguugaacgcagcaaagccuacagcaacuguuacccuuaugaugugccggauuaugccucccuuaggucacuaguugccucauccggcacacuggaguuuaacaaugaaagcuucaauugggcuggagucacucaaaacggaacaagcucugcuugcauaaggaaaucuaauaacaguuucuuuaguagauugaauugguugacccacuuaaaauucaaauacccagcauugaacgugacuaugccaaacaaugaacaauuugacaaauuguacauuugggggguucaccacccggguacggacaaugaccaaaucuuccuguaugcucaagcaucaggaagaaucacagucucuaccaaaagaagccaacaaacuguaaucccgaauaucggaucuagacccagaguaaggaauaucccuagcagaauaagcaucuauuggacaauaguaaaaccgggagacauacuuuugauuaacagcacagggaaucuaauugcuccuagggguuacuucaaaauacgaagugggaaaagcucaauaaugagaucagaugcacccauuggcaaaugcaauucugaaugcaucacuccaaauggaagcauucccaaugacaaaccauuccaaaauguaaacaggaucacauacggggccugucccagauauguuaagcaaaacacucugaaauuggcaacagggaugcgaaauguaccagagaaacaaacuagaggcauauuuggcgcaaucgcggguuucauagaaaaugguugggagggaaugguggaugguugguacgguuucaggcaucaaaauucugagggaagaggacaagcagcagaucucaaaagcacucaagcagcaaucgaucaaaucaaugggaagcugaauagauugaucgggaaaaccaacgagaaauuccaucagauugaaaaagaauucucagaagucgaagggagaauucaggaccuugagaaauauguugaggacaccaaaauagaucucuggucauacaacgcggagcuucuuguugcccuggagaaccaacauacaauugaucuaacugacucagaaaugaacaaacuguuugaaaaaacaaagaagcaacugagggaaaaugcugaggauaugggcaaugguuguuucaaaauauaccacaaaugugacaaugccugcauaagaucaaucagaaauggaacuuaugaccacgauguauacagagaugaagcauuaaacaaccgguuccagaucaagggaguugagcugaagucaggguacaaagauuggauccuauggauuuccuuugccauaucauguuuuuugcuuuguguugcuuuguugggguucaucaugugggccugccaaaaaggcaacauuaggugcaacauuugcauuuga

SEQ ID NO: 34458 - RNA, 1701 nt, Artificial Sequence
  derived and/or modified CDS sequence (wt) from hemagglutinin__InfluenzaA__ACI26516
augaagacuaucauugcuuugagcuacauucuaugucugguuuucgcucaaaaacuuccuggaaaugacaacagcacggcaacgcugugccuugggcaccaugcaguaccaaacggaacgauagugaaaacaaucacgaaugaccaaauugaaguuacuaaugcuacugagcugguucagaguuccucaacaggugaaauaugcgacaguccucaucagauccuugauggagaaaacugcacacuaauagaugcucuauugggagacccucagugugauggcuuccaaaauaagaaaugggaccuuuuuguugaacgcagcaaagccuacagcaacuguuacccuuaugaugugccggauuaugccucccuuaggucgcuaguugccucauccggcacacuggaguuuaacaaugaaagcuucaauuggacuggagucacucaaaacggaacaagcucugcuugcauaaggagaucuaauaacaguuucuuuaguagauugaauugguugacccacuuaaaauucaaauacccagcauugaacgugacuaugccaaacaaugaacaauuugacaaauuguacauuugggggguucaccacccggguacggacaaugaccaaaucuuccuguaugcucaagcaucaggaagaaucacagucucuaccaaaagaagccaacaaacuguaaucccgaauaucggaucuagacccagaguaaggaauaucccuagcagaauaagcaucuauuggacaauaguaaaaccgggagacauacuuuugauuaacagcacagggaaucuaauugcuccuagggguuacuucaaaauacgaagugggaaaagcucaauaaugagaucagaugcacccauuggcaaaugcaauucugaaugcaucacuccaaauggaagcauucccaaugacaaaccauuccaaaauguaaacaggaucacauacggggccugucccagauauguuaagcaaaacacucugaaauuggcaacagggaugcgaaauguaccagagaaacaaacuagaggcauauuuggcgcaaucgcggguuucauagaaaaugguugggagggaaugguggaugguugguacgguuucaggcaucaaaauucugagggaagaggacaagcagcagaucucaaaagcacucaagcagcaaucgaucaaaucaaugggaagcugaauagauuaaucgggaaaaccaacgagaaauuccaucagauugaaaaagaauucucagaagucgaagggagaauucaggaccuugagaaauauguugaggacaccaaaauagaucucuggucauacaacgcggagcuucuuguugcccuggagaaccaacauacaauugaucuaacugacucagaaaugaacaaacuguuugaaaaaacaaagaagcaacugagggaaaaugcugaggauaugggcaaugguuguuucaaaauauaccacaaaugugacaaugccugcauaggaucaaucagaaauggaacuuaugaccacgauguauacagagaugaagcauuaaacaaccgguuccagaucaagggaguugagcugaagucaggguacaaagauuggauccuauggauuuccuuugccauaucauguuuuuugcuuuguguugcuuuguugggguucaucaugugggccugccaaaaaggcaacauuaggugcaacauuugcauuuga

SEQ ID NO: 34459 - RNA, 1701 nt, Artificial Sequence
  derived and/or modified CDS sequence (wt) from hemagglutinin__InfluenzaA__ACI26527
augaagacuaucauugcuuugagcuacauucuaugucugguuuucgcucaaaaacuuccuggaaaugacaacagcacggcaacgcugugccuugggcaccaugcaguaccaaacggaacgauagugaaaacaaucacgaaugaccaaauugaaguuacuaaugcuacugagcugguucagaguuccucaacaggugaaauaugcgacaguccucaccagauccuugauggagaaaacugcacacuaauagaugcucuauugggagacccucagugugauggcuuccaaaauaagaaaugggaccuuuuuguugaacgcagcaaagccuacagcaacuguuacccuuaugaugugccggauuaugccucccuuaggucacuaguugccucauccggcacacuggaguuuaacaaugaaagcuucaauugggcuggagucacucaaaacggaacaagcucugcuugcauaaggaaaucuaauaacaguuucuuuaguagauugaauugguugacccacuuaaaauucaaauacccagcauugaacgugacuaugccaaacaaugaacaauuugacaaauuguacauuugggggguucaccacccggguacggacaaugaccaaaucuuccuguaugcucaagcaucaggaagaaucacagucucuaccaaaagaagccaacaaacuguaaucccgaauaucggaucuagacccagaguaaggaauaucccuagcagaauaagcaucuauuggacaauaguaaaaccgggagacauacuuuugauuaacagcacagggaaucuaauugcuccuagggguuacuucaaaauacgaagugggaaaagcucaauaaugagaucagaugcacccauuggcaaaugcaauucugaaugcaucacuccaaauggaagcauucccaaugacaaaccauuccaaaauguaaacaggaucacauacggggccugucccagauauguuaagcaaaacacucugaaauuggcaacagggaugcgaaauguaccagagaaacaaacuagaggcauauuuggcgcaaucgcggguuucauagaaaaugguugggagggaaugguggaugguugguacgguuucaggcaucaaaauucugagggaagaggacaagcagcagaucucaaaagcacucaagcagcaaucgaucaaaucaaugggaagcugaauagauugaucgggaaaaccaacgagaaauuccaucagauugaaaaagaauucucagaagucgaagggagaauucaggaccuugagaaauauguugaggacaccaaaauagaucucuggucauacaacgcggagcuucuuguugcccuggagaaccaacauacaauugaucuaacugacucagaaaugaacaaacuguuugaaaaaacaaagaagcaacugagggaaaaugcugaggauaugggcaaugguuguuucaaaauauaccacaaaugugacaaugccugcauaggaucaaucagaaauggaacuuaugaccacgauguauacagagaugaagcauuaaacaaccgguuccagaucaagggaguugagcugaagucaggauacaaagauuggauccuauggauuuccuuugccauaucauguuuuuugcuuuguguugcuuuguugggguucaucaugugggccugccaaaaaggcaacauuaggugcaacauuugcauuuga

SEQ ID NO: 34460 - RNA, 1701 nt, Artificial Sequence
  derived and/or modified CDS sequence (wt) from hemagglutinin__InfluenzaA__ACI26538
augaagacuaucauugcuuugagcuacauucuaugucugguuuucgcucaaaaacuuccuggaaaugacaacagcacggcaacgcugugccuugggcaccaugcaguaccaaacggaacgauagugaaaacaaucacgaaugaccaaauugaaguuacuaaugcuacugagcugguucagaguuccucaacaggugaaauaugcgacaguccucaucagauccuugauggagaaaacugcacacuaauagaugcucuauugggagacccucagugugauggcuuccaaaauaagaaaugggaccuuuuuguugaacgcagcaaagccuacagcaacuguuacccuuaugaugugccggauuaugccucccuuaggucacuaguugccucauccggcacacuggaguuuaacaaugaaagcuucaauuggacuggagucacucaaaacggaacaagcucugcuugcauaaggagaucuaauaacaguuucuuuaguagauugaauugguugacccacuuaaaauucaaauacccagcauugaacgugacuaugccaaacaaugaacaauuugacaaauuguacauuugggggguucaccacccggguacggacaaugaccaaaucuuccuguaugcucaagcaucaggaagaaucacagucucuaccaaaagaagccaacaaacuguaaucccgaauaucggaucuagacccagaguaaggaauaucccuagcagaauaagcaucuauuggacaauaguaaaaccgggagacauacuuuugauuaacagcacagggaaucuaauugcuccuagggguuacuucaaaauacgaagugggaaaagcucaauaaugagaucagaugcacccauuggcaaaugcaauucugaaugcaucacuccaaauggaagcauucccaaugacaaaccauuccaaaauguaaacaggaucacauacggggccugucccagauauguuaagcaaaacacucugaaauuggcaacagggaugcgaaauguaccagauaaacaaacuagaggcauauuuggcgcaaucgcggguuucauagaaaaugguugggagggaaugguggaugguugguacgguuucaggcaucaaaauucugagggaagaggacaagcagcagaucucaaaagcacucaagcagcaaucgaucaaaucaaugggaagcugaauagauugaucgggaaaaccaacgagaaauuccaucagauugaaaaagaauucucagaagucgaagggagaauucaggaccuugagaaauauguugaggacaccaaaauagaucucuggucauacaacgcggagcuucuuguugcccuggagaaccaacauacaauugaucuaacugacucagaaaugaacaaacuguuugaaaaaacaaagaagcaacugagagaaaaugcugaggauaugggcaaugguuguuucaaaauauaccacaaaugugacaaugccugcauaggaucaaucagaaauggaacuuaugaccacgauguauacagagaugaagcauuaaacaaccgguuccagaucaagggaguugagcugaagucaggguacaaagauuggauccuauggauuuccuuugccauaucauguuuuuugcuuuguguugcuuuguugggguucaucaugugggccugccaaaaaggcaacauuaggugcaacauuugcauuuga

SEQ ID NO: 34461 - RNA, 1701 nt, Artificial Sequence
  derived and/or modified CDS sequence (wt) from hemagglutinin__InfluenzaA__ACI26549
augaagacuaucauugcuuugagcuacauuuucugucugguuuucgcccaaaaacuucccggaaaugacaacagcacagcaacgcugugccugggacaucaugcagugccaaacggaacgcuagugaaaacaaucacgaaugaucagauugaagugacuaaugcuacugagcugguucagaguuccucaacagguagaauaugcgacaguccucaccgaauccuugauggaaaaaacugcacacugauagaugcucuauugggagacccucauugugauggcuuccaaaaugagaaaugggaccuuuuuguugaacgcagcaaggcuuacagcaacuguuacccuuaugaugugccggauuaugccucccuuaggucacuaguugccucaucaggcacccuggaguuuaucaaugaagacuucaauuggacuggagucacucagagugggggaagcuauucuugcaaaaggggaucuguuaacaguuucuucaguagauugaauugguugcacgaaucagaauacaaauauccagcgcugaacgugacuaugccaaacaauggcaaauuugacaaauuguacauuugggggguucaccacccgagcacggacagagaacaaaccaaacuauauguucgagcaucagggagagucacagucucuaccaagagaagccagcaaacuguaaucccgaauaucgggucuagacccuggguaaggggucuguccaguagaauaagcaucuauuggacaauaguaaaaccgggagacauacuguugauuaauagcaccgggaaccuaauugcuccucgggguuacuucaaaauacgcacugggaaaagcucaauaaugaggucagaugcaccuauuggcaccugcaguucugaaugcaucacuccaaauggaagcauucccaaugacaaacccuuucaaaauguaaacaagaucacauauggggcaugucccagauauguuaagcaaaacacucugaaauuggcaacagggaugcggaauguaccagagaaacaaacuagaggcauauucggcgcaauagcagguuucauagaaaaugguugggagggaaugguagacgguugguacgguuucaggcaucaaaauucugagggcacaggacaagcagcagaucuuaaaagcacucaagcagcaaucgaccaaaucaacgggaaacugaauagguuaaucgagaaaacgaacgagaaauuccaucaaaucgaaaaggaauucucagaaguagaagggagaauucaggaccucgaggaauauguugaagacacuaaaauagaucucuggucuuacaacgcggagcuucuugucgcccuggagaaccaacauacaauugaucugacugacucagaaaugaacaaacuguuugaaaaaacaaggaagcaacugagggaaaaugcugaggacaugggcaaugguugcuucaagauauaccacaaaugugacaaugcuugcauagggucaaucagaaauggaacuuaugaccaugauguauacagagacgaagcauuaaacaaccgguuccagaucaaagguguugagcugaagucaggauacaaagacuggauccuauggauuuccuuugccauaucaugcuuuuugcuuuguguuguuuugcugggguucaucaugugggccugccaaaaaggcaacauuaggugcaacauuugcauuuga

SEQ ID NO: 34462 - RNA, 1701 nt, Artificial Sequence
  derived and/or modified CDS sequence (wt) from hemagglutinin__InfluenzaA__ACI26560
augaagaccaucauugcuuugagcuacauuuucugucugguuuucgcccaaaaacuucccggaaaugacaacagcacagcaacgcugugccuaggacaucaugcagugccaaacggaacgcuagugaaaacaaucacgaaugaccaaauugaagugacuaaugcuacugagcugguucagaguuccucaacaggucgaauaugcgacaguccucaccgaauccuugauggaaaaaacugcacacugauagaugcucuauugggagacccucauugugauggcuuccaaaauaaggaaugggaccuuuuuguugaacgcagcaaagcuuacagcaacuguuacccuuaugaugugccggauuaugccucccuuaggucacuaguugccucaucaggcacccuggaguuuaucaaugaagauuucaauuggacuggagucgcucagagugggggaagcuaugcuugcaaaaggggaucuguuaacaguuucuucaguagauugaauugguugcacgaaucagaauacaaauauccagcgcugaacgugacuaugccaaacaauggcaaauuugacaaauuguacauuugggggguucaccacccgaucacggacagagaacaaaccaaccuauauguucgagcaucagggagagucacagucucuaccaaaagaagccagcaaacuguaaucccgaauaucgggucuagacccuggguaaggggucuguccaguagaauaagcaucuauuggacaauaguaaaaccgggagacauacuguugauuaauagcaccgggaaccuaauugcuccucgggguuacuucaaaauacgaacuggaaaaagcucaauaaugaggucagaugcacccauuggcaccugcaguucugaaugcaucacuccaaauggaagcauucccaaugacaaacccuuucaaaauguaaacaggaucacauauggggcaugucccagauauguuaagcaaaacacucugaaauuggcaacagggaugcggaauguaccagagaaacaaacuagaggcauauucggcgcaaucgcagguuucauagaaaaugguugggagggaaugguagacgguugguacgguuucaggcaucaaaauucugagggcacaggacaagcagcagaucuuaaaagcacucaagcagcaaucgaccaaaucaacggaaaacugaauagguuaaucgagaaaacgaacgagaaauuccaucaaaucgaaaaggaauucucagaaguagaagggagaauucaggaccucgagaaauauguugaagacacuaaaauagaucucuggucuuacaacgcggagcuucuugucgcucuggagaaccaacauacaauugaucugacugacucagaaaugaacaaacuguuugaaaaaacaaggaagcaacugagggaaaaugcugaggacaugggcaaugguugcuucaagauauaccacaaaugugacaaugccugcauagggucaaucagaaauggaacuuaugaccaugauguauacagagacgaagcauuaaacaaccgguuccagaucaaagguguugagcuaaagucaggauacaaagacuggauccuauggauuuccuuugccauaucaugcuuuuugcuuuguguuguuuugcugggguucaucaugugggccugccaaaaaggcaacauuaggugcaacauuugcauuuga

SEQ ID NO: 34463 - RNA, 1701 nt, Artificial Sequence
  derived and/or modified CDS sequence (wt) from hemagglutinin__InfluenzaA__ACI26571
augaagaccaucauugcuuugagcuacauuuucugucugguuuucgcccaaaaacuucccggaaaugacaacagcacagcaacgcugugccuaggacaucaugcagugccaaacggaacgcuagugaaaacaaucacgaaugaccaaauugaagugacuaaugcuacugagcugguucagaguuccucaacaggucgaauaugcgacaguccucaccgaauccuugauggaaaaaacugcacacugauagaugcucuauugggagacccucauugugauggcuuccaaaauaaggaaugggaccuuuuuguugaacgcagcaaagcuuacagcaacuguuacccuuaugaugugccggauuaugccucccuuaggucacuaguugccucaucaggcacccuggaguuuaucaaugaagauuucaauuggacuggagucgcucagagugggggaagcuaugcuugcaaaaggggaucuguuaacaguuucuucaguagauugaauugguugcacgaaucagaauacaaauauccagcgcugaacgugacuaugccaaacaauggcaaauuugacaaauuguacauuugggggguucaccacccgagcacggacagagaacaaaccaaacuauauguucgagcaucagggagagucacagucucuaccaaaagaagccagcaaacuguaaucccgaauauugggucuagacccuggguaaggggucuguccaguagaauaagcaucuauuggacaauaguaaaaccgggagacauacuguugauuaauagcaccgggaaccuaauugcuccucgggguuacuucaaaauacgaacuggaaaaagcucaauaaugaggucagaugcacccauuggcaccugcaguucugaaugcaucacuccaaauggaagcauucccaaugacaaacccuuucaaaauguaaacaggaucacauauggggcaugucccagauauguuaagcaaaacacucugaaauuggcaacagggaugcggaauguaccagagaaacaaacuagaggcauauucggcgcaaucgcagguuucauagaaaaugguugggagggaaugguagacgguugguacgguuucaggcaucaaaauucugagggcacaggacaagcagcagaucuuaaaagcacucaagcagcaaucgaccaaaucaacgggaaacugaauagguuaaucgagaaaacgaacgagaaauuccaucaaaucgaaaaggaauucucagaaguagaagggagaauucaggaccucgagaaauauguugaagacacuaaaauagaucucuggucuuacaacgcggagcuucuugucgcucuggagaaccaacauacaauugaucugacugacucagaaaugaacaaacuguuugaaaaaacaaggaagcaacugagggaaaaugcugaggacaugggcaaugguugcuucaagauauaccacaaaugugacaaugccugcauagggucaaucagaaauggaacuuauaaccaugauguauacagagacgaagcauuaaacaaccgguuccagaucaaagguguugagcugaagucaggauacaaagacuggauccuauggauuuccuuugccauaucaugcuuuuugcuuuguguuguuuugcugggguucaucaugugggccugccaaaaaggcaacauuaggugcaacauuugcauuuga

SEQ ID NO: 34464 - RNA, 1701 nt, Artificial Sequence
  derived and/or modified CDS sequence (wt) from hemagglutinin__InfluenzaA__ACI26593
augaagacuaucauugcuuugagcuacauuuuaugucugguuuucgcccaaaaacuucccggaaaugacaacagcacagcaacgcugugccugggacaucaugcagugccaaacggaacgcuagugaaaacaaucacgaaugaucaaauugaagugacuaaugcuacugagcugguucagaguuccucaacagguagaauaugugacaguccucaccgaauccuugauggaaaaaauugcacacugauagaugcucuauugggagacccucauugugauggcuuccaaaauaaggaaugggaccuuuuuguugaacgcagcaaagcuuacagcaacuguuacccuuaugaugugccggauuaugccucccuuaggucacuaguugccucaucaggcacccuggaguuuaccaaugaagacuucaauuggacuggagucgcucagaguggggaaagcuaugcuugcaaaaggggaucuguuaaaaguuucuuuaguagauugaauugguugcacaaaucagauuacaaauauccagcgcugaacgugacuaugccaaacaauggcaaauuugacaaauuguacauuugggggguucaccacccgagcacggacagagaacaaaccagccuauauguucgagcaucagggagagucacagucuccaccaaaagaagccaacaaacugugaucccgaauaucgggucuagacccuggguaaggggucuguccaguagaauaagcaucuauuggacaauagugaaaccgggagacauacuuuugauuaauagcaccgggaaccuaauugcuccucgggguuacuucaaaauacgaacugggaaaagcucgauaaugagaucagaugcacccauuggcaccugcaguucugaaugcaucacuccaaauggaagcauccccaaugacaaaccuuuucaaaacguaaacaggaucacauauggggcaugucccagauauguuaagcaaaacacucugaaauuggcaacagggaugcggaauguaccagagaaacaaacuagaggcauauucggcgcaaucgcagguuucauagaaaaugguugggagggaaugguagacgguugguacgguuucaggcaucaaaauucugagggcacaggacaagcagcagaucuuaaaagcacucaagcagcaaucgaccaaaucaacgggaaacugaauagguuaaucgagaaaacgaacgagaaauuccaucaaaucgaaaaggaauucucagaaguagaagggagaauucaggaccucgagaaauauguugaagacacuaaaauagaucucuggucuuacaacgcggagcuucuuguugcccuggagaaccaacauacaauugaucugacugacucagaaaugaacaaacuguuugaaaaaacaaggaagcaacugagggaaaaugcugaggacaugggcaaugguugcuucaaaauauaccacaaaugugacaaugccugcauagggucaaucagaaauggaacuuaugaccaugauguauacagagacgaagcauuaaacaaccgguuccagaucaaagguguugagcugaagucaggauacaaagauuggauccuauggauuuccuuugccauaucaugcuuuuugcuuuguguuguuuugcugggguucaucaugugggccugccaaaaaggcaacauuaggugcaacauuugcauuuga

SEQ ID NO: 34465 - RNA, 1698 nt, Artificial Sequence
  derived and/or modified CDS sequence (wt) from hemagglutinin__InfluenzaA__ACI32715
augaaaguaaaacuacugguucuguuauguacauuuacagcuacauaugcagacacaauauguauaggcuaccaugccaacaacucaaccgacacuguugacacaguacuugagaagaaugugacagugacacacucugucaaccuacuugaggacagucacaauggaaaacuaugucuacuaaaaggaauagccccacuacaauuggguaauugcagcguugccggauggauccuaggaaacccagaaugcgaauuacugauuuccaaggaaucaugguccuacauuguagaaacaccaaauccugagaauggaacauguuacccaggguauuucgccgacuaugaggaacugagggagcaauugaguucaguaucuucauuugagagguucgaaauauuccccaaagagagcucauggcccaaccacaccguaaccggaguaucagcaucaugcucccauaacgggaaaagcaguuuuuacagaaauuugcuauggcugacggggaagaaugguuuguacccaaaccugagcaaguccuaugcaaacaacaaagagaaagaaguccuuguacuaugggguguucaucacccgccuaacauaggggaccaaagggcccucuaccauacagaaaaugcuuaugucucuguagugucuucacauuauagcagaagauucaccccagaaauagccaaaagacccaaggugagagaucaggaaggaagaaucaacuacuacuggacucugcuggaacccggggauacaauaauauuugaggcaaauggaaaucuaauagcgccaagguuugcuuucgcacugaguagaggcuuuggaucaggaaucaucaccucaaaugcaccaauggaugaaugugaugcgaagugucaaacaccucaaggagcuauaaacagcagccuuccuuuccagaauguacacccagucacaauaggagaguguccaaaguaugucaggagugcaaaauuaaggauggcuacaggacuaaggaacaucccauccauucaauccagagguuuguuuggagccauugccgguuucauugaagggggguggacuggaaugguagaugguugguaugguuaucaucaucagaaugagcaaggaucuggauaugcugcagaucaaaaaagcacacaaaaugccauuaacgggauuacaaacaaggugaauacuguaauugagaaaaugaacacucaauucacagcugugggcaaagaauucagcaaauuggagagaaggauggaaaacuuaaauaagaaaguugaugauggguuucuagacauuuggacauauaaugcagaauuguugguucuacuggaaaaugaaaggacuuuggauuuccaugacuccaacgugaagaaucuguaugagaaagugaaaagccaauuaaagaauaaugccaaagaaauaggaaacggguguuuugaauucuaucacaaguguaacgaugaaugcauggagagugugaaaaauggaacuuaugacuauccaaaauauuccgaagaaucaaaguuaaacagggagaaaauugauggagugaaauuggaaucaaugggagucuaucagauucuggcgaucuacucaacagucgccaguucccugguucuuuuggucucccugggggcaaucagcuucuggauguguuccaaugggucuuuacaguguagaauaugcaucuaa

SEQ ID NO: 34466 - RNA, 1698 nt, Artificial Sequence
  derived and/or modified CDS sequence (wt) from hemagglutinin__InfluenzaA__ACI32716
augaaaguaaaacuacugguucuguuauguacauuuacagcuacauaugcagacacaauauguauaggcuaccaugccaacaacucaaccgacacuguugacacaguacuugagaagaaugugacagugacacacucugucaaccuacuugaggacagucacaauggaaaacuaugucuacuaaaaggaauagccccacuacaauuggguaauugcagcguugccggauggaucuuaggaaacccagaaugcgaauuacugauuuccaaggagucaugguccuacauuguagaaacaccaaauccugagaauggaacauguuacccaggguauuucgccgacuaugaggaacugagggagcaauugaguucaguaucuucauuugagagguucgaaauauuccccaaagagagcucauggcccaaccacaccguaaccggaguaucagcaucaugcucccauaacgggaaaagcaguuuuuacagaaauuugcuauggcugacggggaagaaugguuuguacccaaaccugagcaaguccuaugcaaacaacaaagagaaagaaguccuuguacuaugggguguucaucacccgccuaacauaggggaccaaagggcccucuaucauacagaaaaugcuuaugucucuguagugucuucacauuauagcagaagauucaccccagaaauagccaaaagacccaaggugagagaucaggaaggaagaaucaacuacuacuggacucugcuggaacccggggauacaauaauauuugaggcaaauggaaaucuaauagcgccaagguuugcuuucgcacugaguagaggcuuuggaucaggaaucaucaccucaaaugcaccaauggaugaaugugaugcgaagugucaaacaccucaaggagcuauaaacagcagccuuccuuuccagaauguacacccagucacaauaggagaguguccaaaguaugucaggagugcaaaauuaaggauggcuacaggacuaaggaacaucccauccauucaauccagagguuuguuuggagccauugccgguuucauugaagggggguggacuggaaugguagaugguugguaugguuaucaucaucagaaugagcaaggaucuggauaugcugcagaucaaaaaagcacacaaaaugccauuaacgggauuacaaacaaggugaauucuguaauugagaaaaugaacacucaauucacagcugugggcaaagaauucagcaaauuggagagaaggauggaaaacuuaaauaagaaaguugaugauggguuucuagacauuuggacauauaaugcagaauuguugguucuacuggaaaaugaaaggacuuuggauuuccaugacuccaacgugaagaaucuguaugagaaagugaaaagccaauuaaagaauaaugccaaagaaauaggaaacggguguuuugaauucuaucacaaguguaacgaugaaugcauggagagugugaaaaauggaacuuaugacuauccaaaauauuccgaagaauccaaguuaaacagggagaaaauugauggagugaaauuggaaucaaugggagucuaucagauucuggcgaucuacucaacagucgccaguucccugguucuuuuggucucccugggggcaaucagcuucuggauguguuccaaugggucuuuacaguguacaauaugcaucuaa

SEQ ID NO: 34467 - RNA, 1698 nt, Artificial Sequence
  derived and/or modified CDS sequence (wt) from hemagglutinin__InfluenzaA__ACI32717
augaaaguaaaacuacugguucuguuauguacauuuacagcuacauaugcagacacaauauguauaggcuaccaugccaacaacucaaccgacacuguugacacaguacuugagaagaaugugacagugacacacucugucaaccuacuugaggacagucacaauggaaaacuaugucuacuaaaaggaauagccccacuacaauuggguaauugcagcguugccggauggaucuuaggaaacccagaaugcgaauuacugauuuccaaggaaucaugguccuacauuguagaaacaccaaauccugagaauggaacauguuacccaggguauuucgccgacuaugaggaacugagggagcaauugaguucaguaucuucauuugagagguucgaaauauuccccaaagagagcucauggcccaaccacaccguaaccggaguaucagcaucaugcucccauaacgggaaaagcaguuuuuacagaaauuugcuauggcugacggggaagaaugguuuguacccaaaccugagcaaguccuaugcaaacaacaaagagaaagaaguccuuguacuaugggguguucaucacccgccuaacauaggggaccaaagggcccucuaucauacagaaaaugcuuaugucucuguagugucuucacauuauagcagaagauucaccccagaaauagccaaaagacccaaggugagagaucaggaaggaagaaucaacuacuacuggacucugcuggaacccggggauacaauaauauuugaggcaaauggaaaucuaauagcgccaagguuugcuuucgcacugaguagaggcuuuggaucaggaaucaucacuucaaaugcaccaauggaugaaugugaugcgaagugucaaacaccucaaggagcuaugaacagcagucuuccuuuccagaauguacacccagucacaauaggagaguguccaaaguaugucaggagugcaaaauuaaggauggcuacaggacuaaggaacaucccauccauucaauccagagguuuguuuggagccauugccgguuucauugaagggggguggacuggaaugguagaugguugguaugguuaucaucaucagaaugagcaaggaucuggguaugcugcagaucaaaaaagcacacaaaaugccauuaacgggauuacaaacaaggugaauucuguaauugagaaaaugaacacucaauucacagcugugggcaaagaauucagcaaauuggagagaaggauggaaaacuuaaauaaaaaaguugaugauggguuucuagacauuuggacauauaaugcagaauuguugguucuacuggaaaaugaaaggacuuuggauuuccaugacuccaacgugaagaaucuguaugagaaagugaaaagccaauuaaagaauaaugccaaagaaauaggaaacggguguuuugaauucuaucacaaguguaacgaugaaugcauggagagugugaaaaauggaacuuaugacuauccaaaauauuccgaagaauccaaguuaaacagggagaaaauugauggagugaaauuggaaucaaugggagucuaucagauucuggcgaucuacucaacagucgccaguucccugguucuuuuggucucccugggggcaaucaacuucuggauguguuccaaugggucuuugcaguguaaaauaugcaucuaa

SEQ ID NO: 34468 - RNA, 1698 nt, Artificial Sequence
  derived and/or modified CDS sequence (wt) from hemagglutinin__InfluenzaA__ACI32718
augaaaguaaaacuacugguucuguuauguacauuuacagcuacauaugcagacacaauauguauaggcuaccaugccaacaacucaaccgacacuguugacacaguacuugagaagaaugugacagugacacacucugucaaccuacuugaggacagucacaauggaaaacuaugucuacuaaaaggaauagccccauuacaauuggguaauugcagcguugccggauggaucuuaggaaacccagaaugcgaauuacugauuuccaaggaaucaugguccuacauuguagaaacaccaaauccugagaauggaacauguuacccaggguauuucgccgacuaugaggaacugagggagcaauugaguucaguaucuucauuugagagguucgaaauauuccccaaagagagcucauggcccaaccacaccgcaaccggaguaucagcaucaugcucccauaacgggaaaagcaguuuuuacagaaauuugcuauggcugacggggaagaaugguuuguacccaaaccugagcaaguccuaugcaaacaacaaagagaaagaaguccuuguacuaugggguguucaucacccgccuaacauaggggaccaaagggcccucuaucauacagaaaaugcuuaugucucuguagugucuucacauuauagcagaagauucaccccagaaauagccaaaagacccaaggugagagaucaggaaggaagaaucaacuacuacuggacucugcuggaacccggggauacaauaauauuugaggcaaauggaaaucuaauagcgccaagguuugcuuucgcacugaguagaggcuuuggaucaggaaucaucaccucaaaugcaccaauggaugaaugugaugcgaagugucaaacaccucaaggagcuauaaacagcagucuuccuuuccagaauguacacccagucacaauaggggaguguccaaaguaugucaggagugcaaaauuaaggauggcuacaggacuaaggaacaucccauccauucaauccagagguuuguuuggagccauugccgguuucauugaagggggguggacuggaaugguagaugguugguaugguuaucaucaucagaaugagcaaggaucuggguaugcugcagaucaaaaaagcacacaaaaugccauuaacgggauuacaaacaaggugaauucuguaauugagaaaaugaacacucaauucacagcugugggcaaagaauucagcaaauuggagagaaggauggaaaacuuaaauaaaaaaguugaugauggauuucuagacauuuggacauauaaugcagaauuguugguucuacuggaaaaugaaaggacuuuggauuuccaugacuccaacgugaagaaucuguaugagaaagugaaaagccaauuaaagaauaaugccaaagaaguaggaaacggguguuuugaauucuaucacaaauguaacgaugaaugcauggagagugugaaaaauggaacuuaugacuauccaaaauauuccgaagaauccaaguuaaacagggagaaaauugauggagugaaauuggaaucaaugggagucuaucagauucuggcgaucuacucaacagucgccaguucccugguucuuuuggucucccugggggcaaucagcuucuggauguguuccaaugggucuuugcaguguacaauaugcaucuaa

SEQ ID NO: 34469 - RNA, 1698 nt, Artificial Sequence
  derived and/or modified CDS sequence (wt) from hemagglutinin__InfluenzaA__ACI32719
augaaaguaaaacuacugguucuguuauguacauuuacagcuacauaugcagacacaauauguauaggcuaccaugccaacaacucaaccgacacuguugacacaguacuugagaagaaugugacagugacacacucugucaaccuacuugaggacagucacaauggaaaacuaugucuacuaaaaggaauagccccacuacaauuggguaauugcagcguugccggauggaucuuaggaaacccagaaugcgaauuacugauuuccaaggaaucaugguccuacauuguagaaacaccaaauccugagaauggaacauguuacccaggguauuucgccgacuaugaggaacugagggagcaauugaguucaguaucuucauuugagagguucgaaauauuccccaaagagagcucauggcccaaccacaccguaaccggaguaucagcaucaugcucccauaacgggaaaagcaguuuuuacagaaauuugcuauggcugacggggaagaaugguuuguacccaaaccugagcaaguccuaugcaaacaacaaagagaaagaaguccuuguacuaugggguguucaucacccgccuaacauaggggaccaaagggcccucuaucauacagaaaaugcuuaugucucuguagugucuucacauuauagcagaagauucaccccagaaauagccaagagacccaaggugagagaucaggaaggaagaaucaacuacuacuggacucugcuggaacccggggauacaauaauauuugaggcaaauggaaaucuaauagcgccaagguuugcuuucgcacugaguagaggcuuuggaucaggaaucaucacuucaaaugcaccaauggaugaaugugaugcgaagugucaaacaccucaaggagcuauaaacagcagucuuccuuuccagaauguacacccagucacuauaggagaguguccaaaguaugucaggagugcaaaauuaaggauggcuacaggacuaaggaacaucccauccauucaauccagagguuuguuuggagccauugccgguuucauugaagggggguggacuggaaugguagaugguugguaugguuaucaucaucagaaugagcaaggaucuggguaugcugcagaucaaaaaagcacacaaaaugccauuaacgggauuacaaacaaggugaauucuguaauugagaaaaugaacacucaauucacagcugugggcaaagaauucagcaaauuggagagaaggauggaaaacuuaaauaaaaaaguugaugauggguuucuagacauuuggacauauaaugcagaauuguugguucuacuggaaaaugaaaggacuuuggauuuccaugacuccaacgugaagaaucuguaugagaaagugaaaagccaauuaaagaauaaugccaaagaaauaggaaacggguguuuugaauucuaucacaaauguaacgaugaaugcauggagagugugaaaaauggaacuuaugacuauccaaaauauuccgaagaauccaaguuaaacagggagaaaauugauggagugaaauuggaaucaaugggagucuaucagauucuggcgaucuacucaacagucgccaguucccugguucuuuuggucucccugggggcaaucagcuucuggauguguuccaaugggucuuugcaguguacaauaugcaucuaa

SEQ ID NO: 34470 - RNA, 1698 nt, Artificial Sequence
  derived and/or modified CDS sequence (wt) from hemagglutinin__InfluenzaA__ACI32720
augaaaguaaaacuacugguucuguuauguacauuuacagcuacauaugcagacacaauauguauaggcuaccaugccaacaacucaaccgacacuguugacacaguacuugagaagaaugugacagugacacacucugucaaccuacuugaggacagucacaauggaaaacuaugucuacuaaaaggaauagccccacuacaauuggguaauugcagcguugccggauggaucuuaggaaacccagaaugcgaauuacugauuuccaaggaaucaugguccuacauuguagaaacaccaaauccugagaauggaacauguuacccaggguauuucgccgacuaugaggaacugagggagcaauugaguucaguaucuucauuugagagguucgaaauauuccccaaagagagcucauggcccaaccacaccguaaccggaguaucagcaucaugcucccauaacgggaaaagcaguuuuuacagaaauuugcuauggcugacggggaagaaugguuuguacccaaaccugagcaaguccuaugcaaacaacaaagagaaagaaguccuuguacuaugggguguucaucacccgccuaacauaggggaccaaagggcccucuaucauacagaaaaugcuuaugucucuguagugucuucacauuauagcagaagauucaccccagaaauagccaaaagacccaaggugagggaucaggaaggaagaaucaacuacuacuggacucugcuggaacccggggauacaauaauauuugaggcaaauggaaaucuaauagcgccaagguuugcuuucgcacugaguagaggcuuuggaucaggaaucaucaccucaaaugcaccaauggaugaaugugaugcgaagugucaaacaccucaaggagcuauaaacagcagccuuccuuuccagaauguacacccagucacaauaggagaguguccaaaguaugucaggagugcaaaauuaaggauggcuacaggacuaaggaacaucccauccauucaauccagagguuuguuuggagccauugccgguuucauugaagggggguggacuggaaugguagaugguugguaugguuaucaucaucagaaugagcaaggaucuggguaugcugcagaucaaaaaagcacacaaaaugccauuaacgggauuacaaacaaggugaauucuguaauugagaaaaugaacacucaauucacagcugugggcaaagaauucagcaaauuggagagaaggauggaaaacuuaaauaagaaaguugaugauggguuucuagacauuuggacauauaaugcagaauuguugguucuacuggaaaaugaaaggacuuuggauuuccaugacuccaacgugaagaaucuguaugagaaagugaaaagccaauuaaagaauaaugccaaagaaauaggaaacggguguuuugaauucuaucacaaguguaacgaugaaugcauggagagugugaaaaauggaacuuaugacuauccaaaauauuccgaagaauccaaguuaaacagggagaaaauugauggagugaaauuggaaucaaugggagucuaucagauucuggcgaucuacucaacagucgccaguucccugguucuuuuggucucccugggggcaaucagcuucuggauguguuccaaugggucuuugcaguguacgauaugcaucuaa

SEQ ID NO: 34471 - RNA, 1698 nt, Artificial Sequence
  derived and/or modified CDS sequence (wt) from hemagglutinin__InfluenzaA__ACI32721
augaaaguaaaacuacugguucuguuauguacauuuacagcuacauaugcagacacaauauguauaggcuaccaugccaacaacucaaccgacacuguugacacaguacuugagaagaaugugacagugacacacucugucaaccuacuugaggacagucacaauggaaaacuaugucuacuaaaaggaauagccccacuacaauuggguaauugcagcguugccggauggaucuuaggaaacccagaaugcgaauuacugauuuccaaggaaucaugguccuacauuguagaaacaccaaauccugagaauggaacauguuacccaggguauuucgccgacuaugaggaacugagggagcaauugaguucaguaucuucauuugagagguucgaaauauuccccaaagagagcucauggcccaaccacaccguaaccggaguaucagcaucaugcucccauaacgggaaaagcaguuuuuacagaaauuugcuauggcugacggggaagaaugguuuguacccaaaccugagcaaguccuaugcaaacaacaaagagaaagaaguccuuguacuaugggguguucaucacccgccuaacauaggggaccaaagggcccucuaucauacagaaaaugcuuaugucucuguagugucuucacauuauagcagaagauucaccccagaaauagccaaaagacccaaggugagagaucaggaaggaagaaucagcuacuacuggacucugcuggaacccggggauacaauaauauuugaggcaaauggaaaucuaauagcgccaagguuugcuuucgcacugaguagaggcuuuggaucaggaaucaucaccucaaaugcaccaauggaugaaugugaugcgaagugucaaacaccucaaggagcuauaaacagcagccuuccuuuccagaauguacacccagucacaauaggagaguguccaaaguaugucaggagugcaaaauuaaggauggcuacaggacuaaggaacaucccauccauucaauccagagguuuguuuggagccauugccgguuucauugaagggggguggacuggaaugguagaugguugguaugguuaccaucaucagaaugagcaaggaucuggguaugcugcagaucaaaaaagcacacaaaaugccauuaacgggauuacaaacaaggugaauucuguaauugagaaaaugaacacucaauucacagcugugggcaaagaauucagcaaauuggaaagaaggauggaaaacuuaaauaagaaaguugaugauggguuucuagacauuuggacauauaaugcagaauuguugguucuacuggaaaaugaaaggacuuuggauuuccaugacuccaacgugaagaaucuguaugagaaagugaaaagccaauuaaagaauaaugccaaagaaauaggaaacggguguuuugaauucuaucacaaguguaacgaugaaugcauggagagugugaaaaauggaacuuaugacuauccaaaauauuccgaagaaucaaaguuaaacagggagaaaauugauggagugaaauuggaaucaaugggagucuaucagauucuggcgaucuacucaacagucgccaguucccugguucuuuuggucucccugggggcaaucagcuucuggauguguuccaaugggucuuugcaguguagaauaugcaucuaa

SEQ ID NO: 34472 - RNA, 1698 nt, Artificial Sequence
  derived and/or modified CDS sequence (wt) from hemagglutinin__InfluenzaA__ACI32722
augaaaguaaaacuacugguucuguuauguacauuuacagcuacauaugcagacacaauauguauaggcuaccaugccaacaacucaaccgacacuguugacacaguacuugagaagaaugugacagugacacacucugucaaccuacuugaggacagucacaaugggaaacuaugucuacuaaaaggaauagccccacuacaauuggguaauugcagcguugccggauggaucuuaggaaacccagaaugcgaauuacugauuuccaaggaaucaugguccuacauuguagaaacaccaaauccugagaauggaacauguuacccaggguauuucgccgacuaugaagaacugagggagcaauugaguucaguaucuucauuugagagguucgaaauauuccccaaagagagcucauggcccaaccacaccguaaccggaguaucagcaucaugcucccauaacgggaaaagcaguuuuuacagaaauuugcuauggcugacggggaagaaugguuuguacccaaaccugagcaaguccuaugcaaacaacaaagagaaagaaguccuuguacuaugggguguucaucacccgccuaacauaggggaccaaagggcccucuaucauacagaaaaugcuuaugucucuguagugucuucacauuauagcagaagauucaccccagaaauagccaaaagacccaaggugagagaucaggaaggaagaaucaacuacuacuggacucugcuggaacccggggauacaauaaucuuugaggcaaauggaaaucuaauagcgccaagguuugcuuucgcacugaguagaggcuuuggaucaggaaucaucaccucaaaugcaccaauggaugaaugugaugcgaagugucaaacaccucaaggagcuauaaacagcagccuuccuuuccagaauguacacccagucacaauaggagaguguccaaaguaugucaggagugcaaaauuaaggauggcuacaggacuaaggaacaucccauccauucaauccagagguuuguuuggagccauugccgguuucauugaagggggguggacuggaaugguagaugguugguaugguuaucaucaucagaaugagcaaggaucuggguaugcugcagaucaaaaaagcacacaaaaugccauuaacgggauuacaaacaaggugaauucuguaauugagaaaaugaacacucaauucacagcugugggcaaagaauucagcaaauuggagagaaggauggaaaacuuaaauaagaaaguugaugauggguuucuagacauuuggacauauaaugcagaauuguugguucuacuggaaaaugaaaggacuuuggauuuccaugacuccaacgugaagaaucuguaugagaaagugaaaagccaauuaaagaauaaugccaaagaaauaggaaacggguguuuugaauucuaucacaaguguaacgaugaaugcauggagagugugaaaaauggaacuuaugacuauccaaaauauuccgaagaauccaaguuaaacagggagaaaauugauggagugaaauuggaaucaaugggagucuaucagauucuggcgaucuacucaacagucgccaguucccugguucuuuuggucucccugggggcaaucagcuucuggauguguuccaaugggucuuugcaguguacaauaugcaucuaa

SEQ ID NO: 34473 - RNA, 1698 nt, Artificial Sequence
  derived and/or modified CDS sequence (wt) from hemagglutinin__InfluenzaA__ACI32723
augaaaguaaaacuacugguucuguuauguacauuuacagcuacauaugcagacacaauauguauaggcuaccaugccaacaacucaaccgacacuguugacacaguacuugagaagaaugugacagugacacacucugucaaccuacuugaggacagucacaauggaaaacuaugucuacuaaaaggaauagccccacuacaauuggguaauugcagcguugccggauggaucuuaggaaacccagaaugcgaauuacugauuuccaaggaaucaugguccuacauuguagaaacaccaaauccugagaauggaacauguuacccaggguauuucgccgacuaugaagaacugagggagcaauugaguucaguaucuucauuugagagguucgaaauauuccccaaagagagcucauggcccaaccacaccguaaccggaguaucagcaucaugcucccauaacgggaaaagcaguuuuuacagaaauuugcuauggcugacggggaagaaugguuuguacccaaaccugagcaaguccuaugcaaacaacaaagagaaagaaguccuuguacuaugggguguucaucacccgccuaacauaggggaccaaagggcccucuaucauacagaaaaugcuuaugucucuguagugucuucacauuauagcagaagauucaccccagaaauagccaaaagacccaaggugagagaucaggaaggaagaaucaacuacuacuggacucugcuggaacccggggauacaauaaucuuugaggcaaauggaaaucuaauagcgccaagguuugcuuucgcacugaguagaggcuuuggaucaggaaucaucaccucaaaugcaccaauggaugaaugugaugcgaagugucaaacaccucaaggagcuauaaacagcagccuuccuuuccagaauguacacccagucacaauaggagaguguccaaaguaugucaggagugcaaaauuaaggauggcuacaggacuaaggaacaucccauccauucaauccagagguuuguuuggagccauugccgguuucauugaagggggguggacuggaaugguagaugguugguaugguuaucaucaucagaaugagcaaggaucuggguaugcugcagaucaaaaaagcacacaaaaugccauuaacgggauuacaaacaaggugaauucuguaauugagaaaaugaacacucaauucacagcugugggcaaagaauucagcaaauuggagagaaggauggaaaacuuaaauaagaaaguugaugauggguuucuagacauuuggacauauaaugcagaauuguugguucuacuggaaaaugaaaggacuuuggauuuccaugacuccaacgugaagaaucuguaugagaaagugaaaagccaauuaaagaauaaugccaaagaaauaggaaacggguguuuugaauucuaucacaaguguaacgaugaaugcauggagagugugaaaaauggaacuuaugacuauccaaaauauuccgaagaaucaaaguuaaacagggagaaaauugauggagugaaauuggaaucaaugggagucuaucagauucuggcgaucuacucaacagucgccaguucccugguucuuuuggucucccugggggcaaucagcuucuggauguguuccaaugggucuuugcaguguagaauaugcuucuaa

SEQ ID NO: 34474 - RNA, 1698 nt, Artificial Sequence
  derived and/or modified CDS sequence (wt) from hemagglutinin__InfluenzaA__ACI32724
augaaaguaaaacuacugguucuguuauguacauuuacagcuacauaugcagacacaauauguauaggcuaccaugccaacaacucaaccgacacuguugacacaguacuugagaagaaugugacagugacacacucugucaaccuacuugaggacagucacaauggaaaacuaugucuacuaaaaggaauagccccacuacaauuggguaauugcagcguugccggauggaucuuaggaaacccagaaugcgaauuacugauuuccaaggaaucaugguccuacauuguagaaacaccaaauccugagaauggaacauguuacccaggguauuucgccgacuaugaggaacugagggagcaauugaguucaguaucuucauuugagagguucgaaauauuccccaaagagagcucauggcccaaccacaccguaaccggaguaucagcaucaugcucccauaacgggaaaagcaguuuuuacagaaauuugcuauggcugacggggaagaaugguuuguacccaaaccugagcaaguccuaugcaaacaacaaagagaaagaaguccuuguacuaugggguguucaucacccgccuaacauaggggaccaaagggcccucuaucauacagaaaaugcuuaugucucuguagugucuucacauuauagcagaagauucaccccagaaauagccaaaagacccaaggugagagaucaggaaggaagaaucaacuacuacuggacucugcugaaacccggggauacaauaaucuuugaggcaaauggaaaucuaauagcgccaagguuugcuuucgcacugaguagaggcuuuggaucaggaaucaucaccucaaaugcaccaauggaugaaugugaugcgaagugucaaacaccucaaggagcuauaaacagcagccuuccuuuccagaauguacacccagucacaauaggagaguguccaaaguaugucaggagugcaaaauuaaggauggcuacaggacuaaggaacaucccauccauucaauccagagguuuguuuggagccauugccgguuucauugaagggggguggacuggaaugguagaugguugguaugguuaucaucaucagaaugagcaaggaucuggguaugcugcagaucaaaaaagcacacaaaaugccauuaacgggauuacaaacaaggugaauucuguaauugagaaaaugaacacucaauucacagcugugggcaaagaauucagcaaauuggagagaaggauggaaaacuuaaauaagaaaguugaugauggguuucuagacauuuggacauauaaugcagaauuguugguucuacuggaaaaugaaaggacuuuggauuuccaugacuccaacgugaagaaucuguaugagaaagugaaaagccaauuaaagaauaaugccaaagaaauaggaaacggguguuuugaauucuaucacaaguguaacgaugaaugcauggagagugugaaaaauggaacuuaugacuauccaaaauauuccgaagaaucaaaguuaaacagggagaaaauugauggagugaaauuggaaucaaugggagucuaucagauucuggcgaucuacucaacagucgccaguucccugguucuuuuggucucccugggggcaaucagcuucuggauguguuccaaugggucuuugcaguguaaaauaugcaucuaa

SEQ ID NO: 34475 - RNA, 1698 nt, Artificial Sequence
  derived and/or modified CDS sequence (wt) from hemagglutinin__InfluenzaA__ACI32725
augaaaguaaaacuacugguucuguuauguacauuuacagcuacauaugcagacacaauauguauaggcuaccaugccaacaacucaaccgacacuguugacacaguacuugagaagaaugugacagugacacacucugucaaccuacuugaggacagucacaauggaaaacuaugucuacuaaaaggaauagccccacuacaauuggguaauugcagcguugccggauggaucuuaggaaacccagaaugcgaauuacugauuuccaaggaaucaugguccuacauuguagaaacaccaaauccugagaauggaacauguuacccaggguauuucgccgacuaugaggaacugagggagcaauugaguucaguaucuucauuugagagguucgaaauauuccccaaagagagcucauggcccaaccacaccguaaccggaguaucagcaucaugcucccauaacgggaaaagcaguuuuuacagaaauuugcuauggcugacggggaagaaugguuuguacccaaaccugagcaaguccuaugcaaacaacaaagagaaagaaguccuuguacuaugggguguucaucacccgccuaacauaggggaccaaagggcccucuaucauacagaaaaugcuuaugucucuguagugucuucacauuauagcagaagauucaccccagaaauagccaaaagacccaaggugagagaucaggaaggaagaaucaacuacuacuggacucugcuggaacccggggauacaauaauauuugaggcaaauggaaaucuaauagcgccaagguuugcuuucgcacugaguagaggcuuuggaucaggaaucaucacuucaaaugcaccaauggaugaaugugaugcgaagugucaaacaccucaaggagcuauaaacagcagucuuccuuuccagaauguacacccagucacaauaggagaguguccaaaguaugucaggagugcaaaauuaaggauggcuacaggacuaaggaacaucccauccauucaauccagagguuuguuuggagccauugccgguuucauugaagggggguggacuggaaugguagaugguugguaugguuaucaucaucagaaugagcaaggaucuggguaugcugcagaucaaaaaagcacacaaaaugccauuaacgggauuacaaacaaggugaauucuguaauugagaaaaugaacacucaauucacagcugugggcaaagaauucagcaaauuagagagaaggauggaaaauuuaaauaaaaaaguugaugauggguuucuagacauuuggacauauaaugcagaauuguugguucuacuggaaaaugaaaggacuuuggauuuccaugacuccaacgugaagaaucuguaugagaaagugaaaagccaauuaaagaauaaugccaaagaaauaggaaacggguguuuugaauucuaucacaaguguaacgaugaaugcauggagagugugaaaaauggaacuuaugacuauccaaaauauuccgaagaaucaaaguuaaacagggagaaaauugauggagugaaauuggaaucaaugggagucuaucagauucuggcgaucuacucaacagucgccaguucccugguucuuuuggucucccugggggcaaucagcuucuggauguguuccaaugggucuuugcaguguagaauaugcaucuaa

SEQ ID NO: 34476 - RNA, 1698 nt, Artificial Sequence
  derived and/or modified CDS sequence (wt) from hemagglutinin__InfluenzaA__ACI32726
augaaaguaaaacuacugguucuguuauguacauuuacagcuacauaugcagacacaauauguauaggcuaccaugccaacaacucaaccgacacuguugacacaguacuugagaagaaugugacagugacacacucugucaaccuacuugaggacagucacaauggaaaacuaugucuacuaaaaggaauagccccacuacaauuggguaauugcagcguugccggauggauccuaggaaacccagaaugcgaauuacugauuuccaaggaaucaugguccuacauuguagaaacaccaaauccugagaauggaacauguuacccaggguauuucgccgacuaugaggaacugagggagcaauugaguucaguaucuucauuugagagguucgaaauauuccccaaagagagcucauggcccaaccacaccguaaccggaguaucagcaucaugcucccauaacgggaaaagcaguuuuuacagaaauuugcuauggcugacggggaaaaaugguuuguacccaaaccugagcaaguccuaugcaaacaacaaagagaaagaaguccuuguacuaugggguguucaucacccgcccaacauaggggaccaaagggcccucuaucauacagaaaaugcuuaugucucuguagugucuucacauuauagcagaagauucaccccagaaauagccaaaagacccaaggugagagaucaggaaggaagaaucaacuacuacuggacucugcuggaacccggggauacaauaauauuugaggcaaauggaaaucuaauagcgccaagguuugcuuucgcacugaguagaggcuuuggaucaggaaucaucacuucaaaugcaccaauggaugaaugugaugcgaagugucaaacaccucaaggagcuauaaacagcagucuuccuuuccagaauguacacccagucacaauaggagaguguccaaaguaugucaggagugcaaaauuaaggauggcuacaggacuaaggaacaucccauccauucaauccagagguuuguuuggagccauugccgguuucauugaagggggguggacuggaaugguagaugguugguaugguuaucaucaucagaaugagcaaggaucuggguaugcugcagaucaaaaaagcacacaaaaugccauuaacgggauuacaaacaaggugaauucuguaauugagaaaaugaacacucaauucacagcugugggcaaagaauucagcaaauuggagaaaaggauggaaaacuuaaauaaaaaaguugaugauggguuucuagacauuuggacauauaaugcagaauuguugguucuacuggaaaaugaaaggacuuuggauuuccaugacuccaacgugaagaaucuguaugagaaagugaaaagccaauuaaagaauaaugccaaagaaauaggaaacggguguuuugaauucuaucacaaguguaacgaugaaugcauggagagugugaaaaauggaacuuaugacuauccaaaauauuccgaagaauccaaguuaaacagggagaaaauugauggagugaaauuggaaucaaugggaaucuaucagauucuggcgaucuacucaacagucaccaguucccugguucuuuuggucucccugggggcaaucagcuucuggauguguuccaaugggucuuugcaguguagaauaugcaucuaa

SEQ ID NO: 34477 - RNA, 1698 nt, Artificial Sequence
  derived and/or modified CDS sequence (wt) from hemagglutinin__InfluenzaA__ACI32727
augaaaguaaaacuacugguucuguuauguacauuuacagcuacauaugcagacacaauauguauaggcuaccaugccaacaacucaaccgacacuguugacacaguacuugagaagaaugugacagugacacacucugucaaccuacuugaggacagucacaauggaaaacuaugucuacuaaaaggaauagccccacuacaauuggguaauugcagcguugccggauggaucuuaggaaacccagaaugcgaauuacugauuuccaaggaaucaugguccuacauuguagaaacaccaaauccugagaauggaacauguuacccaggguauuucgccgacuaugaggaacugagggagcaauugaguucaauaucuucauuugagagguucgaaauauuccccaaagagagcucauggcccaaccacaccguaaccggaguaucagcaucaugcucccauaacgggaaaagcaguuuuuacagaaauuugcuauggcugacggggaagaauggcuuguacccaaaccugagcaaguccuaugcaaacaacaaagagaaagaaguccuuguacuaugggguguucaucacccgcccaacauaggggaccaaagggcccucuaucauacagaaaaugcuuaugucucuguagugucuucacauuauagcagaagauucaccccagaaauagccaaaagacccaaggugagagaucaggaaggaagaaucaacuacuacuggacucugcuggaacccggggauacaauaauauuugaggcaaauggaaaucuaauagcgccaagguuugcuuucgcacugaguagaggcuuuggaucaggaaucaucacuucaaaugcaccaauggaugaaugugaugcgaagugucaaacaccucaaggagcuauaaacagcagucuuccuuuccagaauguacacccagucacaauaggagaguguccaaaguaugucaggagugcaaaauuaaggauggcuacaggacuaaggaacaucccauccauucaauccagagguuuguuuggagccauugccgguuucauugaagggggguggacuggaaugguagaugguugguaugguuaucaucaucagaaugagcaaggaucuggguaugcugcagaucaaaaaagcacacaaaaugccauuaacgggauuacaaacaaggugaauucuguaauugagaaaaugaacacucaauucacagcugugggcaaagaauucagcaaauuggagagaaggauggaaaacuuaaauaaaaaaguugaugauggguuucuagacauuuggacauauaaugcagaauuguugguucuacuggaaaaugaaaggacuuuggauuuccaugacuccaacgugaagaaucuguaugagaaagugaaaagccaauuaaagaauaaugccaaagaaauaggaaacggguguuuugaauucuaucacaaguguaacgaugaaugcauggagagugugaaaaauggaacuuaugacuauccaaaauauuccgaagaaucaaaguuaaacagggagaaaauugauggagugaaauuggaaucaaugggaguauaucagauucuggcgaucuacucaacagucgccaguucccugguucuuuuggucacccugggggcaaucagcuucuggauguguuccaaugggucuuugcaguguacaauaugcaucuaa

SEQ ID NO: 34478 - RNA, 1698 nt, Artificial Sequence
  derived and/or modified CDS sequence (wt) from hemagglutinin__InfluenzaA__ACI32729
augaaaguaaaacuacugguucuguuauguacauuuacagcuacauaugcagacacaauauguauaggcuaccaugccaacaacucgaccgacacuguugacacaguacuugagaaaaaugugacagugacacacucugucaaccuacuugaggacagucacaauggaaaacuaugucuacuaaaaggaauagccccacuacaauuggguaauugcagcguugccggauggaucuuaggaaacccagaaugcgaauuacugauucccaaggaaucaugguccuacauuguagaaacaccaaauccugaaaauggaacauguuacccaggguauuucgccgacuaugaggagcugagggagcaauugaguucaguaucuucauuugagagguucgaaauauuccccaaagaaagcucauggcccaaccacaccguaaccggaguaucagcaucaugcucccauaacgggaaaagcaguuuuuacagaaauuugcuauggcugacggggaagaaugguuuguauccaaaccugagcaaguccuaugcaaacaacaaagagaaagaaguccuuguacugugggguguucaucacccgcccaacauaggggaccaaagggcccucuaucauacagaaaaugcuuaugucucuguagugucuucacauuauagcagaagauucaccccagaaauagccaaaagacccaaggugagagaucaggaaggaagaaucaacuacuacuggacucugcuggaacccggggauacaauaauauuugaggcaaauggaaaucuaauagcgccaagauuugcuuucgcacugaguagaggcuuuggaucaggaaucaucaccucaaaugcaccaauggaugaaugugaugcgaagugucaaacaccucagggagcuauaaacagcagucuuccuuuccagaauguacacccagucacaauaggagaguguccaaaguaugucaggagugcaaaauuaagaaugguuacaggacuaaggaacaucccauccauucaauccagagguuuguuuggagccauugccgguuucauugaagggggguggacuggaaugguagaugguugguaugguuaucaccaucagaaugagcaaggaucuggguaugcugcagaucaaaaaagcacacaaaaugccauuaacgggguuacaaacaaggugaauucuguaauugagaaaaugaacacucaauucacagcugugggcaaagaauucaacaaauuggaaagaaggauggaaaacuuaaauaaaaaaguugaugauggguuucuagacauuuggacauauaacgcagaauuguugguucuacuggaaaaugaaaggacuuuggacuuccaugacuccaacgugaagaaucuguaugagaaaguaaaaagccaauuaaagaauaaugccaaagaaauaggaaacggguguuuugaauucuaucacaaguguaacgaugaaugcauggagagugugaaaaauggaacuuaugacuauccaaaauauuccgaagaaucaaaguugaacagggagaaaauugauggagugaaauuggaaucaaugggagucuaucagauucuggcgaucuacucaacagucgccaguucccugguucuuuuggucucccugggggcaaucagcuucuggauguguuccaaugggucuuugcaguguagaauaugcaucuaa

SEQ ID NO: 34479 - RNA, 1698 nt, Artificial Sequence; identical to SEQ ID NO: 34478
  derived and/or modified CDS sequence (wt) from hemagglutinin__InfluenzaA__ACI32730

SEQ ID NO: 34480 - RNA, 1698 nt, Artificial Sequence
  derived and/or modified CDS sequence (wt) from hemagglutinin__InfluenzaA__ACI32731
augaaaguaaaacuacugguccuguuaugcacauuuacagcuacauaugcagacacaauauguauaggcuaccaugccaacaacucaaccgacacuguugacacaguacuugaaaagaaugugacagugacacacucugucaaccugcuugaggacagucacaauggaaaacuaugucuauuaaaaggaauagccccacuacaauuggguaauugcagcguugccggguggaucuuaggaaacccagaaugcgaauuacugauuuccaaggagucaugguccuacauuguagaaaaaccaaauccugagaauggaacauguuacccagggcauuucgcugacuaugaggaacugagggagcaauugaguucaguaucuucauuugagagguucgaaauauuccccaaagaaagcucauggcccaaccacaccguaaccggaguaucagcaucaugcucccauaaugggaaaagcaguuuuuacaaaaauuugcuauggcugacggggaagaaugguuuguacccaaaccugagcaaguccuaugcaaacaacaaagagaaagaaguccuuguacuaugggguguucaucacccgccaaacauaggugaccaaaaggcccucuaucauacagaaaaugcuuaugucucuguagugucuucacauuauagcagaaaauucaacccagaaauagccaaaagacccaaaguaagagaucaagaaggaagaaucaacuacuacuggacucugcuugaacccggggauacaauaauauuugaggcaaauggaaaucuaauagcgccaagauaugcuuucgcacugaguagaggcuuuggaucaggaaucaucaacucaaaugcaccaauggaugaaugugaugcgaagugccaaacaccucagggagcuauaaacagcagucuuccuuuccagaauguacacccagucacaauaggagaguguccaaaguaugucaggagugcaaaauuaaggaugguuacaggacuaaggaacaucccauccauucaauccagagguuuguuuggagccauugcugguuucauugaagggggguggacuggaaugguagaugguugguaugguuaucaucaucagaaugagcaaggaucuggcuaugcugcagaucaaaaaagcacacaaaaugccauuaaugggauuacaaacaaggugaauucuguaauugaaaaaaugaacacucaauucacagcagugggcaaagaauucaacaaauuggaaagaaggauggaaaacuuaaauaaaaaaguugaugauggguuuauagacauuuggacauauaaugcagaacuguugguucuacuggaaaaugaaaggacuuuggauuuccaugacuccaaugugaagaaucuguaugagaaaguaaaaagccaguuaaagaauaaugccaaagaaauaggaaauggguguuuugaauucuaucacaaguguaacgaugaaugcauggagaguguaaaaaauggaacuuaugacuauccaaaauauuccgaagaaucaaaguuaaacagggagaaaauugauggagugaaauuggaaucaaugggagucuaucagauucuggcgaucuacucaacagucgccaguucucugguucuuuuggucucccugggggcaaucagcuucuggauguguuccaaugggucuuugcaguguaaaauaugcaucuaa

SEQ ID NO: 34481 - RNA, 1698 nt, Artificial Sequence
  derived and/or modified CDS sequence (wt) from hemagglutinin__InfluenzaA__ACI32732
augaaaguaaaacuacugguucuguuauguacauuuacagcuacauaugcagacacaauauguauaggcuaucaugccaacaacucgaccgacacuguugacacaguacuugagaagaaugugacagugacacacucugucaaccuacuugaggacagucacaauggaaaacuaugucuacuaaaaggaauagccccacuacaauuggguaauugcagcguugccggauggaucuuaggaaacccagaaugcgaauuacugauuuccaaggaaucaugguccuacauuguagaaacaccaaauccugagaauggaacauguuacccaggguauuucgccgacuaugaggagcugagggagcaauugaguucaguaucuucauuugagagguucgaaauauuccccaaagaaagcucauggcccaaccacaccguaaccggaguaucagcaucaugcucccauaacgggaaaagcaguuuuuacagaaauuugcuauggcugacggggaagaauggcuuguacccaaaccugagcaaguccuaugcaaacaacaaagagaaagaaguccuuguacugugggguguucaucacccgccuaacauaggggaccaaagggcccuauaucauacagaaaaugcuuaugucucuguagugucuucacauuauagcagaagauucaccccagaaauagccaaaagacccaaggugagagaucaggaaggaagaaucaacuacuacuggacucugcuggaacccggggauacaauaauauuugaggcaaauggaaaucuaauagcgccaagguuugcuuucgcacugaguagaggcuuuggaucaggaaucaucaccucaaaugcaccaauggaugaaugugaugcgaagugucaaacaccucagggagcuauaaacagcagucuuccuuuccagaauguacacccagucacaauaggagaguguccaaaguaugucaggagugcaaaauuaagaaugguuacaggacuaaggaacaucccauccauucaauccagagguuuguuuggagccauugccgguuucauugaagggggguggacuggaaugguagaugguugguaugguuaucaccaucagaaugagcaaggaucuggguaugcugcagaucaaaaaagcacacaaaaugccauuaacgggauuacaaacaaggugaauucuguaauugagaaaaugaacacucaauucacagcugugggcaaagaauucaacaaauuggaaagaaggauggaaaacuuaaauaaaaaaguugaugauggguuucuagacauuuggacauauaacgcagaauuguugguucuacuggaaaaugaaaggacuuuggacuuccaugacuccaacgugaagaaucuguaugagaaaguaaaaagccaauuaaagaauaaugccaaagaaauaggaaacggguguuuugaauucuaucacaaguguaacgaugaaugcauggagagugugaaaaauggaacuuaugacuauccaaaauauuccgaagaauccaaguugaacagggagaaaauugauggagugaaauuggaauccaugggagucuaucagauucuggcgaucuacucaacagucgccaguucccugguucuuuuggucucccugggggcaaucagcuucuggauguguuccaaugggucuuugcaguguacaauaugcaucuaa

SEQ ID NO: 34482 - RNA, 1698 nt, Artificial Sequence
  derived and/or modified CDS sequence (wt) from hemagglutinin__InfluenzaA__ACI32733
augaaaguaaaacuacugguccuguuaugcacauuuacagcuacauaugcagacacaauauguauaggcuaccaugccaacaacucaaccgacacuguugacacaguacuugaaaagaaugugacagugacacacucugucaaccugcuugaggacagucacaauggaaaacuaugucuauuaaaaggaauagccccacuacaauuggguaauugcagcguugccggguggaucuuaggaaacccagaaugcgaauuacugauuuccaaggagucaugguccuacauuguagaaaaaccaaauccugagaauggaacauguuacccagggcauuucgcugacuaugaggaacugagggagcaauugaguucaguaucuucauuugagagguucgaaauauuccccaaagaaagcucauggcccaaccacaccguaaccggaguaucagcaucaugcucccauaaugggaaaagcaguuuuuacaaaaauuugcuauggcugacggggaagaaugguuuguacccaaaccugagcaaguccuaugcaaacaacaaagagaaagaaguccuuguacuaugggguguucaucacccgccaaacauaggugaccaaaaggcccucuaucauacagaaaaugcuuaugucucuguagugucuucacauuauagcagaaaauucaacucagaaauagccaaaagacccaaaguaagagaucaagaaggaagaaucaacuacuacuggacucugcuugaacccggggauacaauaauauuugaggcaaauggaaaucuaauagcgccaagauaugcuuucgcacugaguagaggcuuuggaucaggaaucaucaacucaaaugcaccaauggaugaaugugaugcgaagugccaaacaccucagggagcuauaaacagcagucuuccuuuccagaauguacacccagucacaauaggagaguguccaaaguaugucaggagugcaaaauuaaggaugguuacaggacuaaggaacaucccauccauucaauccagagguuuguuuggagccauugcugguuucauugaagggggguggacuggaaugguagaugguugguaugguuaucaucaucagaaugagcaaggaucuggcuaugcugcagaucaaaaaagcacacaaaaugccauuaaugggauuacaaacaaggugaauucuguaauugaaaaaaugaacacucaauucacagcagugggcaaagaauucaacaaauuggaaagaaggauggaaaacuuaaauaaaaaaguugaugauggguuuauagacauuuggacauauaaugcagaacuguugguucuacuggaaaaugaaaggacuuuggauuuccaugacuccaaugugaagaaucuguaugagaaaguaaaaagccaguuaaagaauaaugccaaagaaauaggaaauggguguuuugaauucuaccacaaguguaacgaugaaugcauggagaguguaaaaaauggaacuuaugacuauccaaaauauuccgaagaaucaaaguuaaacagggagaaaauugauggagugaaauuggaaucaaugggagucuaucagauucuggcgaucuacucaacagucgccaguucucugguucuuuuggucucccugggggcaaucagcuucuggauguguuccaaugggucuuugcaguguacaauaugcaucuaa

SEQ ID NO: 34483 - RNA, 1698 nt, Artificial Sequence
  derived and/or modified CDS sequence (wt) from hemagglutinin__InfluenzaA__ACI32734
augaaaguaaaacuacugguucuguuauguacauuuacagcuacauaugcagacacaauauguauaggcuaccaugccaacaacucgaccgacacuguugacacaguacuugagaagaaugugacagugacacacucugucaaccuacuugaggacagucacaauggaaaacuaugucuacuaaaaggaauagccccacuacaauuggguaauugcagcguugccggauggaucuuaggaaacccagaaugcgaauuacugauuuccaaggaaucaugguccuacauuguagaaacaccaaauccugagaauggaacauguuacccaggguauuucgccgacuaugaggagcugagggagcaauugaguucaguaucuucauuugagagguucgaaauauuccccaaagagagcucauggcccaaccacaccguaaccggaguaucagcaucaugcucccauaacgggaaaagcaguuuuuacagaaauuugcuauggcugacggggaagaaugguuuguacccaaaccugagcaaguccuaugcaaacaacaaaaagaaagaaguccuuguacugugggguguucaucacccgccuaacauaggggaccaaaaggcccucuaucauacagaaaaugcuuaugucucuguagugucuucacauuauagcagaagauucaccccagaaauagccaaaagacccaaggugagagaucaggaaggaagaaucaacuacuacuggacucugcuggaacccggggauacaauaauauuugaggcaaauggaaaucuaauagcgccaagguuugcuuucgcacugaguagaggcuuuggaucaggaaucaucaccucaaaugcaccgauggaugaaugugaugcgaagugucaaacaccucagggagcuauaaacagcagucuuccuuuccagaauguacacccagucacaauaggagaguguccaaaguaugucaggagugcaaaauuaagaaugguuacaggacuaaggaacaucccauccauucaauccagagguuuguuuggagccauugccgguuucauugaagggggguggacuggaaugguagaugguugguaugguuaucaccaucagaaugagcaaggaucuggguaugcugcagaucaaaaaagcacacaaaaugccauuaacgggauuacaaacaaggugaauucuguaauugagaaaaugaacacucaauucacagcugugggcaaagaauucaacaaauuggaaagaaggauggaaaacuuaaauaaaaaaguugaugauggguuucuagacauuuggacauauaacgcagaauuguugguucuacuggaaaaugaaaggacuuuggacuuccaugacuccaacgugaagaaucuguaugagaaaguaaaaagccaauuaaagaauaaugccaaagaaauaggaaacggguguuuugaauucuaucacaaguguaacgaugaaugcauggagagugugaaaaauggaacuuaugacuauccaaaauauuccgaagaaucaaaguugaacagggagaaaauugauggagugaaauuggaaucaaugggagucuaucagauuuuggcgaucuacucaacagucgccaguucccugguucuuuuggucucccugggggcaaucagcuucuggauguguuccaaugggucuuugcaguguacaauaugcaucuaa

SEQ ID NO: 34484 - RNA, 1698 nt, Artificial Sequence
  derived and/or modified CDS sequence (wt) from hemagglutinin__InfluenzaA__ACI32736
augaaaguaaaacuacugguccuguuaugcacauuuacagcuacauaugcugacacaauauguauaggcuaccaugccaacaacucaaccgacacuguugacacaguacuugagaagaaugugacagugacacacucugucaaccugcuugaggacagucacaauggaaaauuaugucuauuaaaaggaauagccccacuacaauuggguaauugcagcguugccggauggaucuuaggaaacccagaaugcgaauuacugauuuccagggaaucaugguccuacauuguagaaaaaccaaauccugagaauggaacauguuacccagggcauuucgccgacuaugaggaacugagggagcaauugaguucaguaucuucauuugagagauucgaaauauuccccaaagaaagcucauggcccaaccacaccgcaaccggaguaucagcaucaugcucccauaaugggaaaagcaguuuuuacaaaaauuugcuauggcugacggggaagaaugguuuguacccaaaccugagcaaguccuaugcaaacaacaaagagaaagaaguccuuguacuaugggguguucaucacccgccuaacauaggugaccaaagggcccucuaucauacagaaaaugcuuaugucucuguagugucuucacauuauagcagaaaauucaccccagaaauagccaaaagacccaaaguaagagaucaagaaggaagaaucaacuacuacuggacucuacuugaacccggggauacaauaauauuugaggcaaauggaaaucuaauagcgccaagauaugcuuucgcacugaguagaggcuuuggaucaggaaucaucaacucaaaugcaccaauggaugaaugugaugcgaagugccaaacaccucagggagcuauaaacagcagucuuccuuuccagaauguacacccagucacaauaggagaguguccaaaguaugucaggagugcaaaauuaaggaugguuacaggacuaaggaacaucccauccauucaauccagagguuuguuuggagccauugccgguuucauugaagggggguggacuggaaugguagaugguugguaugguuaucaucaucagaaugagcaaggaucuggcuaugcugcagaucaaaaaagcacacaaaaugccauuaaugggauuacaaacaaggugaauucuguaauugagaaaaugaacacucaauucacagcugugggcaaagaauucaacaaauuggaaagaaggauggaaaacuuaaauaaaaaaguugaugauggguuuauagacauuuggacauauaaugcagaauuguugguucuacuggaaaaugaaaggacuuuggauuuccaugacuccaaugugaggaaucuguaugagaaaguaaaaagccaauuaaagaauaaugccaaagaaauaggaaauggguguuuugaauucuaucacaaguguaacgaugaaugcauggagaguguaaaaaauggaacuuaugacuauccaaaauauuccgaagaaucaaaguuaaacagggagaaaauugauggagugaaauuggaaucaaugggagucuaucagauucuggcgaucuacucaacagucgccaguucucugguucuuuuggucucccugggggcaaucagcuucuggauguguuccaaugggucuuugcaguguagaauaugcaucuaa

SEQ ID NO: 34485 - RNA, 1698 nt, Artificial Sequence
  derived and/or modified CDS sequence (wt) from hemagglutinin__InfluenzaA__ACI32737
augaaaguaaaacuacugguucuguuauguacauuuacagcuacauaugcagacacaauauguauaggcuaccaugccaacaauucaaccgacacuguugacacaguacuugagaagaaugugacagugacacacucugucaaccuacuugagaacagucacaauggaaaacuaugucuacuaaaaggaauagccccacuacaauuggguaauugcagcguugccggauggaucuuaggaaacccagaaugcgaauuacugauucccaaggaaucaugguccuacauuguggaaauaccaaauccugagaauggaacauguuacccaggguauuucgccgacuaugaggagcugagggagcaauugaguucaguaucuucauuugagagguucgaaauauuccccaaagagagcucauggcccaaccacaccguaaccggaguaucagcaucaugcucccauaacgggaaaagcaguuuuuacagaaauuugcuauggcugacggggaagaaugguuuguacccaaaccugagcaaguccuaugcaaacaacaaagagaaagaaguccuuguacuaugggguguccaucacccgccuaacauaggggaccaaagggcccucuaucauacagaaaaugcuuaugucucuguagugucuucacauuauagcagaagauucaccccagaaauagccaaaagacccaaggugagagaucaggaaggaagaaucaacuacuacuggacucugcuggaacccggggauacaauaauauuugaggcaaauggaaaucuaauagcgccaagguuugcuuucgcacugaguagaggcuugggaucaggaaucaucaccucaaaugcaccaauggaugaaugugaugcgaaaugucaaacaccucagggagcuauaaacagcagucuuccuuuccagaauguacacccagucacaauaggagaguguccaaaguaugucaggagugcaaaauuaaggaugguuacaggacuaaggaacaucccauccauucaauccagagguuuguuuggagccauugccgguuucauugaagggggguggacuggaaugguagaugguugguaugguuaucaucaucagaaugagcaaggaucuggguaugcugcagaucaaaaaagcacacaaaaugccauuaacgggauuacaaacaaggugaauucuguaauugagaaaaugaacacucaauucacagcugugggcaaagaauucaacaaauuggaaagaaggauggaaaacuuaaauaaaaaaguugaugauggguuucuagacauuuggaccuauaaugcagaauuguugguucuacuggaaaaugaaaggacuuuggauuuccaugacuccaacgugaagaaucuguaugagaaaguaaaaagccaauuaaggaauaaugccaaagaaauaggaaacggguguuuugaauucuaucacaaguguaacgaugaaugcauggagagugugaaaaauggaacuuaugacuauccaaaauauuccgaagaauccaaguuaaacagggagaaaauugauggagugaaauuagaaucaaugggagucuaucagauucuggcgaucuacucaacagucgccaguucccugguucuuuuggucucccugggggcaaucagcuucuggauguguuccaaugggucuuugcaguguagaauaugcaucuaa

SEQ ID NO: 34486 - RNA, 1698 nt, Artificial Sequence
  derived and/or modified CDS sequence (wt) from hemagglutinin__InfluenzaA__ACI32739
augaaaguaaaacuacugauccuguuauguacauuuacagcuacauaugcagacacaauauguauaggcuaccaugccaacaacucaaccgacacuguugacacaguacuugagaagaaugugacagugacacacucugucaaccuacuugaggacagucacaauggaaaacuaugucuacuaaaaggaauagccccccuacaauuggguaauugcagcguugccggauggaucuuaggaaacccagaaugcgaauuacugauuuccaaggaaucaugguccuacauuguagaaacaccaaauccugagaauggaacauguuacccaggguauuucgccgacuaugaggagcuaagggagcaauugaguucaguaucuucauuugagagauucgaaauauuccccaaagaaagcucauggcccaaccacaccguaaccggaguaucagcaucaugcucccauaaugggaaaagcaguuuuuacagaaauuugcuauggcugacggggaagaaugguuuguacccaaaccugagcaaguccuaugcaaacaacaaagagaaagaaguccuuauacuaugggguguucaucacccgccuaacauagggaaccaaaggacucucuaucauacagaaaaugcuuaugucucuguagugucuucacauuauagcagaagauucaccccagaaauaaccaaaaggcccaaaguaagagaucaggaagggagaaucaacuacuacuggacucugcuggaacccggggauacaauaauauuugaggcaaauggaaaucuaauagcgccaugguaugcuuucgcacugaguagaggcuuuggaucaggaaucaucaccucaaaugcaccaauggaugaaugugaugcgaagugucaaacaccucagggagcuauaaacagcagucuuccuuuccagaauguacacccagucacaauaggagaguguccaaaguaugucaggagugcaaaauuaaggaugguuacaggacuaaggaacaucccauccauucaauccagagguuuguuuggagccauugccgguuucauugaagggggguggacuggaaugguagaugggugguaugguuaucaucaucagaaugagcaaggaucuggcuaugcugcagaucaaaaaagcacacaaaaugccauuaacgggauuacaaacaaggugaauucuguaauugagaaaaugaacacucaauucacagcugugggcaaagaauucaacaaauuggaaagaagaauggaaaacuuaaauaaaaaaguugaugauggauuucuagacauuuggacauauaaugcagaauuguugguucuacuggaaaaugaaaggacuuuggauuuccacgacuccaaugugaagaaucuguaugagaaaguaaaaagccaauuaaagaauaaugccaaagaaauaggaaauggguguuuugaauucuaucacaaguguaacaaugaaugcauggagagugugaaaaauggaacuuaugacuauccaaaauauuccgaagaauccaaguuaaacagggaaaaaauugauggagugaaauuggaaucaaugggagucuaucagauucuggcgaucuacucaacugucgccaguucccugguucuuuuggucucccugggggcaaucagcuucuggauguguuccaaugggucuuugcaguguaaaauaugcaucuga

SEQ ID NO: 34487 - RNA, 1698 nt, Artificial Sequence
  derived and/or modified CDS sequence (wt) from hemagglutinin__InfluenzaA__ACI32740
augaaaguaaaacuacugauccuguuauguacauuuacagcuacauaugcagacacaauauguauaggcuaccaugccaacaacucaaccgacacuguugacacaguacuugagaagaaugugacagugacacacucugucaaccuacuugaggacagucacaauggaaaacugugccuacuaaaaggaauagccccccuacaauuggguaauugcagcguugccggauggaucuuaggaaacccagaaugcgaauuacugauuuccaaggaaucaugguccuacauuguagaaacaccaaauccugagaauggagcauguuacccaggguauuucgccgacuaugaggagcuaagggagcaauugaguucaguaucuucauuugagagauucgaaauauuccccaaagaaagcucauggcccaaacacaccguaaccggaguaucagcaucaugcucccauaaugggaaaagcaguuuuuacagaaauuugcuauggcugacggggaagaaugguuuguacccaaaccugagcaaguccuaugcaaacaacaaagagaaagaaguccuuauacuaugggguguucaucacccgccuaacauaggggaccaaaggacccucuaucacacagaaaaugcuuaugucucuguagugucuucacauuauagcagaagauucaccccagaaauaaccaaaaggcccaaaguaagagaucaggaaggaagaaucaacuacuacuggacucugcuggaacccggggauacaauaauauuugaggcaaauggaaaucuaauagcgccaugguaugcuuucgcacugaguagaggcuuuggaucaggaaucaucaccucaaaugcaccaauggaugaaugugaugcgaagugucaaacaccucagggagcuauaaacagcagucuuccuuuccagaauguacacccagucacaauaggagaguguccaaaguaugucaggagugcaaaauuaaggaugguuacaggacuaaggaacaucccauccauucaauccagagguuuguuuggagccauugccgguuucauugaagggggguggacuggaaugguagaugggugguaugguuaucaucaucagaaugagcaaggaucuggcuaugcugcagaucaaaaaagcacacaaaaugccauuaacgggauuacaaacaaggugaauucuguaauugagaaaaugaacacucaauucacagcugugggcaaagaauucaacaaauuggaaagaaggauggaaaacuuaaauaaaaagguugaugauggguuucuagacauuuggacauauaaugcagaauuguugguucuacuggaaaaugaaaggacuuuggauuuccacgacuccaaugugaagaaucuguacgagaaaguaaaaagccaauuaaagaauaaugccaaagaaauaggaaauggguguuuugaauucuaucacaaguguaacaaugaaugcauggagagugugaaaaauggaacuuaugacuauccaaaauauuccgaagaaucaaaguuaaacagggaaaaaauugauggagugaaauuggacucaaugggggucuaucagauucuggcaaucuacucaacugucgccaguucccugguucuuuuggucucccugggggcaaucagcuucuggaugugucccaaugggucuuugcaguguacaauaugcaucuga

SEQ ID NO: 34488 - RNA, 1698 nt, Artificial Sequence
  derived and/or modified CDS sequence (wt) from hemagglutinin__InfluenzaA__ACI32741
augaaaguaaaacuacugauccuguuauguacauuuacagcuacauaugcagacacaauauguauaggcuaccaugccaacaacucaaccgacacuguugacacaguacuugagaagaaugugacagugacacacucugucaaccuacuugaggacagucacaauggaaaacugugccuacuaaaaggaauagccccccuacaauuggguaauugcagcguugccggauggaucuuaggaaacccagaaugcgaauuacugauuuccaaggaaucaugguccuacauuguagaaacaccaaauccugagaauggagcauguuacccaggguauuucgccgacuaugaggagcuaagggagcaauugaguucaguaucuucauuugagagauucgaaauauuccccaaagaaagcucauggcccaaacacaccguaaccggaguaucagcaucaugcucccauaaugggaaaagcaguuuuuacagaaauuugcuauggcugacggggaagaaugguuuguacccaaaccugagcaaguccuaugcaaacaacaaagagaaagagguccuuauacuaugggguguucaucacccgccuaacauaggggaccaaaggacccucuaucacacagaaaaugcuuaugucucuguagugucuucacauuauagcagaagauucaccccagaaauaaccaaaaggcccaaaguaagagaucaggaaggaagaaucaacuacuacuggacucugcuggaacccggggauacaauaauauuugaggcaaauggaaaucuaauagcgccaugguaugcuuucgcacugaguagaggcuuuggaucaggaaucaucaccucaaaugcaccaauggaugaaugugaugcgaagugucaaacaccucagggagcuauaaacagcagucuuccuuuccagaauguacacccagucacaauaggagaguguccaaaguaugucaggagugcaaaauuaaggaugguuacaggacuaaggaacaucccauccauucaauccagagguuuguuuggagccauugccgguuucauugaagggggguggacuggaaugguagaugggugguaugguuaucaucaucagaaugagcaaggaucuggcuaugcugcagaucaaaaaagcacacaaaaugccauuaacgggauuacaaacaaggugaauucuguaauugagaaaaugaacacucaauucacagcugugggcaaagaauucaacaaauuggaaagaaggauggaaaacuuaaauaaaaagguugaugauggguuucuagacauuuggacauauaaugcagaauuguugguucuacuggaaaaugaaaggacuuuggauuuccacgacuccaaugugaagaaucuguacgagaaaguaaaaagccaauuaaagaauaaugccaaagaaauaggaaauggguguuuugaauucuaucacaaguguaacaaugaaugcauggagagugugaaaaauggaacuuaugacuauccaaaauauuccgaagaauccaaguuaaacagggaaaaaauugauggagugaaauuggacucaaugggggucuaucagauucuggcgaucuacucaacugucgccaguucccugguucuuuuggucucccugggggcaaucagcuucuggaugugucccaaugggucuuugcaguguaaaauaugcaucuga

SEQ ID NO: 34489 - RNA, 1698 nt, Artificial Sequence
  derived and/or modified CDS sequence (wt) from hemagglutinin__InfluenzaA__ACI32742
augaaaguaaaacuacugauccuguuauguacauuuacagcuacauaugcagacacaauauguauaggcuaccaugccaacaacucaaccgacacuguugacacaguacuugagaagaaugugacagugacacacucugucaaccuacuugaggacagucacaauggaaaacugugccuacuaaaaggaauagccccccuacaauuggguaauugcagcguugccggauggaucuuaggaaacccagaaugcgaauuacugauuuccaaggaaucaugguccuacauuguagaaacaccaaauccugagaauggaacauguuacccaggguauuucgccgacuaugaggaacugagggagcaauugaguucaguaucuucauuugagagguucgaaauauuccccaaagagagcucauggcccaaccacaccguaaccggaguaucagcaucaugcucccauaaugggaaaagcaguuuuuacagaaauuugcuauggcugacggggaagaaugguuuguacccaaaccugagcaaguccuaugcaaacaacaaagagaaagaaguccuuauacuaugggguguucaucacccgccuaacauaggggaccaaaggacccucuaucacacagaaaaugcuuaugucucuguagugucuucacauuauagcagaagauucaccccagaaauaaccaaaaggcccaaaguaagagaucaggaaggaagaaucaacuacuacuggacucugcuggaacccggggauacaauaauauuugaggcaaauggaaaucuaauagcgccaugguaugcuuucgcacugaguagaggcuuuggaucaggaaucaucaccucaaaugcaccaauggaugaaugugaugcgaagugucaaacaccucagggagcuauaaacagcagucuuccuuuccagaauguacacccagucacaauaggagaguguccaaaguaugucaggagugcaaaauuaaggaugguuacaggacuaaggaacaucccauccauucaauccagagguuuguuuggagccauugccgguuucauugaagggggguggacuggaaugguagaugggugguaugguuaucaucaucagaaugagcaaggaucuggcuaugcugcagaucaaaaaagcacacaaaaugccauuaacgggauuacaaacaaggugaauucuguaauugagaaaaugaacacucaauucacagcugugggcaaagaauucaacaaauuggaaagaaggauggaaaacuuaaauaaaaagguugaugauggguuucuagacauuuggacauauaaugcagaauuguugguucuacuggaaaaugaaaggacuuuggauuuccacgacuccaaugugaagaaucuguacgagaaaguaaaaagccaauuaaagaauaaugccaaagaaauaggaaauggguguuuugaauucuaucacaaguguaacaaugaaugcauggagagugugaaaaauggaacuuaugacuauccaaaauauuccgaagaauccaaguuaaacagggaaaaaauugauggagugaaauuggacucaaugggggucuaucagauucuggcgaucuacucaacugucgccaguucccugguucuuuuggucucccugggggcaaucagcuucuggauguguuccaaugggucuuugcaguguaaaauaugcaucuga

SEQ ID NO: 34490 - RNA, 1698 nt, Artificial Sequence
  derived and/or modified CDS sequence (wt) from hemagglutinin__InfluenzaA__ACI32743
augaaaguaaaauuacugauccuguuauguacauuuacagcuacauaugcagacacaauauguauaggcuaccaugccaacaacucaaccgacacuguugacacaguacuugagaagaaugugacagugacacacucugucaaccuacuugaggacagucacaauggaaaacugugccuacuaaaaggaauagccccccuacaauuggguaauugcagcguugccggauggaucuuaggaaacccagaaugcgaauuacugauuuccaaggaaucaugguccuacauuguagaaacaccaaauccugagaauggagcauguuacccaggguauuucgccgacuaugaggagcuaagggagcaauugaguucaguaucuucauuugagagauucgaaauauuucccaaaaaaagcucauggcccaaccacaccguaaccggaguaucagcaucaugcucccauaaugggaaaagcaguuuuuacagaaauuugcuauggcugacggggaagaaugguuuguacccaaaccugagcaaguccuaugcaaacaacaaagagaaagaaguccuuauacuaugggguguucaucacccgccuaacauagggaaccaaaggacccucuaucacacagaaaaugcuuaugucucuguagugucuucacauuauagcagaagauucaccccagaaauaaccaaaaggcccaaaguaagagaucaggaaggaagaaucaacuacuacuggacucugcuggaacccggggauacaauaauauuugaggcaaauggaaaucuaauagcgccaugguaugcuuucgcacugaguagaggcuuuggaucaggaaucaucaccucaaaugcaccaauggaugaaugugaugcgaagugucaaacaccucagggagcuauaaacagcagucuuccuuuccagaauguacacccagucacaauaggagaguguccaaaguaugucaggagugcaaaauuaaggaugguuacaggacuaaggaacaucccauccauucaauccagagguuuguuuggagccauugccgguuucauugaagggggguggacuggaaugguagaugggugguaugguuaucaucaucagaaugagcaaggaucuggcuaugcugcagaucaaaaaagcacacaaaaugccauuaacgggauuacaaacaaggugaauucuguaauugagaaaaugaacacucaauucacagcugugggcaaagaauucaacaaauuggaaagaaggauggaaaacuuaaauaaaaagguugaugauggguuucuagacauuuggacauauaaugcagaauuguugguucuacuggaaaaugaaaggacuuuggauuuccacgacuccaaugugaagaaucuguacgagaaaguaaaaagccaauuaaagaauaaugccaaagaaauaggaaauggguguuuugaauucuaucacaaguguaacaaugaaugcauggagagugugaagaauggaacuuaugacuauccaaaauauuccgaagaauccaaguuaaacagggaaaaaauugauggagugaaauuggacucaaugggggucuaucagauucuggcgaucuacucaacugucgccaguucccugguucuuuuggucucccugggggcaaucagcuucuggauguguuccaaugggucuuugcaguguagaauaugcaucuga

SEQ ID NO: 34491 - RNA, 1701 nt, Artificial Sequence
  derived and/or modified CDS sequence (wt) from hemagglutinin__InfluenzaA__ACJ09818
augaagacuaucauugcuuugagcuacauucuaugucugguuuucgcucaaaaacuuccuggaaaugacaacagcacggcaacgcugugccuugggcaccaugcaguaccaaacggaacgauagugaaaacaaucacgaaugaccaaguugaaguuacuaaugcuacugagcugguucagaguuccucaacaggugaaauaugcgacaguccucaucagauccuugauggagaaaacugcacacuaauagaugcucuauugggagacccucagugugauggcuuccaaaauaagaaaugggaccuuuuuguugaacgcagcaaagccuacagcaacuguuacccuuaugaugugccggauuaugccucccuuaggucacuaguugccucauccggcacacuggaguuuaacaaugaaagcuucaauuggacuggagucacucaaaacggaacaagcucugcuugcauaaggagaucuaauaacaguuucuuuaguagauugaauugguugacccacuuaaaauucaaauauccagcauugaacgugacuaugccaaacaaugaaaaauuugacaaauuguacauuugggggguucaccacccggguacagacaaugaccaaaucuuccuguaugcucaagcaucaggaagaaucacagucucuaccaaaagaagccaacaaacuguaaucccgaauaucggaucuagacccagaguaaggaauauccccagcagaauaagcaucuauuggacaauaguaaaaccgggagacauacuuuugauuaacagcacagggaaucuaauugcuccuagggguuacuucaaaauacgaagugggaaaagcucaauaaugagaucagaugcacccauuggcaaaugcaauucugaaugcaucacuccaaauggaagcauucccaaugacaaaccauuccaaaauguaaacaggaucacauacggggccugucccagauauguuaagcaaaacacucugaaauuggcaacagggaugcgaaauguaccagagaaacaaacuagaggcauauuuggcgcaaucgcggguuucauagaaaaugguugggagggaaugguggaugguugguacgguuucaggcaucaaaauucugagggaauaggacaagcagcagaucucaaaagcacucaagcagcaaucgaucaaaucaaugggaagcugaauagguugaucgggaaaaccaacgagaaauuccaucagauugaaaaagaauucucagaagucgaagggagaauucaggaccuugagaaauauguugaggacaccaaaauagaucucuggucauacaacgcggagcuucuuguugcccuggagaaccaacauacaauugaucuaacugacucagaaaugaacaaacuguuugaaaaaacaaagaagcaacugagggaaaaugcugaggauaugggcaaugguuguuucaaaauauaccacaaaugugacaaugccugcauaggaucaaucagaaauggaacuuaugaccacgauguauacagagaugaagcauuaaacaaccgguuccagaucaagggcguugagcugaagucaggauacaaagauuggauccuauggauuuccuuugccaugucauguuuuuugcuuuguguugcuuuguugggguucaucaugugggccugccaaaaaggcaacauuaggugcaacauuugcauuuga

SEQ ID NO: 34492 - RNA, 1683 nt, Artificial Sequence
  derived and/or modified CDS sequence (wt) from hemagglutinin__InfluenzaA__ACJ67533
auggaaacaauaucacuaauaacuauacuacuaguaguaacagcaagcaaugcagauaaaaucugcaucggccaccagucaacaaacuccacagaaacuguggacacgcuaacagaaaccaauguuccuguuacacaugccaaagaauuacuccacacagagcacaauggaaugcugugugcaacaagucugggacauccccucauucuagacacaugcacuauugaaggacuagucuauggcaacccuucuugugaccugcuguuagaaggaagagaaugguccuacaucgucgaaagaucaucagcuguaaauggaacguguuacccugggaauguagaaaaccuagaggaacucaggacacuuuuuaguuccgcuaguuccuaccaaagaauccaaaucuucccagacacaaccuggaaugugacuuacacuggaacaagcagagcauguucagguucauucuacaggagcaugagauggcugacucaaaagagcgguuuuuacccuguucaagacgcccaauacacaaauaacaggggaaagagcauucuuuucguguggggcauacaucacccacccaccuaugccgaacaaacaaauuuguacauaagaaacgacacaacaacaagcgugacaacagaagauuugaauaggaccuucaaaccagugauagggccaaggccccuugucaauggucugcagggaagaauugauuauuauuggucgguacuaaaaccaggccaaacauugcgaguaagauccaaugggaaucuaaucgcuccaugguauggacacguucuuucaggagggagccauggaagaauccugaagacugauuuaaaaagugguaguuguguagugcaaugucagacugaaaaagguggcuuaaacaguacauugccauuccacaauaucaguaaauaugcauuuggaaccugccccaaauauguaagaguuaauagucucaagcuggcagucggucugaggaacgugccugcuagaucaaguagaggacuauuuggagccauagcuggauucauagaaggagguuggccaggacuagucgcuggcugguaugguuuccagcauucaaaugaucaagggguugguauggcugcagauagggauucaacucaaaaggcaauugauaaaauaacauccaaggugaauaauauagucgacaagaugaacaagcaauaugaaauaauugaucaugaauucagugagguugaaacuagacucaauaugaucaauaauaagauugaugaccaaauacaagacguaugggcauauaaugcagaauugcuaguacuacuugaaaaucagaaaacacucgaugagcaugaugcgaacgugaacaaucuauauaacaaggugaagagggcacugggcuccaaugcuauggaagaugggaaaggcuguuucgagcuauaccauaaaugugaugaucagugcauggaaacaauucggaacgggacuuauaauaggagaaaguauagagaggaaucaagacuagagaggcagaaaauagaggggguuaagcuggaaucugagagaacuuacaaaauccucaccauuuauucgacugucgccucaucucuugugcuugcaaugggguuugcugccuuccuguucugggccauguccaaugggucuugcagaugcaacauuuguauauaa

SEQ ID NO: 34493 - RNA, 1704 nt, Artificial Sequence
  derived and/or modified CDS sequence (wt) from hemagglutinin__InfluenzaA__ACJ68607
auggagaaaauagugcuucuucuugcaauagucagccuuguuaaaagugaucagauuugcauugguuaccaugcaaacaacucgacagagcagguugacacaauaauggaaaagaacguuacuguuacacaugcccaagauauacuggaaaagacacacaacgggaagcucugcgaucuagauggagugaagccucugauuuuaggagauuguaguguagcuggauggcuccucggaaacccgaugugugacgaauucaucaaugugccggaauggucuuacauaguggagaaggccaacccagccaaugaccucuguuacccagggaauuucaacgacuaugaagaacugaaacaccuauugagcagaauaaaccauuuugagaaaauucagaucauccccaaaaguucuugguccgaucaugaagccucaucaggggugagcucagcauguccauaccagggaacgcccuccuuuuucagaaaugugguauggcuuaucaaaaagaacaauacauacccaacaauaaagagaagcuacaauaauaccaaccaggaagaucuuuugauacugugggggauucaucauucuaaugaugcggcagagcagacaaagcucuaucaaaacccaaccaccuauauuuccguugggacaucaacacuaaaccagagauugguaccaaaaauagcuacuagauccaaaguaaacgggcaaaguggaaggauggauuucuucuggacaauuuuaaaaccgaaugaugcaaucaacuucgagaguaauggaaauuucauugcuccagaauaugcauacaaaauugucaagaaaggggacucagcaauuaugaaaagugaaguggaauaugguaacugcaacaccaagugucaaacuccaauaggggcgauaaacucuaguaugccauuccacaacauacacccucucaccaucggggaaugccccaaauaugugaaaucaaacaaauuaguccuugcgacugggcuuagaaauaguccccuaagagaaagaagaagaaaaagaggacuauuuggagcuauagcagguuuuauagagggaggauggcagggaaugguagaugguugguauggguaccaccauagcaaugagcaggggaguggguacgcugcagacaaagaauccacucaaaaggcaauagauggagucaccaauaaggucaacucgaucauugacaaaaugaacacucaguuugaggccguuggaagggaauuuaauaacuuagaaaggagaauagagaauuuaaacaagaaaauggaagacggauuccuagauguauggacuuauaaugcugaacuucugguucucauggaaaaugagagaacucuagacuuccaugacucaaaugucaagaaccuuuacgacaagguccgacuacagcuuagggauaaugcaaaggagcuggguaacgguuguuucgaguucuaucacaaaugugauaaugaaugcauggaaaguguaagaaacggaacguaugacuacccgcaguauucagaagaagcaagauuaaaaagagaggaaauaaguggaguaaaauuggaaucaauaggaacuuaccaaauacugucaauuuauucaacaguugcgaguucucuagcacuggcaaucaugguggcuggucuaucuuuauggaugugcuccaaugggucguuacaaugcagaauuugcauuuaa

SEQ ID NO: 34494 - RNA, 1704 nt, Artificial Sequence
  derived and/or modified CDS sequence (wt) from hemagglutinin__InfluenzaA__ACJ68609
auggagaaaauagugcuucuucuugcaauagucagccuuguuaaaagugaucagauuugcauugguuaccaugcaaacaacucgacagagcagguugacacaauaauggaaaagaacguuacuguuacacaugcccaagacauacuggaaaagacacacaacgggaagcucugcgaucuagauggagugaagccucugauuuuaagagauuguaguguagcuggauggcuccuuggaaacccaaugugugacgaauucaucaaugugccggaauggucuuacauaguggagaaggccaacccagccaaugaccucuguuacccaggaaauuucaacgacuaugaagaacugaaacaccuauugagcagaauaaaccauuuugagaaaauucagaucauccccaaaaguucuugguccgaucaugaagccucaucaggggugagcucagcauguccauaccagggaacgcccuccuuuuucagaaaugugguauggcuuaucaaaaagaacaauacauauccaacaauaaagagaagcuacaauaauaccaaccaggaagaucuuuugauacugugggggauucaucauucuaaugaugcggcagagcagacaaagcucuaucaaaacccaaccaccuauauuuccguugggacaucaacacuaaaccagagauugguaccaaaaauagcuacuagauccaaaguaaacgggcaaaguggaaggauggauuucuucuggacaauuuuaaaaccgaaugaugcaaucaacuucgagaguaauggaaauuucauugcuccagaauaugcauacaaaauugucaagaaaggggacucagcaauuaugaaaagugaaguggaauaugguaacugcaacaccaagugucaaacuccaauaggggcgauaaacucuaguaugccauuccacaacauacacccucucaccaucggggaaugccccaaauaugugaaaucaaacaaauuaguccuugcgacugggcucagaaauaguccucuaagagaaagaagaagaaaaagaggacuauuuggagcuauagcaggguuuauagagggaggauggcagggaaugguagaugguugguauggguaccaccauagcaaugagcaggggaguggguacgcugcagacaaagaauccacucaaaaggcaauagauggagucaccaauaaggucaacucgaucauugacaaaaugaacacucaguuugaggccguuggaagggaauuuaauaacuuagaaaggagaauagagaauuuaaacaagaaaauggaagacggauuccuagaugucuggacuuauaaugcugaacuucugguucucauggaaaaugagagaacucuagacuuccaugacucaaaugucaagaaccuuuacgacaagguccgacuacagcuuagggauaaugcaaaggagcuggguaacgguuguuucgaguucuaucacaaaugugauaaugaauguauggaaaguguaagaaacggaacguaugacuacccgcaguauucagaagaagcaagauuaagaagagaggaaauaaguggaguaaaauuggaaucaauaggaacuuaccaaauacugucaauuuauucaacaguugcgaguucucuagcacuggcaaucaugguggcuggucuaucuuuguggaugugcuccaaugggucguuacaaugcagaauuugcauuuaa

SEQ ID NO: 34495 - RNA, 1704 nt, Artificial Sequence
  derived and/or modified CDS sequence (wt) from hemagglutinin__InfluenzaA__ACJ68610
auggagaaaauagugcuuuuucuugcaauagucagccuuguuaaaagugaucagauuugcauugguuaccaugcaaacaacucgacagagcagguugacacaauaauggaaaagaacguuacuguuacacaugcccaagacauacuggaaaagacacacaacgggaagcucugcgaucuagauggagugaagccucugauuuuaagagauuguaguguagcuggauggcuccucggaaacccaaugugugacgaauucaucaaugugccggaauggucuuacauaguggagaaggccaacccagccaaugaccucuguuacccagggaauuucaacgacuaugaagaacugaaacaccuauugagcagaauaaaccauuuugagaaaauucagaucauccccaaaaguucuugguccgaucaugaagccucaucaggggugagcucagcauguccauaccagggaacgcccuccuuuuucagaaaugugguauggcuuaucaaaaagaacaauacauacccaacaauaaagagaagcuacaauaauaccaaccaggaagaucuuuugauacugugggggauucaucauucuaaugaugcggcagagcagacaaagcucuaucaaaacccaaccaccuauauuuccguugggacaucaacacuaaaccagagauugguaccaaaaauagcuacuagauccaaaguaaacgggcaaaguggaaggauggauuucuucuggacaauuuuaaaaccaaaugaugcaaucaacuucgagaguaauggaaauuucauugcuccagaauaugcauacaaaauugucaagaaaggggacucagcaauuauaaaaagugaaguggaauaugguaacugcaacaccaagugucaaacuccaauaggggcgauaaacucuaguaugccauuccacaacauacacccucucaccaucggggaaugcccaaaauaugugaaaucaaacaaauuaguccuugcgacugggcucagaaauaguccucuaagagaaagaagaagaaaaagaggacuauuuggagcuauagcagguuuuauagagggaggauggcagggaaugguagaugguugguauggguaccaccauagcaaugagcaggggaguggguacgcugcagacaaagaauccacucaaaaggcaauagauggaguuaccaauaaggucaacucgaucauugacaaaaugaacacucaguuugaggccguuggaagggaauuuaauaacuuagaaaggagaauagagaauuuaaacaagaaaauggaagacggauuccuagaugucuggacuuauaaugcugaacuucugguucucauggaaaaugagagaacucuagacuuucaugacucaaaugucaagaaccucuacgacaagguccgacuacagcuuagggauaaugcaaaggagcuggguaacgguuguuucgaguucuaucacaaaugugauaaugaauguauggaaaguguaagaaacggaacguaugacuacccgcaguauucagaagaagcaagauuaaaaagagaggaaauaaguggaguaaaauuggaaucaauaggaacuuaccaaauacugucaauuuauucaacaguggcgaguucucuagcacuggcaaucaugguggcuggucuaucuuuauggaugugcuccaaugggucguuacaaugcagaauuugcauuuaa

SEQ ID NO: 34496 - RNA, 1704 nt, Artificial Sequence
  derived and/or modified CDS sequence (wt) from hemagglutinin__InfluenzaA__ACJ68611
auggagaaaauagugcuucuucuugcaauagucagccuuguuaaaagugaucagauuugcauugguuaccaugcaaacaacucgacagagcagguugacacaauaauggaaaagaacguuacuguuacacaugcccaagauauacuggaaaagacacacaacgggaagcucugcgaucuagauggagugaagccucugauuuuaagagauuguaguguagcuggauggcuccucggaaacccaaugugugacgaauucaucaaugugccggaauggucuuacauaguggagaaggccaacccagccaaugaccucuguuacccagggaauuucaacgacuaugaagaacugaaacaccuauugagcagaauaaaucauuuugagaaaauucagaucauccccaaaaguucuugguccgaucaugaagccucauugggggugagcucagcauguccauaccagggaaugcccuccuuuuucagaaaugugguauggcuuaucaaaaagaacaauacauacccaacaauaaagagaagcuacaauaauaccaaccaggaagaucuuuugauacugugggggauucaucauucuaaugaugcggcagagcagacaaagcucuaucaaaacccaaccacuuauauuuccguugggacgucaacacuaaaccagagauugguaccaaaaauagcuacuagauccaaaguaaacgggcaaaguggaaggauggauuucuucuggacaauuuuaaaaccaaaugaugcaaucaacuucgagaguaauggaaauuucauugcuccagaauaugcauacaaaauugucaagaaaggggacucagcaauuaugaaaagugaagugggauaugguaacugcaacaccaagugucaaacuccaauaggggcaauaaacucuaguaugccauuccacaacauacacccucucaccaucggggaaugccccaaauaugugaaaucaaacaaauuaguccuugcgacugggcucagaaauaguccucuaagagagagaagaagaaaaagaggacuauuuggagcuauagcagguuuuauagagggaggauggcagggaaugguagaugguugguauggguaccaccauagcaaugagcaggggaguggguacgcugcagacaaagaauccacucaaaaggcaauagauggagucaccaauaaggucaacucgaucauugacaaaaugaacacucaguuugaggccguuggaagggaauuuaauaacuuagaaaggagaauagagaauuuaaacaagaaaauggaagacggauuccuagaugucuggacuuauaaugcugaacuucugguucucauggaaaaugagagaacucuagacuuccaugacucaaaugucaagaaccuuuacgacaagguccgacuacagcuuagggauaaugcaaaggagcuggguaacgguuguuucgaguucuaucacaaaugugaugaugaaugcauggaaaguguaagaaacggaacguaugacuacccgcaguauucagaagaagcaagauuaaaaagagaggaaauaaguggaguaaaauuggaaucaauaggaacuuaccaaauacugucaauuuauucaacaguugcgaguucccuagcacuggcaaucaugguggcuggucuaucuuuauggaugugcuccaaugggucguuacaaugcagaauuugcauuuaa

SEQ ID NO: 34497 - RNA, 1704 nt, Artificial Sequence
  derived and/or modified CDS sequence (wt) from hemagglutinin__InfluenzaA__ACJ68612
auggagaaaauagugcuucuucuugcaauagucagccuuguuaaaagugaucagauuugcauugguuaccaugcaaacaacucgacagagcagguugacacaauaauggaaaagaacguuacuguuacacaugcccaagacauacuggaaaagacacacaacgggaagcucugcgaucuagauggagugaagccucugauuuuaagagauuguaguguagcuggauggcuccucggaaacccaaugugugacgaauucaucaaugugccggaauggucuuacauaguggagaaggccaacccagccaaugaccucuguuacccagggaauuucaacgacuaugaagaacugaaacaccuauugagcagaauaaaccauuuugagaaaauucagaucauccccaaaaguucuuggcccgaucaugaagccucaucaggggugagcucagcauguccauaccagggaacgcccuccuuuuucagaaaugugguauggcuuaucaaaaagaacaauacauacccaacaauaaagagaagcuacaauaauaccaaccaggaagaucuuuugauacugugggggauucaucauucuaauaaugcggcagagcagacaaagcucuaucaaaacccaaccaccuauauuuccguugggacaucaacacuaaaccugagauugguaccaaaaauagcuacuagauccaaaguaaacgggcaaaguggaaggauggauuucuucuggacaauuuuaaaaccgaaugaugcaaucaacuucgagaguaauggaaauuucauugcuccagaauaugcauacaaaauugucaagaaaggggacucagcaauuaugaaaagugaaguggaauaugguaacugcaacaccaagugucaaacuccaauaggggcgauaaacucuaguaugccauuccacaacauacacccucucaccaucggggaaugccccaaauaugugaaaucaaacaaauuaguccuugcgacugggcucagaaauaguccucuaagagagagaagaagaaaaagaggacuauuuggagcuauagcagguuuuauagagggaggauggcagggaaugguagaugguugguauggguaccaccauagcaaugagcaggggaguggguacgcugcagacaaagaauccacucaaaaggcaauagauggagucaccaauaaggucaacucgaucauugacaaaaugaacacucaguuugaggccguuggaagggaauuuaauaacuuagaaaggagaauagagaauuuaaacaagaaaauggaagacggauuccuagaugucuggacuuauaaugcugaacuucugguucucauggaaaaugagagaacucuagacuuccaugacucaaaugucaagaaccuuuacgacaagguccgacuacagcuuagggauaaugcaaaggaacuggguaacgguuguuucgaguucuaucacaaaugugauaaugaauguauggaaaguguaagaaacggaacguaugacuacccgcaguauucagaagaagcaagauuaaaaagagaggaaauaaguggaguaaaauuggaaucaauaggagcuuaccaaauacugucaauuuauucaacaguugcgaguucucuagcacuggcaaucaugguggcuggucuaucuuuauggaugugcuccaaugggucguuacaaugcagaauuugcauuuaa

SEQ ID NO: 34498 - RNA, 1704 nt, Artificial Sequence
  derived and/or modified CDS sequence (wt) from hemagglutinin__InfluenzaA__ACJ68613
auggagaaaauagugcuuuuccuugcaauagucagccauguuaaaagugaucagauuugcauugguuaccaugcaaacaacucgacagagcagguugacacaauaauggaaaagaacguuacuguuacacaugcccaagacauacuggaaaagacacacaacgggaagcucugcgaucuagguggagugaagccucugauuuuaagagauuguaguguagcuggauggcuccucggaaacccaaugugugacgaauuuaucaaugugccggaauggucuuacauaguggagaaggccaacccagccaaugaccucuguuacccagggaauuucaacgacuaugaagaacugaaacaccuauugagcagaauaaaccauuuugagaaaauucagaucauccccaaaaguucuugguccgaucaugaagccucaucaggggugagcucaguauguccauaccagggaacgcccuccuuuuucagaaaugugguauggcuuaucaaaaagaacaauacauacccaacaauaaagaaaagcuacaauaauaccaaccaggaagaucuuuugauacugugggggauucaucauucuaaugaugcggcagagcagacaaagcucuaucaaaacccaaccaccuauauuuccguugggacaucaacacuaaaccagagauugguaccaaaaauagcuacuagauccaaaguaaacgggcaaaguggaaggauggauuucuucuggacaauuuuaaaaccgaaugaugcaaucaacuucgagaguaaugggaauuucauugcuccagaauaugcauacaaaauugucaagaaaggggacucagcaauuaugaaaagugaaguggaauaugguaacugcaacaccaagugucaaacuccaauaggggcgauaaacucuaguaugccauuccacaacauacacccucucaccaucggggaaugcccaaaauaugugaaaucaaacaaauuaguccuugcgacugggcucagaaauaguccucuaagagaaagaagaagaaaaagaggacuauuuggagcuauagcagguuuuauagagggaggauggcagggaaugguagaugguugguauggguaccaccauagcaaugagcaggggaguggauaugcugcagacaaagaauccacucaaaaggcaauagauggagucaccaauaaggucaacucgaucauugacaaaaugaacacucaguuugaggccguuggaagggaauuuaacaacuuagaaaggagaauagagaauuuaaacaagaaaauggaagacggauuccuagaugucuggacuuauaaugcugaacuucugguucucauggaaaaugagagaacucuagacuuccaugacucaaaugucaagaaccuuuacgacaagguccgacuacagcuuagggauaaugcaaaggagcuggguaacgguuguuucgaguucuaucacaaaugugauaaugaauguauggaaaguguaagaaacggaacguaugacuacccgcaguauucagaagaagcaagauuaaaaagagaggaaauaaguggaguaaaauuggaaucaauaggaacuuaccaaauacugucaauuuauucaacaguggcgaguucucuagcacuggcaaucaugguggcuggucuaucuuuauggaugugcuccaaugggucguuacaaugcagaauuugcauuuaa

SEQ ID NO: 34499 - RNA, 1707 nt, Artificial Sequence
  derived and/or modified CDS sequence (wt) from hemagglutinin__InfluenzaA__ACJ68614
auggagaaaauagugcuucuucuugcaauagucagucuuguuaaaagugaucagauuugcauugguuaccaugcaaacaacucgacagagcagguugacacaauaauggaaaagaacgucacuguuacacacgcccaagacauacuggaaaagacacacaacgggaagcucugcgaucuagauggagugaagccucuaauuuuaagagauuguaguguagcuggauggcuccucgggaacccaaugugugacgaauuccucaaugugccggaauggucuuacauaguggagaagaucaauccagucaaugaccucuguuacccagggaauuucaacgacuaugaagaacugaaacaccuauugagcagaauaaaccauuuugagaaaauucagaucauccccaaaaguucuuggucagaucaugaagccucaucaggggugagcucagcauguccauaccagggaagguccuccuuuuuuagaaaugugguauggcuuaucaaaaagaacaauacauacccaacaauaaagagaaguuacaauaauaccaaccaagaagaucuuuugguacugugggggauucaccauccaaaugaugcggcagagcagacaaggcucuaccaaaacccaaccaccuauauuuccguugggacaucaacacuaaaccagagauugguaccaaaacuagcuacuagauccaagguaaacgggcaaaguggaaggauggaguucuuuuggacaauuuuaaaaccgaaugaugcaauaaacuuugagaguaauggaaauuucauugcuccagaaaaugcauacaaaauugucaagaaaggggacucaacaauuaugaaaagugaauuggaauaugguaacugcaacaccaagugucaaacuccaauaggggcgauaaacucuaguaugccauuccacaacauccacccucucaccaucggggaaugccccaaauaugugaaaucaaacagauuaguccuugcgacugggcucagaaauagcccucaaggagagagaagaaggaaaaagagaggacuauuuggagcuauagcagguuuuauagagggaggauggcagggaaugguagaugguugguauggguaccaccauagcaacgagcgggggaguggguacgcugcagacaaagaauccacucaaaaggcaauagauggagucaccaauaaggucaacucgaucauugacaaaaugaacacucaguuugaggcuguuggaagggaauuuaauaacuuagaaaggagaauagaaaauuuaaacaagaagauggaagacggauuccuagaugucuggacuuauaaugcugaacuucugguucucauggaaaaugagagaacucuagacuuucaugacucaaaugucaagaaccuuuacgacaagguccgacuacagcuuagggauaaugcaaaggagcuugguaacgguuguuucgaguucuaucacagaugugauaaugaauguauggaaaguguaagaaacggaacguaugacuacccgcaguauucagaagaagcaagauuaaaaagagaggaaauaaguggaguaaaauuggaaucaauaggaacuuaccaaauacugucaauuuauucaacaguggcgagcucccuagcacuggcaaucaugguggcuggucuaucuuuauggaugugcuccaauggaucguuacaaugcagaauuugcauuuaa

SEQ ID NO: 34500 - RNA, 1698 nt, Artificial Sequence
  derived and/or modified CDS sequence (wt) from hemagglutinin__InfluenzaA__ACK99007
augaaaguaaaacuacugguccuguuaugcacauuuacagcuacauaugcagacacaauauguauaggcuaccaugcuaacaacucgaccgacacuguugacacaguacuugaaaagaaugugacagugacacacucugucaaccugcuugagaacagucacaauggaaaacuaugucuauuaaaaggaauagccccacuacaauuggguaauugcagcguugccggguggaucuuaggaaacccagaaugcgaauuacugauuuccaaggagucaugguccuacauuguagaaaaaccaaauccugagaauggaacauguuacccagggcauuucgcugacuaugaggaacugagggagcaauugaguucaguaucuucauuugagagguucgaaauauuccccaaagaaagcucauggcccaaccacaccguaaccggagugucagcaucaugcucccauaauggggaaagcaguuuuuacagaaauuugcuauggcugacggggaagaaugguuuguacccaaaccugagcaagucuuaugcaaacaacaaagaaaaagaaguccuuguacuaugggguguucaucacccgccaaacauaggugaccaaaaggcccucuaucauacagaaaaugcuuauguuucuguagugucuucacauuauagcagaaaauucaccccagaaauagccaaaagacccaaaguaagagaucaagaaggaagaaucaacuacuacuggacucugcuugaacccggggauacaauaauauuugaggcaaauggaaaucuaauagcgccaagauaugcuuucgcacugaguagaggcuuuggaucaggaaucaucaacucaaaugcaccaauggauaaaugugaugcgaagugccaaacaccucagggagcuauaaacagcagucuuccuuuccagaacguacacccagucacaauaggagaguguccaaaguaugucaggagugcaaaauuaaggaugguuacaggacuaaggaacaucccauccauucaauccagagguuuguuuggagccauugccgguuucauugaagggggguggacuggaaugguagaugguugguaugguuaucaucaucagaaugagcaaggaucuggcuaugcugcagaucaaaaaagcacacaaaaugccauuaaugggauuacaaacaaggugaauucuguaauugagaaaaugaacacucaauucacagcagugggcaaagaauucaacaaauuggaaagaaggauggaaaacuugaauaaaaaaguugaugauggguuuauagacauuuggacauauaaugcagaacuguugguucuacuggaaaaugaaaggacuuuggauuuccaugacuccaaugugaagaaucuguaugagaaaguaaaaagccaguuaaagaauaaugcuaaagaaauaggaaauggguguuuugaauucuaucacaaguguaacgaugaaugcauggagaguguaaagaauggaacuuaugacuauccaaaauauuccgaagaaucaaaguuaaacagggagaaaauugauggagugaaauuggaaucaaugggagucuaucagauucuggcgaucuacucaacagucgccaguucucugguucuuuuggucucccugggggcaaucagcuucuggauguguuccaaugggucuuugcaguguagaauaugcaucuaa

SEQ ID NO: 34501 - RNA, 1698 nt, Artificial Sequence
  derived and/or modified CDS sequence (wt) from hemagglutinin__InfluenzaA__ACK99008
augaaaguaaaacuacugguccuguuaugcacauuuacagcuacauaugcagacacaauauguauaggcuaccaugcuaacaacucgaccgacacuguugacacaguacuugaaaagaaugugacagugacacacucugucaaccugcuugagaacagucacaauggaaaacuaugucuauuaaaaggaauagccccacuacaauuggguaacugcagcguugccggguggaucuuaggaaacccagaaugcgaauuacugauuuccaaggagucaugguccuacauuguagaaaaaccaaauccugagaauggaacauguuacccagggcauuucgcugacuaugaggaacugagggagcaauugaguucaguaucuucauuugagagguucgaaauauuccccaaagaaagcucauggcccaaccacaccguaaccggagugucagcaucaugcucccauaauggggaaaguaguuuuuacagaaauuugcuauggcugacggggaagaaugguuuguacccaaaccugagcaaguccuaugcaaacaacaaagaaaaagaaguccuuguacuaugggguguucaucacccgccaaacauaggugaccaaaaggcccucuaucauacagaaaaugcuuauguuucuguagugucuucacauuauagcagaaaauucaccccagaaauagccaaaagacccaaaguaagagaucaagaaggaagaaucaacuacuacuggacucugcuugaacccggggauacaauaauauuugaggcaaauggaaaucuaauagcgccaagauaugcuuucgcacugaguagaggcuuuggaucaggaaucaucaacucaaaugcaccaauggauaaaugugaugcgaagugccaaacaccucagggagcuauaaacagcagucuuccuuuccagaacguacacccagucacaauaggagaguguccaaaguaugucaggagugcaaaauuaaggaugguuacaggacuaaggaacaucccauccauucaauccagagguuuguuuggagccauugccgguuucauugaagggggguggacuggaaugguagaugguugguaugguuaucaucaucagaaugagcaaggaucuggcuaugcugcagaucaaaaaagcacacaaaaugccauuaaugggauuacaaacaaggugaauucuguaauugagaaaaugaacacucaauucacagccgugggcaaagaauucaacaaauuggaaagaaggauggaaaacuugaauaaaaaaguugaugauggguuuauagacaucuggacauauaaugcagaacuguugguucuacuggaaaaugaaaggacuuuggauuuccaugacuccaaugugaagaaucuguaugagaaaguaaaaagccaguuaaagaauaaugcuaaagaaauaggaaauggguguuuugaauucuaucacaaguguaacgaugaaugcauggagaguguaaagaauggaacuuaugacuauccaaaauauuccgaagaaucaaaguuaaacagggagaaaauugauggagugaaauuggaaucaauggaagucuaucagauucuggcgaucuacucaacagucgccaguucucugguucuuuuggucucccugggggcaaucagcuucuggauguguuccaaugggucuuugcaguguagaauaugcaucuaa

SEQ ID NO: 34502 - RNA, 1698 nt, Artificial Sequence
  derived and/or modified CDS sequence (wt) from hemagglutinin__InfluenzaA__ACK99009
augaaaguaaaacuacugguccuguuaugcacauuuacagcuacauaugcagacacaauauguauaggcuaccaugcuaacaacucgaccgacacuguugacacaguacuugaaaagaaugugacagugacacacucugucaaccugcuugagaacagucacaauggaaaacuaugucuauuaaaaggaauagccccacuacaauuggguaacugcagcguugccggguggaucuuaggaaacccagaaugcgaauuacugauuuccaaggagucaugguccuacauuguagaaaaaccaaauccugagaauggaacauguuacccagggcauuucgcugauuaugaggaacugagggagcaauugaguucaguaucuucauuugagagguucgaaauauuccccaaagaaagcucauggcccaaccacaccguaaccggagugucagcaucaugcucccauaauggggaaagcaguuuuuacagaaauuugcuauggcugacggggaagaaugguuuguacccaaaccugagcaaguccuaugcaaacaacaaagaaaaagaaguccuuguacuaugggguguucaucacccgccaaacauaggugaccaaaaggcccucuaucauacagaaaaugcuuauguuucuguagugucuucacauuauagcagaaaauucaccccagaaauagccaaaagacccaaaguaagagaucaagaaggaagaaucaacuacuacuggacucugcuugaacccggggauacaauaacauuugaggcaaauggaaaucuaauagcgccaagauaugcuuucgcacugaguagaggcuuuggaucaggaaucaucaacucaaaugcaccaauggauaaaugugaugcgaagugccaaacaccucagggagcuauaaacagcagucuuccuuuccagaacguacacccagucacaauaggagaguguccaaaguaugucaggagugcaaaauuaaggaugguuacaggacuaaggaacaucccauccauucaauccagagguuuguuuggagccauugccgguuucauugaagggggguggacuggaaugguagaugguugguaugguuaucaucaucagaaugagcaaggaucuggcuaugcugcagaucaaaaaagcacacaaaaugccauuaaugggauuacaaacaaggugaauucuguaauugagaaaaugaacacucaauucacagcagugggcaaagaauucaacaaauuggaaagaaggauggaaaacuugaauaaaaaaguugaugauggguuuauagacauuuggacauauaaugcagaacuguugguucuacuggaaaaugaaaggacuuuggauuuccaugacuccaaugugaagaaucuguaugagaaaguaaaaagccaguuaaagaauaaugcuaaagaaauaggaaauggguguuuugaauucuaucacaaguguaacgaugaaugcauggagaguguaaagaauggaacuuaugacuauccaaaauauuccgaagaaucaaaguuaaacagggagaaaauugauggagugaaauuggaaucaaugggagucuaucagauucuggcgaucuacucaacagucgccaguucucugguucuuuuggucucccugggggcaaucagcuucuggauguguuccaaugggucuuugcaguguagaauaugcaucuaa

SEQ ID NO: 34503 - RNA, 1698 nt, Artificial Sequence
  derived and/or modified CDS sequence (wt) from hemagglutinin__InfluenzaA__ACK99011
augaaaguaaaacuacugguccuguuaugcacauuuacagcuacauaugcagacacaauauguauaggcuaccaugcuaacaacucgaccgacacuguugacacaguacuugaaaagaaugugacagugacacacucuguaaaccugcuugagaacagucacaauggaaaacuaugucuauuaaaaggaauagccccacuacaauuggguaacugcagcguugccggguggaucuuaggaaacccagaaugcgaauuacugauuuccaaggagucaugguccuacauuguagaaaaaccaaauccugagaauggaacauguuacccagggcauuucgcugauuaugaggaacugagggagcaauugaguucaguaucuucauuugagagguucgaaauauuccccaaagaaagcucauggcccaaccacaccguaaccggagugucagcaucaugcucccauaauggggaaagcaguuuuuacagaaauuugcuauggcugacggggaagaaugguuuguacccaaaccugagcaaguccuaugcaaacaacaaagaaaaagaaguccuuguacuaugggguguucaucacccgccaaacauaggugaccaaaaggcccucuaucauacagaaaaugcuuauguuucuguagugucuucacauuauagcagaaaauucaccccagaaauagccaaaagacccaaaguaagagaucaagaaggaagaaucaacuacuacuggacucugcuugaacccggggauacaauaauauuugaggcaaauggaaaucuaauagcgccaagauaugcuuucgcacugaguagaggcuuuggaucaggaaucaucaacucaaaugcaccaauggauaaaugugaugcgaagugccaaacaccucagggagcuauaaacagcagucuuccuuuccagaacguacacccagucacaauaggagaguguccaaaguaugucaggagugcaaaauuaaggaugguuacaggacuaaggaacaucccauccauucaauccagagguuuguuuggagccauugccgguuucauugaagggggguggacuggaaugguagaugguugguaugguuaucaucaucagaaugagcaaggaucuggcuaugcugcagaucaaaaaagcacacaaaaugccauuaaugggauuacaaacaaggugaauucuguaauugagaaaaugaacacucaauucacagcagugggcaaagaauucaacaaauuggaaagaaggauggaaaacuugaauaaaaaaguugaugauggguuuauagacauuuggacauauaaugcagaacuguugguucuacuggaaaaugaaaggacuuuggauuuccaugacuccaaugugaagaaucuguaugagaaaguaaaaagccaguuaaagaauaaugcuaaagaaauaggaaauggguguuuugaauucuaucacaaguguaacgaugaaugcauggagaguguaaagaauggaacuuaugacuauccaaaauauuccgaagaaucaaaguuaaacagggagaaaauugauggagugaaauuggaaucaaugggagucuaucagauucuggcgaucuacucaacagucgccaguucucugguucuuuuggucucccugggggcaaucagcuucuggauguguuccaaugggucuuugcaguguagaauaugcaucuaa

SEQ ID NO: 34504 - RNA, 1698 nt, Artificial Sequence
  derived and/or modified CDS sequence (wt) from hemagglutinin__InfluenzaA__ACK99012
augaaaguaaaacuacugguccuguuaugcacauuuacagcuacauaugcagacacaauauguauaggcuaccaugcuaacaacucgaccgacacuguugacacaguacuugaaaagaaugugacagugacacacucugucaaccugcuugagaacagucacaauggaaaacuaugucuauuaaaaggaauagccccacuacaauuggguaacugcagcguugccggguggaucuuaggaaacccagaaugcgaauuacugauuuccaaggagucaugguccuacauuguagaaaaaccaaauccugagaauggaacauguuacccagggcauuucgcugacuaugaggaacugagggagcaauugaguucaguaucuucauuugagagguucgaaauauuccccaaagaaagcucauggcccaaccacaccguaaccggagugucagcaucaugcucccauaauggggaaagcaguuuuuacagaaauuugcuauggcugacggggaagaaugguuuguacccaaaccugagcaaguccuaugcaaacaacaaagaaaaagaaguccuuguacuaugggguguucaucacccgccaaacauaggugaccaaaaggcccucuaucauacagaaaaugcuuauguuucuguagugucuucacauuauagcagaaaauucaccccagaaauagccaaaagacccaaaguaagagaucaagaaggaagaaucaacuacuacuggacucugcuugaacccggggauacaauaauauuugaggcaaauggaaaucuaauagcgccaagauaugcuuucgcacugaguagaggcuuuggaucaggaaucaucaacucaaaugcaccaauggauaaaugugaugcgaagugccaaacaccucagggagcuauaaacagcagucuuccuuuccagaacguacacccagucacaauaggagaguguccaaaguaugucaggagugcaaaauuaaggaugguuacaggacuaaggaacaucccauccauucaauccagagguuuguuuggagccauugccgguuucauugaagggggguggacuggaaugguagaugguugguaugguuaucaucaucagaaugagcaaggaucuggcuaugcugcagaucaaaaaagcacacaaaaugccauuaaugggauuacaaacaaggugaauucuguaauugagaaaaugaacacucaauucacagcagugggcaaagaauucaacaaauuggaaagaaggauggaaaacuugaauaaaaaaguugaugauggguuuauagacauuuggacauauaaugcagaacuguugguucuacuggaaaaugaaaggacuuuggauuuccaugacuccaaugugaagaaucuguaugagaaaguaaaaagccaguuaaagaauaaugcuaaagaaauaggaaauggguguuuugaauucuaucacaaguguaacgaugaaugcauggagaguguaaagaauggaacuuaugacuauccaaaauauuccgaagaaucaaaguuaaacagggagaaaauugauggagugaaauuggaaucaaugggagucuaucagauucuggcgaucuacucaacagucgccaguucucugguucuuuugaucucccugggggcaaucagcuucuggauguguuccaaugggucuuugcaguguagaauaugcaucuaa

SEQ ID NO: 34505 - RNA, 1698 nt, Artificial Sequence
  derived and/or modified CDS sequence (wt) from hemagglutinin__InfluenzaA__ACK99013
augaaaguaaaacuacugguccuguuaugcacauuuacagcuacauaugcagacacaauauguauaggcuaccaugcuaacaacucgaccgacacuguugacacaguacuugaaaagaaugugacagugacacacucugucaaccugcuugagaacagucacaauggaaaacuaugucuauuaaaaggaauagccccacuacaauuggguaacugcagcguugccggguggaucuuaggaaacccagaaugcgaauuacugauuuccaaggagucaugguccuacauuguagaaaaaccaaauccugagaauggaacauguuacccagggcauuucgcugauuaugaggaacugagggagcaauugaguucaguaucuucauuugagagguucgaaauauuccccaaagaaagcucauggcccaaccacaccguaaccggagugucagcaucaugcucccauaauggggaaagcaguuuuuacagaaauuugcuauggcugacggggaagaaugguuuguacccaaaccugagcaaguccuaugcaaacaacaaagaaaaagaaguccuuguacuaugggguguucaucacccgccaaacauaggugaccaaaaggcccucuaucauacagaaaaugcuuauguuucuguagugucuucacauuauagcagaaaauucaccccagaaauagccaaaagacccaaaguaagagaucaagaaggaagaaucaacuacuacuggacucugcuugaacccggggauacaauaauauuugaggcaaauggaaaucuaauagcgccaagauaugcuuucgcacugaguagaggcuuuggaucaggaaucaucaacucaaaugcaccaauggauaaaugugaugcgaagugccaaacaccucagggagcuauaaacagcagucuuccuuuccagaacguacacccagucacaauaggagaguguccaaaguaugucaggagugcaaaauuaaggaugguuacaggacuaaggaacaucccauccauucaauccagagguuuguuuggagccauugccgguuucauugaagggggguggacuggaaugguagaugguugguaugguuaucaucaucagaaugagcaaggaucuggcuaugcugcagaucaaaaaagcacacaaaaugccauuaaugggauuacaaacaaggugaauucuguaauugagaaaaugaacacucaauucacagcagugggcaaagaauucaacaaauuggaaagaaggauggaaaacuugaauaaaaaaguugaugauggguuuauagacauuuggacauauaaugcagaacuguugguucuacuggaaaaugaaaggacuuuggauuuccaugacuccaaugugaagaaucuguaugagaaaguaaaaagccaguuaaagaauaaugcuaaagaaauaggaaauggguguuuugaauucuaucacaaguguaacgaugaaugcauggagaguguaaagaauggaacuuaugacuauccaaaauauuccgaagaaucaaaguuaaacagggagaaaauugauggagugaaauuggaaucaaugggagucuaucagauucuggcgaucuacucaacagucgccaguucucugguucuuuuggucucccugggggcaaucagcuucuggauguguuccaaugggucuuugcaguguagaauaugcaucuaa

SEQ ID NO: 34506 - RNA, 1698 nt, Artificial Sequence
  derived and/or modified CDS sequence (wt) from hemagglutinin__InfluenzaA__ACK99014
augaaaguaaaacuacugguccuguuaugcacauuuacagcuacauaugcagacacaauauguauaggcuaccaugcuaacaacucgaccgacacuguugacacaguacuugaaaagaaugugacagugacacacucugucaaccugcuugagaacagucacaauggaaaacuaugucuauuaaaaggaauagccccacuacaauuggguaacugcagcguugccggguggaucuuaggaaacccagaaugcgaauuacugauuuccaaggagucaugguccuacauuguagaaaaaccaaauccugagaauggaacauguuacccagggcauuucgcugauuaugaggaacugagggagcaauugaguucaguaucuucauuugagagguucgaaauauuccccaaagaaagcucauggcccaaccacaccguaaccggagugucagcaucaugcucccauaauggggaaagcaguuuuuacagaaauuugcuauggcugacggggaagaaugguuuguacccaaaccugagcaaguccuaugcaaacaacaaagaaaaagaaguccuuguacuaugggguguucaucacccgccaaacauaggugaccaaaaggcccucuaucauacagaaaaugcuuauguuucuguagugucuucacauuauagcagaaaauucaccccagaaauagccaaaagacccaaaguaagagaucaagaaggaagaaucaacuacuacuggacucugcuugaacccggggauacaauaauauuugaggcaaauggaaaucuaauagcgccaagauaugcuuucacacugaguagaggcuuuggaucaggaaucaucaacucaaaugcaccaauggauaaaugugaugcgaagugccaaacaccucagggagcuauaaacagcagucuuccuuuccagaacguacacccagucacaauaggagaguguccaaaguaugucaggagugcaaaauuaaggaugguuacaggacuaaggaacaucccauccauucaauccagagguuuguuuggagccauugccgguuucauugaagggggguggacuggaaugguagaugguugguaugguuaucaucaucagaaugagcaaggaucuggcuaugcugcagaucaaaaaagcacacaaaaugccauuaaugggauuacaaacaaggugaauucuguaauugagaaaaugaacacucaauucacagcagugggcaaagaauucaacaaauuggaaagaaggauggaaaacuugaauaaaaaaguugaugauggguuuauagacauuuggacauauaaugcagaacuguugguucuacuggaaaaugaaaggacuuuggauuuccaugacuccaaugugaagaaucuauaugagaaaguaaaaagccaguuaaagaauaaugcuaaagaaauaggaaauggguguuuugaauucuaucacaaguguaacgaugaaugcauggagaguguaaagaauggaacuuaugacuauccaaaauauuccgaagaaucaaaguuaaacagggagaaaauugauggagugaaauuggaaucaaugggagucuaucagauucuggcgaucuacucaacagucgccaguucucugguucuuuuggucucccugggggcaaucagcuucuggauguguuccaaugggucuuugcaguguagaauaugcaucuaa

SEQ ID NO: 34507 - RNA, 1698 nt, Artificial Sequence; identical to SEQ ID NO: 34505
  derived and/or modified CDS sequence (wt) from hemagglutinin__InfluenzaA__ACK99016

SEQ ID NO: 34508 - RNA, 1698 nt, Artificial Sequence
  derived and/or modified CDS sequence (wt) from hemagglutinin__InfluenzaA__ACK99018
augaaaguaaaacuacugguccuguuaugcacauuuacagcuacauaugcagacacaauauguauaggcuaccaugcuaacaacucgaccgacacuguugacacaguacuugaaaagaaugugacagugacacacucugucaaccugcuugagaacagucacaauggaaaacuaugucuauuaaaaggaauagccccacuacaauuggguaacugcagcguugccggguggaucuuaggaaacccagaaugcgaauuacugauuuccaaggagucaugguccuacauuguagaaaaaccaaauccugagaauggaacauguuacccagggcauuucgcugauuaugaggaacugagggagcaauugaguucaguaucuucauuugagagguucgaaauauuccccaaagaaagcucauggcccaaccacaccguaaccggagugucagcaucaugcucccauaauggggaaagcaguuuuuacagaaauuugcuauggcugacggggaagaaugguuuguacccaaaccugagcaaguccuaugcaaacaacaaagaaaaagaaguccuuguacuaugggguguucaucacccaccaaacauaggugaccaaaaggcccucuaucauacagaaaaugcuuauguuucuguagugucuucacauuauagcagaaaauucaccccagaaauagccaaaagacccaaaguaagagaucaagaaggaagaaucaacuacuacuggacucugcuugaacccggggauacaauaauauuugaggcaaauggaaaucuaauagcgccaagauaugcuuucgcacugaguagaggcuuuggaucaggaaucaucaacucaaaugcaccaauggauaaaugugaugcgaagugccaaacaccucagggagcuauaaacagcagucuuccuuuccagaacguacacccagucacaauaggagaguguccaaaguaugucaggagugcaaaauuaaggaugguuacaggacuaaggaacaucccauccauucaauccagagguuuguuuggagccauugccgguuucauugaagggggguggacuggaaugguagaugguugguaugguuaucaucaucagaaugagcaaggaucuggcuaugcugcagaucaaaaaagcacacaaaaugccauuaaugggauuacaaacaaggugaauucuguaauugagaaaaugaacacucaauucacagcagugggcaaagaauucaacaaauuggaaagaaggauggaaaacuugaauaaaaaaguugaugauggguuuauagacauuuggacauauaaugcagaacuguugguucuacuggaaaaugaaaggacuuuggauuuccaugacuccaaugugaagaaucuguaugagaaaguaaaaagccaguuaaagaauaaugcuaaagaaauaggaaauggguguuuugaauucuaucacaaguguaacgaugaaugcauggagaguguaaagaauggaacuuaugacuauccaaaauauuccgaagaaucaaaguuaaacagggagaaaauugauggagugaaauuggaaucaaugggagucuaucagauucuggcgaucuacucaacagucgccaguucucugguucuuuuggucucccugggggcaaucagcuucuggauguguuccaaugggucuuugcaguguagaauaugcaucuaa

SEQ ID NO: 34509 - RNA, 1698 nt, Artificial Sequence; identical to SEQ ID NO: 34505
  derived and/or modified CDS sequence (wt) from hemagglutinin__InfluenzaA__ACK99023

SEQ ID NO: 34510 - RNA, 1698 nt, Artificial Sequence
  derived and/or modified CDS sequence (wt) from hemagglutinin__InfluenzaA__ACK99026
augaaaguaaaacuacugguccuguuaugcacauuuacagcuacauaugcagacacaauauguauaggcuaccaugcuaacaacucgaccgacacuguugacacaguacuugaaaagaaugugacagugacacacucugucaaccugcuugagaacagucacaauggaaaacuaugucuauuaaaaggaauagccccacuacaauuggguaacugcagcguugccggguggaucuuaggaaacccagaaugcgaauuacugauuuccaaggagucaugguccuacauuguagaaaaaccaaauccugagaauggaacauguuacccagggcauuucgcugauuaugaggaacugagggagcaauugaguucaguaucuucauuugagagguucgaaauauuccccaaagaaagcucauggcccaaccacaccguaaccggagugucagcaucaugcucccauaauggggaaagcaguuuuuacagaaauuugcuauggcugacggggaagaaugguuuguacccaaaccugagcaaguccuaugcaaacaacaaagaaaaagaaguccuuguacuaugggguguucaucacccgccaaacauaggugaccaaaaggcccucuaucauacagaaaaugcuuauguuucuguagugucuucacauuauagcagaaaauucaccccagaaauagccaaaagacccaaaguaagagaucaagaaggaagaaucaacuacuacuggacucugcuugaacccggggauacaauaauauuugaggcaaauggaaaucuaauagcgccaagauaugcuuucgcacugaguagaggcuuuggaucaggaaucaucaacucaaaugcaccaauggauaaaugugaugcgaagugccaaacaccucagggagcuauaaacagcagucuuccuuuccagaacguacacccaaucacaauaggagaguguccaaaguaugucaggagugcaaaauuaaggaugguuacaggacuaaggaacaucccauccauucaauccagagguuuguuuggagccauugccgguuucauugaagggggguggacuggaaugguagaugguugguaugguuaucaucaucagaaugagcaaggaucuggcuaugcugcagaucaaaaaagcacacaaaaugccauuaaugggauuacaaacaaggugaauucuguaauugagaaaaugaacacucaauucacagcagugggcaaagaauucaacaaauuggaaagaaggauggaaaacuugaauaaaaaaguugaugauggguuuauagacauuuggacauauaaugcagaacuguugguucuacuggaaaaugaacggacuuuggauuuccaugacuccaaugugaagaaucuguaugagaaaguaaaaagccaguuaaagaauaaugcuaaagaaauaggaaauggguguuuugaauucuaucacaaguguaacgaugaaugcauggagaguguaaagaauggaacuuaugacuauccaaaauauuccgaagaaucaaaguuaaacagggagaaaauugauggagugaaauuggaaucaaugggagucuaucagauucuggcgaucuacucaacagucgccaguucucugguucuuuuggucucccugggggcaaucagcuucuggauguguuccaaugggucuuugcaguguagaauaugcaucuaa

SEQ ID NO: 34511 - RNA, 1698 nt, Artificial Sequence
  derived and/or modified CDS sequence (wt) from hemagglutinin__InfluenzaA__ACK99027
augaaaguaaaacuacugguccuguuaugcacauuuacagcuacauaugcagacacaauauguauaggcuaccaugccaacaacucaaccgacacuguugacacaguacuugagaagaaugugacagugacacacucugucaaccugcuugaggacagucacaauggaaaauuaugucuauuaaaaggaauagccccacuacaauuggguaauugcagcguugccggauggaucuuaggaaacccagaaugcgaauuacugauuuccagggaaucaugguccuacauuguagaaaaaccaaauccugagaauggaacauguuacccagggcauuucgccgacuaugaggaacugagggagcaauugaguucaguaucuucauuugagagauucgaaauauuucccaaagaaagcucauggcccaaccacaccacaaccggaguaucagcaucaugcucccauaauggggaaagcaguuuuuacaaaaauuugcuauggcugacggggaagaaugguuuguacccaaaccugagcaaguccuaugcaaacaacaaagagaaagaaguccuuguacuaugggguguucaucacccgccuaacauaggugaucaaagggcccucuaucauacagaaaaugcuuaugucucuguagugucuucacauuauagcagaaaauucaccccagaaauagccaaaagacccaaaguaagagaucaagaaggaagaaucaacuacuacuggacucuacuugagcccggggauacaauaauauuugaggcaaauggaaaucuaauagcgccaagauaugcuuucgcacugaguagaggcuuuggaucaggaaucaucaacucaaaugcaucaaugggugaaugugaugcgaagugccagacaccucagggagcuauaaacagcagucuuccuuuccagaauguacacccagucacaauaggagaguguccaaaguaugucaggagugcaaaauuaaggaugguuacaggacuaaggaacaucccauccauucaauccagagguuuguuuggagccauugccgguuucauugaagggggguggacuggaaugguagaugguugguaugguuaucaucaucagaaugagcagggaucuggcuaugcugcagaucaaaaaagcacacaaaaugccauuaaugggauuacaaacaaggugaauucuguaauugagaaaaugaacacucaauucacagcugugggcaaagaauucaacaaauuggaaagaaggauggaaaacuuaaauaaaaaaguugaugauggguuuauagacauuuggacauauaaugcagaauuguugguucuacuggaaaaugaaaggacuuuggauuuccaugacuccaaugugaagaaucuguaugagaaaguaaaaagccaauuaaagaauaaugccaaagaaauaggaaauggguguuuugaauucuaucacaaguguaaugaugaaugcauggagaguguaaaaaauggaacuuaugacuauccaaaauauuccgaagaaucaaaguuaaacagggagaaaauugauggagugaaauuggaaucaaugggagucuaucagauucuggcgaucuacucaacagucgccaguucucugguucuuuuggucucccugggggcaaucagcuucuggauguguuccaaugggucuuugcaguguagaauaugcaucuaa

SEQ ID NO: 34512 - RNA, 1698 nt, Artificial Sequence
  derived and/or modified CDS sequence (wt) from hemagglutinin__InfluenzaA__ACK99028
augaaaguaaaacuacugguccuguuaugcacauuuacagcuacauaugcagacacaauauguauaggcuaccaugcuaacaacucgaccgacacuguugacacaguacuugaaaagaaugugacagugacacacucugucaaccugcuugagaacagucacaauggaaaacuaugucuauuaaaaggaauagccccacuacaauuggguaacugcagcguugccggguggaucuuaggaaacccagaaugcgaauuacugauuuccaaggagucaugguccuacauuguagaaaaaccaaauccugagaauggaacauguuacccagggcauuucgcugacuaugaggaacugagggagcaauugaguucaguaucuucauuugagagguucgaaauauuccccaaagaaagcucauggcccaaccacaccguaaccggagugucagcaucaugcucccauaauggggaaaguaguuuuuacagaaauuugcuauggcugacggggaagaaugguuuguacccaaaccugagcaaguccuaugcaaacaacaaagaaaaagaaguccuuguacuaugggguguucaucacccgccaaacauaggugaccaaaaggcccucuaucauacagaaaaugcuuauguuucuguagugucuucacauuauagcagaaaauucaccccagaaauagccaaaagacccaaaguaagagaucaagaaggaagaaucaacuacuacuggacucugcuugaacccggggauacaauaauauuugaggcaaauggaaaucuaauagcgccaagauaugcuuucgcacugaguagaggcuuuggaucaggaaucaucaacucaaaugcaccaauggauaaaugugaugcgaagugccaaacaccuaagggagcuauaaacagcagucuuccuuuccagaacguacacccagucacaauaggagaguguccaaaguaugucaggagugcaaaauuaaggaugguuacaggacuaaggaacaucccauccauucaauccagagguuuguuuggagccauugccgguuucauugaagggggguggacuggaaugguagaugguugguaugguuaucaucaucagaaugagcaaggaucuggcuaugcugcagaucaaaaaagcacacaaaaugccauuaaugggauuacaaacaaggugaauucuguaauugagaaaaugaacacucaauucacagccgugggcaaagaauucaacaaauuggaaagaaggauggaaaacuugaauaaaaaaguugaugauggguuuauagacaucuggacauauaaugcagaacuguugguucuacuggaaaaugaaaggacuuuggauuuccaugacuccaaugugaagaaucuguaugagaaaguaaaaagccaguuaaagaauaaugcuaaagaaauaggaaauggguguuuugaauucuaucacaaguguaacgaugaaugcauggagaguguaaagaauggaacuuaugacuauccaaaauauuccgaagaaucaaaguuaaacagggagaaaauugauggagugaaauuggaaucaaugggagucuaucagauucuggcgaucuacucaacagucgccaguucucugguucuuuuggucucccugggggcaaucagcuucuggauguguuccaaugggucuuugcaguguagaauaugcaucuaa

SEQ ID NO: 34513 - RNA, 1698 nt, Artificial Sequence
  derived and/or modified CDS sequence (wt) from hemagglutinin__InfluenzaA__ACK99029
augaaaguaaaacuacugguccuguuaugcacauuuacagcuacauaugcagacacaauauguauaggcuaccaugcuaacaacucgaccgacacuguugacacaguacuugaaaagaaugugacagugacacacucugucaaccugcuugagaacagucacaauggaaaacuaugucuauuaaaaggaauagccccacuacaauuggguaacugcagcguugccggguggaucuuaggaaacccagaaugcgaauuacugauuuccaaggagucaugguccuacauuguagaaaaaccaaauccugagaauggaacauguuacccagggcauuucgcugauuaugaggaacugagggagcaauugaguucaguaucuucauucgagagguucgaaauauuccccaaagaaagcucauggcccaaccacaccguaaccggagugucagcaucaugcucccauaauggggaaagcaguuuuuacagaaauuugcuauggcugacggggaagaaugguuuguacccaaaccugagcaaguccuaugcaaacaacaaagaaaaagaaguccuuguacuaugggguguucaucacccgccaaacauaggugaccaaaaggcccucuaucauacagaaaaugcuuauguuucuguagugucuucacauuauagcagaaaauucaccccagaaauauccaaaagacccaaaguaagagaucaagaaggaagaaucaacuacuacuggacucugcuugaacccggggauacaauaauauuugaggcaaauggaaaucuaauagcgccaagauaugcuuucgcacugaguagaggcuuuggaucaggaaucaucaacucaaaugcaccaauggauaaaugugaugcgaagugccaaacaccucagggagcuauaaacagcagucuuccuuuccagaacguacacccagucacaauaggagaguguccaaaguaugucaggagugcaaaauuaaggaugguuacaggacuaaggaacaucccauccauucaauccagagguuuguuuggagccauugccgguuucauugaagggggguggacuggaaugguagaugguugguaugguuaucaucaucagaaugagcaaggaucuggcuaugcugcagaucaaaaaagcacacaaaaugccauuaaugggauuacaaacaaggugaauucuguaauugagaaaaugaacacucaauucacagcagugggcaaagaauucaacaaauuggaaagaaggauggaaaacuugaauaaaaaaguugaugauggguuuauagacauuuggacauauaaugcagaacuguugguucuacuggaaaaugaaaggacuuuggauuuccaugacuccaaugugaagaaucuguaugagaaaguaaaaagccaguuaaagaauaaugcuaaagaaauaggaaauggguguuuugaauucuaucacaaguguaacgaugaaugcauggagaguguaaagaauggaacuuaugacuauccaaaauauuccgaagaaucaaaguuaaacagggagaaaauugauggagugaaauuggaaucaaugggagucuaucagauucuggcgaucuacucaacagucgccaguucucugguucuuuuggucucccugggggcaaucagcuucuggauguguuccaaugggucuuugcaguguagaauaugcaucuaa

SEQ ID NO: 34514 - RNA, 1698 nt, Artificial Sequence; identical to SEQ ID NO: 34505
  derived and/or modified CDS sequence (wt) from hemagglutinin__InfluenzaA__ACK99030

SEQ ID NO: 34515 - RNA, 1698 nt, Artificial Sequence; identical to SEQ ID NO: 34505
  derived and/or modified CDS sequence (wt) from hemagglutinin__InfluenzaA__ACK99031

SEQ ID NO: 34516 - RNA, 1698 nt, Artificial Sequence; identical to SEQ ID NO: 34505
  derived and/or modified CDS sequence (wt) from hemagglutinin__InfluenzaA__ACK99032

SEQ ID NO: 34517 - RNA, 1698 nt, Artificial Sequence
  derived and/or modified CDS sequence (wt) from hemagglutinin__InfluenzaA__ACK99033
augaaaguaaaacuacugguccuguuaugcacauuuacagcuacauaugcagacacaauauguauaggcuaccaugcuaacaacucgaccgacacuguugacacaguacuugaaaagaaugugacagugacacacucugucaaccugcuugagaacagucacaauggaaaacuaugucuauuaaaaggaauagccccacuacaauuggguaacugcagcguugccggguggaucuuaggaaacccagaaugcgaauuacugauuuccaaggagucaugguccuacauuguagaaaaaccaaauccugagaauggaacauguuacccagggcauuucgcugacuaugaggaacugagggagcaauugaguucaguaucuucauuugagagguucgaaauauuccccaaagaaagcucauggcccaaccacaccguaaccggagugucagcaucaugcucccauaauggggaaagcaguuuuuacagaaauuugcuauggcugacggggaagaaugguuuguacccaaaccugagcaaguccuaugcaaacaacaaagaaaaagaaguccuuguacuaugggguguucaucacccgccaaacauaggugaccaaaaggcccucuaucauacagaaaaugcuuauguuucuguagugucuucacauuauagcagaaaauucaccccagaaauagccaaaagacccaaaguaagagaucaagaaggaagaaucaacuacuacuggacucugcuugaacccggggauacaauaauauuugaggcaaauggaaaucuaauagcgccaagauaugcuuucgcacugaguagaggcuuuggaucaggaaucaucaacucaaaugcaccaauggauaaaugugaugcgaagugccaaacaccucagggagcuauaaacagcagucuuccuuuccagaacguacacccagucacaauaggagaguguccaaaguaugucaggagugcaaaauuaaggaugguuacaggacuaaggaacaucccauccauucaauccagagguuuguuuggagccauugccgguuucauugaagggggguggacuggaaugguagaugguugguaugguuaucaucaucagaaugagcaaggaucuggcuaugcugcagaucaaaaaagcacacaaaaugccauuaaugggauuacaaacaaggugaauucuguaauugagaaaaugaacacucaauucacagcagugggcaaagaauucaacaaauuggaaagaaggauggaaaacuugaauaaaaaaguugaugauggguuuauagacauuuggacauauaaugcagaacuguugguucuacuggaaaaugaaaggacuuuggauuuccaugacuccaaugugaagaaucuguaugagaaaguaaaaagccaguuaaagaauaaugcuaaagaaauaggaaauggguguuuugaauucuaucacaaguguaacgaugaaugcauggagaguguaaagaauggaacuuaugacuauccaaaauauuccgaagaaucaaaguuaaacagggagaaaauugauggagugaaauuggaaucaaugggagucuaucagauucuggcgaucuacucaacagucgccaguucucugguucuuuuggucucccugggggcaaucagcuucuggauguguuccaaugggucuuugcaguguagaauaugcaucuaa

SEQ ID NO: 34518 - RNA, 1698 nt, Artificial Sequence
  derived and/or modified CDS sequence (wt) from hemagglutinin__InfluenzaA__ACK99034
augaaaguaaaacuacugguccuguuaugcacauuuacagcuacauaugcagacacaauauguauaggcuaccaugcuaacaacucgaccgacacuguugacacaguacuugaaaagaaugugacagugacacacucugucaaccugcuugagaacagucacaauggaaaacuaugucuauuaaaaggaauagccccacuacaauuggguaacugcagcguugccggguggaucuuaggaaacccagaaugcgaauuacugauuuccaaggagucaugguccuacauuguagaaaaaccaaauccugagaauggaacauguuacccagggcauuucgcugauuaugaggaacugagggagcaauugaguucaguaucuucauuugagagguucgaaauauuccccaaagaaagcucauggcccaaccacaccguaaccggagugucagcaucaugcucccauaauggggaaagcaguuuuuacagaaauuugcuauggcugacggggaagaaugguuuguacccaaaccugagcaaguccuaugcaaacaacaaagaaaaagaaguccuuguacuaugggguguucaucacccgccaaacauaggugaccaaaaggcccucuaucauacagaaaaugcuuauguuucuguagugucuucacauuauagcagaaaauucaccccagaaauagccaaaagacccaaaguaagagaucaagaaggaagaaucaacuacuacuggacucugcuugaacccggggauacaauaauauuugaggcaaauggaaaucuaauagcgccaagauaugcuuucgcacugaguagagacuuuggaucaggaaucaucaacucaaaugcaccaauggauaaaugugaugcgaagugccaaacaccucagggagcuauaaacagcagucuuccuuuccagaacguacacccagucacaauaggagaguguccaaaguaugucaggagugcaaaauuaaggaugguuacaggacuaaggaacaucccauccauucaauccagagguuuguuuggagccauugccgguuucauugaagggggguggacuggaaugguagaugguugguaugguuaucaucaucagaaugagcaaggaucuggcuaugcugcagaucaaaaaagcacacaaaaugccauuaaugggauuacaaacaaggugaauucuguaauugagaaaaugaacacucaauucacagcagugggcaaagaauucaacaaauuggaaagaaggauggaaaacuugaauaaaaaaguugaugauggguuuauagacauuuggacauauaaugcagaacuguugguucuacuggaaaaugaaaggacuuuggauuuccaugacuccaaugugaagaaucuguaugagaaaguaaaaagccaguuaaagaauaaugcuaaagaaauaggaaauggguguuuugaauucuaucacaaguguaacgaugaaugcauggagaguguaaagaauggaacuuaugacuauccaaaauauuccgaagaaucaaaguuaaacagggagaaaauugauggagugaaauuggaaucaaugggagucuaucagauucuggcgaucuacucaacagucgccaguucucugguucuuuuggucucccugggggcaaucagcuucuggauguguuccaaugggucuuugcaguguagaauaugcaucuaa

SEQ ID NO: 34519 - RNA, 1698 nt, Artificial Sequence
  derived and/or modified CDS sequence (wt) from hemagglutinin__InfluenzaA__ACK99035
augaaaguaaaacuacugguccuguuaugcacauuuacagcuacauaugcagacacaauauguauaggcuaccaugcuaacaacucgaccgacacuguugacacaguacuugaaaagaaugugacagugacacacucugucaaccugcuugagaacagucacaauggaaaacuaugucuauuaaaaggaauagccccacuacaauuggguaacugcagcguugccggguggaucuuaggaaacccagaaugcgaauuacugauuuccaaggagucaugguccuacauuguagaaaaaccaaauccugagaauggaacauguuacccagggcauuucgcugauuaugaggaacugagggagcaauugaguucaguaucugcauucgagagguucgaaauauuccccaaagaaagcucauggcccaaccacaccguaaccggagugucagcaucaugcucccauaauggggaaagcaguuuuuacagaaauuugcuauggcugacggggaagaaugguuuguacccaaaccugagcaaguccuaugcaaacaacaaagaaaaagaaguccuuguacuaugggguguucaucacccgccaaacauaggugaccaaaaggcccucuaucauacagaaaaugcuuauguuucuguagugucuucacauuauagcagaaaauucaccccagaaauauccaaaagacccaaaguaagagaucaagaaggaagaaucaacuacuacuggacucugcuugaacccggggauacaauaauauuugaggcaaauggaaaucuaauagcgccaagauaugcuuucgcacugaguagaggcuuuggaucaggaaucaucaacucaaauacaccaauggauaaaugugaugcgaagugccaaacaccucagggagcuauaaacagcagucuuccuuuccagaacguacacccagucacaauaggagaguguccaaaguaugucaggagugcaaaauuaaggaugguuacaggacuaaggaacaucccauccauucaauccagagguuuguuuggagccauugccgguuucauugaagggggguggacuggaaugguagaugguugguaugguuaucaucaucagaaugagcaaggaucuggcuaugcugcagaucaaaaaagcacacaaaaugccauuaaugggauuacaaacaaggugaauucuguaauugagaaaaugaacacucaauucacagcagugggcaaagaauucaacaaauuggaaagaaggauggaaaacuugaauaaaaaaguugaugauggguuuauagacauuuggacauauaaugcagaacuguugguucuacuggaaaaugaaaggacuuuggauuuccaugacuccaaugugaagaaucuguaugagaaaguaaaaagccaguuaaagaauaaugcuaaagaaauaggaaauggguguuuugaauucuaucacaaguguaacgaugaaugcauggagaguguaaagaauggaacuuaugacuauccaaaauauuccgaagaaucaaaguuaaacagggagaaaauugauggagugaaauuggaaucaaugggagucuaucagauucuggcgaucuacucaacagucgccaguucucugguucuuuuggucucccugggggcaaucagcuucuggauguguuccaaugggucuuugcaguguagaauaugcaucuaa

SEQ ID NO: 34520 - RNA, 1701 nt, Artificial Sequence; identical to SEQ ID NO: 34350
  derived and/or modified CDS sequence (wt) from hemagglutinin__InfluenzaA__ACK99421

SEQ ID NO: 34521 - RNA, 1689 nt, Artificial Sequence
  derived and/or modified CDS sequence (wt) from hemagglutinin__InfluenzaA__ACK99432
auggccaucauuuaucucauacuccuguucacagcagugaggggggaccagauaugcauuggauaccaugccaauaauuccacagaaaagaucgacacaauucuagagcggaaugucacugugacucaugccaaggacauccuugagaagacccauaacggaaagcuaugcaaacuaaacggaaucccuccacuugaacuaggggacuguagcauugccggauggcuccuuggaaauccagaaugugauaggcuucuaagggugccagaaugguccuauauaauggagaaagaaaacccgagauacaguuuguguuacccaggcagcuucaaugacuaugaagaauugaaacaucuccucagcagcguaaaacauuucgagaaaguaaagauuuugcccaaagauagauggacacagcauacaacaacuggagguucaauggccugcgcggugucagguaaaccaucauucuucaggaacauggucuggcugacaacgaaaggaccaaauuauccgguugcccaaggaucguacaacaauacgagcggagaacaaaugcuaauaauuuggggagugcaccauccuaaugaugaggcagaacaaagagcauuguaccagaaagugggaaccuauguuuccgcaagcacaucaacauuguacaaaaggucaaucccagaaauagcagcaaggccuaaagugaauggacuaggaaguagaauggaauucucuuggacccucuuggauaugugggacaccauaaauuuugagagcacugguaaucuaguugcaccagaguauggguuuaaaauaucgaaaagagguaguucagggaucaugaagacagaaggaacacuugagaacugugaaaccaaaugccaaacuccuuugggagcaauaaauacaacacuaccuuuucacaauguccacccacugacaauaggugaaugccccaaauauguaaaaucggagaaauuggucuuagcaacaggacuaaggaauguuccccagauugaaucaagaggauuguuuggggcaauagcugguuuuauagaaggaggauggcaaggaaugguugaugguugguauggauaccaucacagcaaugaccagggaucaggguaugcagcagacaaagaauccacucaaaaggcauuugauggaaucaccaacaagguaaauucugugauugaaaagaugaacacccaauuugaagcuguugggaaagaauucaguaacuuagagaaaagacuggagaacuugaacaaaaagauggaagacggguuucuagauguguggacauacaaugcagagcuucuaguucugauggaaaaugagaggacacuugacuuucaugauucuaaugucaagaaucuguaugauaaagucagaaugcagcugagagacaacgucaaagaacuaggaaauggauguuuugaauuuuaucacaaaugugacaaugaaugcauggauagugugaaaaacgggacauaugauuaucccaaguaugaagaagaaucuaaacuaaauagaaaugaaaucaaagggguaaaauugagcagcauggggguuuaucaaauccuugccauuuaugcuacaguagcagguucucugucacuggcaaucaugauggcugggaucucuuucuggaugugcuccaacgggucucugcagugcagaaucugcauauga

SEQ ID NO: 34522 - RNA, 1701 nt, Artificial Sequence
  derived and/or modified CDS sequence (wt) from hemagglutinin__InfluenzaA__ACK99443
augaaagcaaaacuacuaguccuguuaugugcauuuacagcuacagaugcagacacaauauguauaggcuaccaugcgaacaacucaaccgacacuguugacacaguacuugagaagaacgugacagugacacacucugucaaccuacuugaggacagucacaacggaaaacuaugucgacuaaaaggaauagccccacuacaauuggguaauugcagcauugccggauggaucuuaggaaacccagaaugcgaaucacuguuuucuaaggaaucaugguccuacauugcagaaacaccaaacuccgagaauggaacauguuacccaggguauuucgccgacuaugaggaacugagggagcaauugaguucaguaucaucauucgagagauucgaaauauuccccaaagaaagcucauggcccaaccacaccguaaccaaaggaguaacggcagcaugcucccauaaugggaaaagcaguuuuuacagaaauuugcuauggcugacggagaagaauggcuuguacccaaaucugagcaaguccuauguaaacaacaaagagaaagaaguccuuguacuaugggguguucaucacccgucuaacauaggggaccaaagggccaucuaucauacagaaaaugcuuaugucucuguagugucuucacauuauagcaggagauucaccccagaaauagcaaaaagacccaaaguaagaggucaagaaggaagaauuaacuacuacuggacucugcuggaacccggggacacaauaauauuugaggcaaauggaaaucuaauagcgccaugguaugcuuucgcacugaguagaggcuuugggucaggaaucaucaccucaaacgcaucaauggaugaaugugacgcgaagugucaaacaccccagggagcuauaaacaguagucuuccuuuccagaauguacacccagucacaauaggagaguguccaaaguaugucaggaguacaaaauuaaggaugguuacaggacuaaggaacaucccauccguucaauccagagguuuguuuggagccauugccgguuucauugaagggggguggacuggaaugauagauggaugguaugguuaucaucaucaaaaugaacaaggaucuggcuaugcugcggaucaaaaaagcacacaaaaugccauuaacgggauuacaaacaaggugaauucuguaaucgagaaaaugaacacucaauucacagcugugggcaaagaauucaacaaauuagaaagaaggauggaaaacuuaaauaaaaaaguugaugauggauuucuggacauuuggacauauaaugcagaauuguugguucuacuggaaaaugaaaggacuuuggauuuucaugacucaaaugugaagaaucuguaugagaaaguaaaaagccaauuaaagaauaaugccaaagaaauaggaaacggguguuuugaauucuaccacaaguguaacaaugaaugcauggaaagugugaaaaauggaacuuaugacuauccaaaauauuccgaggaaucaaaguuaaacagggaaaaaauugauggagugaaauuggaaucaaugggagucuaucagauucuggcgaucuacucaacugucgccaguucacuggugcuuuuggucucccugggggcaaucagcuucuggauguguucuaaugggucuuugcaguguagaauaugcaucuga

SEQ ID NO: 34523 - RNA, 1701 nt, Artificial Sequence
  derived and/or modified CDS sequence (wt) from hemagglutinin__InfluenzaA__ACK99465
augaaagcaaaacuacuaguccuguugugugcauuuacugcuacauaugcagacacaauauguauaggcuaccaugcgaacaacucaaccgacacuguugacacaguacuugagaagaacgugacagugacacacucugucaaccuacuugaggacagucacaacggaaaacuaugccgacuaaaaggaacagccccacuacaauuggguaauugcagcguugccggauggaucuuaggaaacccagaaugcgaaucacuguuuucuaaggaaucaugguccuacauugcagaaaaaccaaacccugagaauggaacauguuacccaggguauuucgccgacuaugaggaacugagggagcaauugagcucaguaucaucauucgagagauucgaaauauuccccaaggaaagcucauggcccaaccacacaguaaccaaaggagugacggcaucaugcucccauaaugggaaaagcaguuuuuacaaaaauuugcuauggcugacgaaaaagaauggcuuguacccaaaucugagcaaguccuauguaaacaacaaggagaaagaaguccuuguacuaugggguguucaucacccgucuaacauaggggaccaaagggccaucuaucauacagaaaaugcuuaugucucuguggugucuucacauuauagcagaagauucaccccagaaauagcaaaaagacccaaaguaagagaucaagaagggagaauuaacuacuacuggacucugcuggaacccggggacacaauaauauuugaggcaaauggaaaucuaauagcgccaugguacgcuuucgcacugaguagaggcuuugggucaggaaucaucaccucaaacgcaucaaugggugaaugugacgcuaagugucaaacaccccaaggagcuauaaacaguagucuuccuuuccagaauguacacccagucacaauaggagagugucccaaguaugucaggaguacaaaauuaaggaugguuacaggacuaagaaacaucccauccauucaaucuagagguuuguuuggagccauugccgguuucauugaagggggguggacuggaaugauagauggaugguaugguuaucaucaucagaaugaacaaggaucuggcuaugcugcagacaaaaaaagcacacaaaaugccauugaugggauuacaaacaaggugaauucuguaaucgagaaaaugaacacucaauucacagcuguaggcaaagaauucaacaaauuagagagaaggauggaaaacuuaaauaagaaaguugaugauggauuucuggacauuuggacauauaaugcagaguuguugguucuccuggaaaaugaaaggacuuuggauuuucaugacucaaaugugaagaaucuguaugagaaaguaaaaaaccaauugaagaauaaugccaaagaaaucgggaacggguguuuugaauucuaucacaaguguaacaaugaaugcauggaaagugugaaaaauggaacuuaugacuauccaaaauauuccgaagaaucaaaguuaaaaagggaaaaaauugauggagugaaauuggaaucaaugggagucuaucagauucuggcgaucuacucaacugucgccaguucacuggugcuuuuggucucccugggggcaaucaguuucuggauguguucuaaugggucuuugcaguguagaauaugcaucuga

SEQ ID NO: 34524 - RNA, 1701 nt, Artificial Sequence
  derived and/or modified CDS sequence (wt) from hemagglutinin__InfluenzaA__ACK99476
augaagacuaucauugcuuugagcuacauuuuauguaugguuuucgcucaaaaacuucccggaaaugacaacagcacggcaacgcugugccugggacaccaugcagugccaaacggaacgcuagugaaaacaaucacgaaugaccaaauugaagugacuaaugcuacugagcugguucagaguuccucaacagguagaauaugcgacaguccucaccgaauccuugauggaaaaaacugcacacugauagaugcucuauugggagacccucauugugaugacuuccaaaauaaggaaugggaccuuuuuguugaacgcagcaaagcuuacagcaacuguuacccuuaugaugugccggauuaugccucccuuaggucacuaguugccucauccggcacccuggaguuuaacaaugaaagcuucaauuggacuggagucgcucagaauggaacaagcuaugcuugcaaaaggagaucuguuaaaaguuucuuuaguagauugaauugguugcacaaauuagaauacaaauauccagcacugaacgugacuaugccaaacaaugacaaauuugacaaauuguacauuugggggguucaccacccgaggacggacagugaccaaaccagccuauauguucaagcaucagggagagucacagucucuaccaaaagaagccaacaaacuguaaucccgaauaucggaucuagccccuggguaaggggugucuccagcagaauaagcaucuauuggacaauaguaaaaccuggagacauacuuuugauuaacagcacagggaaucuaauugcuccucgggguuacuucaaaauacgaagugggaaaagcucaauaaugaggucagaugcacccauuggcaacugcaauucugaaugcaucacuccaaauggaagcauucccaaugacaaaccauuucaaaauguaaacaggaucacauauggggccugucccagauauguuaagcaaaacacucugaaauuggcaacagggaugcggaauguaccagagaaacaaacuagaggcauauucggcgcaaucgcagguuucauagaaaaugguugggagggaaugguagacgguugguacgguuucaggcaucaaaauucugagggcacaggacaagcagcagaucuuaaaagcacucaagcagcaaucaaccaaaucaacgggaaacugaauagguuaaucgagaaaacgaacgagaaauuccaucaaaucgaaaaagaauucucagaaguagaagggagaauucaggaccucgagaaauauguugaagacacuaaaauagaucucuggucguacaacgcggagcuucuuguugcccuggagaaccaacauacaauugaucuaacugacucagaaaugaacaaacuguuugaaagaacaaggaagcaacugagggaaaaugcugaggacaugggcaaugguugcuucaaaauauaccacaaaugugacaaugccugcauagggucaaucagaaauggaacuuaugaccaugauguauacagagacgaagcauuaaacaaccgguuccagaucaaagguguugagcugaagucaggauacaaagauuggauccuauggauuuccuuugccauaucauguuuuuugcuuuguguuguuuugcugggguucaucaugugggccugccaaaaaggcaacauuaggugcaacauuugcauuuga

SEQ ID NO: 34525 - RNA, 1698 nt, Artificial Sequence; identical to SEQ ID NO: 33945
  derived and/or modified CDS sequence (wt) from hemagglutinin__InfluenzaA__ACL12063

SEQ ID NO: 34526 - RNA, 1701 nt, Artificial Sequence
  derived and/or modified CDS sequence (wt) from hemagglutinin__InfluenzaA__ACL12129
augaagacuaucauugcuuugagcuacauuuuaugucugguuuucgcucaaaaacuucccggaaaugacaacagcacagcaacgcugugccugggacaucaugcagugccaaacggaacgcuagugaaaacaaucacgaaugaucaaauugaagugacuaaugcuacugaguugguucagaguuccucaacagguagaauaugcggcaguccucaccgaauccuugauggaaaaaacugcacacugauagaugcucuauugggagacccucauugugauggcuuccaaaauaaggaaugggaccuuuuuguugaacgcagcaaagcuuacagcaacuguuacccuuaugaugugccggauuaugccucccuuaggucacuaguugccucaucaggcacccuggaguuuaucaaugaagacuucaauuggacuggagucgcucaggaugggggaagcuaugcuugcaaaagaggaucuguuaacaguuucuuuaguagauugaauugguugcacaaauuagaauacaaauauccagcgcugaacgugacuaugccaaacaauggcaaauuugacaaauuguacauuugggggguucaccacccgagcacggacagugaccaaaccagccuauauguucgagcaucagggagagucacagucucuaccaaaagaagccaacaaacuguaaccccgaauaucgggucuagacccuggguaaggggucaguccaguagaauaagcaucuauuggacaauaguaaaaccgggagacauacuuuugauugauagcacagggaaucuaauugcuccucgggguuacuucaaaauacgaaaugggaaaagcucaauaaugaggucagaugcacccauuggcaacugcaguucugaaugcaucacuccaaauggaagcauucccaaugacaaaccuuuucaaaauguaaacagaaucacauauggggccugccccagauauguuaagcaaaacacucugaaauuggcaacagggaugcggaauguaccagagaaacaaacuagaggcauauucggcgcaaucgcagguuucauagaaaaugguugggagggaaugguagacgguugguacgguuucaggcaucaaaauucugagggcacaggacaagcagcagaucuuaaaagcacucaagcagcaaucgaccaaaucaacgggaaacugaauagguuaaucgagaaaacgaacgagaaauuccagcaaaucgaaaaagaauucucagaaguagaagggagaauucaggaccucgagaaauauguugaagacacuaaaauagaucucuggucuuacaacgcggagcuucuuguugcccuggagaaccaacauacaauugaucuaacugacucagaaaugaacaaacuguuugaaaaaacaaggaagcaacugagggaaaaugcugaggacaugggcaaugguugcuucaaaauauaccacaaaugugacaaugccugcauagggucaaucagaaauggaacuuaugaccaugauguauacagagacgaagcauuaaacaaccgguuccagaucaaagguguugagcugaagucaggauacaaagauuggauccuauggauuuccuuugccauaucaugcuuuuugcuuuguguuguuuugcugggguucaucaugugggccugccaaaaaggcaacauuaggugcaacauuugcauuuga

SEQ ID NO: 34527 - RNA, 1701 nt, Artificial Sequence; identical to SEQ ID NO: 34368
  derived and/or modified CDS sequence (wt) from hemagglutinin__InfluenzaA__ACL12140

SEQ ID NO: 34528 - RNA, 1698 nt, Artificial Sequence; identical to SEQ ID NO: 34453
  derived and/or modified CDS sequence (wt) from hemagglutinin__InfluenzaA__ACL12151

SEQ ID NO: 34529 - RNA, 1701 nt, Artificial Sequence
  derived and/or modified CDS sequence (wt) from hemagglutinin__InfluenzaA__ACL12162
augaagacuaucauugcuuugagcuacauucuaugucugguuuucgcucaaaaacuuccuggaaaugacaacagcacggcaacgcugugccuugggcaccaugcaguaccaaacggaacgauagugaaaacaaucacgaaugaccaaauugaaguuacuaaugcuacugagcugguucagaguuccucaacaggugaaauaugcgacaguccucaucagauccuugauggagaaaacugcacacuaauagaugcucuauugggagacccucagugugauggcuuccaaaauaagaaaugggaccuuuuuguugaacgcagcaaagccuacagcaacuguuacccuuaugaugugccggauuaugccucccuuaggucacuaguugccucauccggcacacuggaguuuaacaaugaaagcuucaauuggacuggagucacucaaaacggaacaagcucugcuugcauaaggagaucuaauaacaguuucuuuaguagauugaauugguugacccacuuaaaauucaaauacccagcauugaacgugacuaugccaaacaaugaacaauuugacaaauuguacauuugggggguucaccacccggguacggacaaugaccaaaucuuccuguaugcucaagcaucaggaagaaucacagucucuaccaaaagaagccaacaaacuguaaucccgaauaucggaucuagacccagaguaaggaauaucccuagcagaauaagcaucuauuggacaauaguaaaaccgggagacauacuuuugauuaacagcacagggaaucuaauugcuccuagggguuacuucaaaauacgaagugggaaaagcucaauaaugagaucagaugcacccauuggcaaaugcaauucugaaugcaucacuccaaauggaagcauucccaaugacaaaccauuccaaaauguaaacaggaucacauacggggccugucccagauauguuaagcaaaacacucugaaauuggcaacagggaugcgaaauguaccagagaaacaaacuagaggcauauuuggcgcaaucgcggguuucauagaaaaugguugggagggaaugguggaugguugguacgguuucaggcaucaaaauucugagggaagaggacaagcagcagaucucaaaagcacucaagcagcaaucgaucaaaucaaugggaagcugaauagauugaucgggaaaaccaacgagaaauuccaucagauugaaaaagaauucucagaagucgaagggagaauucaggaccuugagaaauauguugaggacaccaaaauagaucucuggucauacaacgcggagcuucuuguugcccuggagaaccaacauacaauugaucuaacugacucagaaaugaacaaacuguuugaaaaaacaaagaagcaacugagggaaaaugcugaggauaugggcaaugguuguuucaaaauauaccacaaaugugacaaugccugcauaggaucaaucagaaauggaacuuaugaccacgauguauacagagaugaagcauuaaacaaccgguuccagaucaagggaguugagcugaagucaggguacaaagauuggauccuauggauuuccuuugccauaucauguuuuuugcuuuguguugcuuuguugggguucaucaugugggccugccaaaaaggcaacauuaggugcaacauuugcauuuga

SEQ ID NO: 34530 - RNA, 1701 nt, Artificial Sequence
  derived and/or modified CDS sequence (wt) from hemagglutinin__InfluenzaA__ACL12173
augaagacuaucauugcuuugagcuacauucuaugucugguuuucgcucaaaaacuuccuggaaaugacaacagcacggcaacgcugugccuugggcaccaugcaguaccaaacggaacgauagugaaaacaaucacgaaugaccaaauugaaguuacuaaugcuacugagcugguucagaguuccucaacaggugaaauaugcgacaguccucaucagauccuugauggagaaaacugcacacuaauagaugcucuauugggagacccucagugugauggcuuccaaaauaagaaaugggaccuuuuuguugaacgcagcaaagccuacagcaacuguuacccuuaugaugugccggauuaugccucccuuaggucacuaguugccucauccggcacacuggaguuuaacaaugaaagcuucaauuggacuggagucacucaaaacggaacaagcucugcuugcauaaggagaucuaauaacaguuucuuuaguagauugaauugguugacccacuuaaaauucaaauacccagcauugaacgugacuaugccaaacaaugaacaauuugacaaauuguacauuugggggguucaccacccggguacggacaaugaccaaaucuuccuguaugcucaagcaucaggaagaaucacagucucuaccaaaagaagccaacaaacuguaaucccgaauaucggaucuagacccagaguaaggaauaucccuagcagaauaagcaucuauuggacaauaguaaaaccgggagacauacuuuugauuaacagcacagggaaucuaauugcuccuagggguuacuucaaaauacgaagugggaaaagcucaauaaugagaucagaugcacccauuggcaaaugcaauucugaaugcaucacuccaaauggaagcauucccaaugacaaaccauuccaaaauguaaacaggaucacauacggggccugucccagauauguuaagcaaaacacucugaaauuggcaacagggaugcgaaauguaccagagaaacaaacuagaggcauauuuggcgcaaucgcggguuucauagaaaaugguugggagggaaugguggaugguugguacgguuucaggcaucaaaauucugagggaagaggacaagcagcagaucucaaaagcacucaagcagcaaucaaucaaaucaaugggaagcugaauagauugaucgggaaaaccaacgagaaauuccaucagauugaaaaagaauucucagaagucgaagggagaauucaggaccuugagaaauauguugaggacaccaaaauagaucucuggucauacaacgcggagcuucuuguugcccuggagaaccaacauacaauugaucuaacugacucagaaaugaacaaacuguuugaaaaaacaaagaagcaacugagggaaaaugcugaggauaugggcaaugguuguuucaaaauauaccacaaaugugacaaugccugcauaggaucaaucagaaauggaacuuaugaccacgauguauacagagaugaagcauuaaacaaccgguuccagaucaagggaguugagcugaagucaggguacaaagauuggaucuuauggauuuccuuugccauaucauguuuuuugcuuuguguugcuuuguugggguucaucaugugggccugccaaaaaggcaacauuaggugcaacauuugcauuuga

SEQ ID NO: 34531 - RNA, 1701 nt, Artificial Sequence
  derived and/or modified CDS sequence (wt) from hemagglutinin__InfluenzaA__ACL12184
augaagacuaucauugcuuugagcuacauucuaugucugguuuucgcucaaaaacuuccuggaaaugacaacagcacggcaacgcugugccuugggcaccaugcaguaccaaacggaacgauagugaaaacaaucacgaaugaccaaauugaaguuacuaaugcuacugagcugguucagaguuccucaacaggugaaauaugcgacaguccucaucagauccuugauggagaaaacugcacacuaauagaugcucuauugggagacccucagugugauggcuuccaaaauaagaaaugggaccuuuuuguugaacgcagcaaagccuacagcaacuguuacccuuaugaugugccggauuaugccucccuuaggucacuaguugccucauccggcacacuggaguuuaacaaugaaagcuucaauuggacuggagucacucaaaacggaacaagcucugcuugcauaaggagaucuaauaacaguuucuuuaguagauugaauugguugacccacuuaaaauucaaauacccagcauugaacgugacuaugccaaacaaugaacaauuugacaaauuguacauuugggggguucaccacccggguacggacaaugaccaaaucuuccuguaugcucaagcaucaggaagaaucacagucucuaccaaaagaagccaacaaacuguaaucccgaauaucggaucuagacccagaguaaggaauaucccuagcagaauaagcaucuauuggacaauaguaaaaccgggagacauacuuuugauuaacagcacagggaaucuaauugcuccuagggguuacuucaaaauacgaagugggaaaagcucaauaaugagaucagaugcacccauuggcaaaugcaauucugaaugcaucacuccaaauggaagcauucccaaugacaaaccauuccaaaauguaaacaggaucacauacggggccugucccagauauguuaagcaaaacacucugaaauuggcaacagggaugcgaaauguaccagagaaacaaacuagaggcauauuuggcgcaaucgcggguuucauagaaaaugguugggagggaaugguggaugguugguacgguuucaggcaucaaaauucugagggaagaggacaagcagcagaucucaaaagcacucaagcagcaaucgaucaaaucaaugggaagcugaauagauugaucgggaaaaccaacgagaaauuccaucagauugaaaaagaauucucagaagucgaagggagaauucaggaccuugagaaauauguugaggacacuaaaauagaucucuggucauacaacgcggagcuucuuguugcccuggagaaccaacauacaauugaucuaacugacucagaaaugaacaaacuguuugaaaaaacaaagaagcaacugagggaaaaugcugaggauaugggcaaugguuguuucaaaauauaccacaaaugugacaaugccugcauaggaucaaucagaaauggaacuuauaaccacgauguauacagagaugaagcauuaaacaaccgguuccagaucaagggaguugagcugaagucaggguacaaagauuggauccuauggauuuccuuugccauaucauguuuuuugcuuuguguugcuuuguugggguucaucaugugggccugccaaaaaggcaacauuaggugcaacauuugcauuuga

SEQ ID NO: 34532 - RNA, 1701 nt, Artificial Sequence; identical to SEQ ID NO: 34529
  derived and/or modified CDS sequence (wt) from hemagglutinin__InfluenzaA__ACL12195

SEQ ID NO: 34533 - RNA, 1701 nt, Artificial Sequence
  derived and/or modified CDS sequence (wt) from hemagglutinin__InfluenzaA__ACL12217
augaagacuaucauugcuuugagcuacauucuaugucugguuuucgcucaaaaacuuccuggaaaugacaacagcacggcaacgcugugccuugggcaccaugcaguaccaaacggaacgauagugaaaacaaucacgaaugaccaaauugaaguuacuaaugcuacugagcugguucagaguuccucaacaggugaaauaugcgacaguccucaucagauccuugauggagaaaacugcacacuaauagaugcucuauugggagacccucagugugauggcuuccaaaauaagaaaugggaccuuuuuguugaacgcagcaaagccuacagcaacuguuacccuuaugaugugccggauuaugccucccuuaggucacuaguugccucauccggcacacuggaguuuaacaaugaaagcuucaauuggacuggagucacucaaaacggaacaagcucugcuugcauaaggagaucuaauaacaguuucuuuaguagauugaauugguugacccacuuaaaauucaaauacccagcauugaacgugacuaugccaaacaaugaacaauuugacaaauuguacauuugggggguucaccacccggguacggacaaugaccaaaucuuccuguaugcucaagcaucaggaagaaucacagucucuaccaaaagaagccaacaaacuguaaucccgaauaucggaucuagacccagaguaaggaauaucccuagcagaauaagcaucuauuggacaauaguaaaaccgggagacguacuuuugauuaacagcacagggaaucuaauugcuccuagggguuacuucaaaauacgaagugggaaaagcucaauaaugagaucagaugcacccauuggcaaaugcaauucugaaugcaucacuccaaauggaagcauucccaaugacaaaccauuccaaaauguaaacaggaucacauacggggccugucccagauauguuaagcaaaacacucugaaauuggcaacagggaugcgaaauguaccagagaaacaaacuagaggcauauuuggcgcaaucgcggguuucauagaaaaugguugggagggaaugguggaugguugguacgguuucaggcaucaaaauucugagggaagaggacaagcagcagaucucaaaagcacucaagcagcaaucgaucaaaucaaugggaagcugaauagauugaucgggaaaaccaacgagaaauuccaucagauugaaaaagaauucucagaagucgaagggagaauucaggaccuugagaaauauguugaggacaccaaaauagaucucuggucauacaacgcggagcuucuuguugcccuggagaaccaacauacaauugaucuaacugacucagaaaugaacaaacuguuugaaaaaacaaagaagcaacugagggaaaaugcugaggauaugggcaaugguuguuucaaaauauaccacaaaugugacaaugccugcauaggaucaaucagaaauggaacuuaugaccacgauguauacagagaugaagcauuaaacaaccgguuccagaucaagggaguugagcugaagucaggguacaaagauuggauccuauggauuuccuuugccauaucauguuuuuugcuuuguguugcuuuguugggguucaucaugugggccugccaaaaaggcaacauuaggugcaacauuugcauuuga

SEQ ID NO: 34534 - RNA, 1701 nt, Artificial Sequence
  derived and/or modified CDS sequence (wt) from hemagglutinin__InfluenzaA__ACL12228
augaagacuaucauugcuuugagcuacauucuaugucugguuuucgcucaaaaacuuccuggaaaugacaacagcacggcaacgcugugccuugggcaccaugcaguaccaaacggaacgauagugaaaacaaucacgaaugaccaaauugaaguuacuaaugcuacugagcugguucagaguuccucaacaggugaaauaugcgacaguccucaucagauccuugauggagaaaacugcacacuaauagaugcucuauugggagacccucagugugauggcuuccaaaauaagaaaugggaccuuuuuguugaacgcagcaaagccuacagcaacuguuacccuuaugaugugccggauuaugccucccuuaggucacuaguugccucauccggcacacuggaguuuaacaaugaaagcuucaauuggacuggagucacucaaaacggaacaagcucugcuugcauaaggagaucuaauaacaguuucuuuaguagauugaauugguugacccacuuaaaauucaaauacccagcauugaacgugacuaugccaaacaaugaacaauuugacaaauuguacauuugggggguucaccacccggguacggacaaugaccaaaucuuccuguaugcucaagcaucaggaagaaucacagucucuaccaaaagaagccaacaaacuguaaucccgaauauuggaucuagacccagaguaaggaauaucccuagcagaauaagcaucuauuggacaauaguaaaaccgggagacauacuuuugauuaacagcacagggaaucuaauugcuccuagggguuacuucaaaauacgaagugggaaaagcucaauaaugagaucagaugcacccauuggcaaaugcaauucugaaugcaucacuccaaauggaagcauucccaaugacaaaccauuccaaaauguaaacaggaucacauacggggccugucccagauauguuaagcaaaacacucugaaauuggcaacagggaugcgaaauguaccagagaaacaaacuagaggcauauuuggcgcaaucgcggguuucauagaaaaugguugggagggaaugguggaugguugguacgguuucaggcaucaaaauucugagggaagaggacaagcagcagaucucaaaagcacucaagcagcaaucgaucaaaucaaugggaagcugaauagauugaucgggaaaaccaacgagaaauuccaucagauugaaaaagaauucucagaagucgaagggagaauucaggaccuugagaaauauguugaggacacuaaaauagaucucuggucauacaacgcggagcuucuuguugcccuggagaaccaacauacaauugaucuaacugacucagaaaugaacaaacuguuugaaaaaacaaagaagcaacugagggaaaaugcugaggauaugggcaaugguuguuucaaaauauaccacaaaugugacaaugccugcauaggaucaaucagaaaugggacuuaugaccacgauguauacagagaugaagcauuaaacaaccgguuccagaucaagggaguugagcugaagucaggguacaaagauuggauccuauggauuuccuuugccauaucauguuuuuugcuuugugucgcuuuguugggguucaucaugugggccugccaaaaaggcaacauuaggugcaacauuugcauuuga

SEQ ID NO: 34535 - RNA, 1701 nt, Artificial Sequence
  derived and/or modified CDS sequence (wt) from hemagglutinin__InfluenzaA__ACL12239
augaagacuaucauugcuuugagcuacauucuaugucugguuuucgcucaaaaacuuccuggaaaugacaacagcacggcaacgcugugccuugggcaccaugcaguaccaaacggaacgauagugaaaacaaucacgaaugaccaaauugaaguuacuaaugcuacugagcugguucagaguuccucaacaggugaaauaugcgacaguccucaucagauccuugauggagaaaacugcacacuaauagaugcucuauugggagacccucagugugauggcuuccaaaauaagaaaugggaccuuuuuguugaacgcagcaaagccuacagcaacuguuacccuuaugaugugccggauuaugccucccuuaggucacuaguugccucauccggcacacuggaguuuaacaaugaaagcuucaauuggacuggagucacucaaaacggaacaagcucugcuugcauaaggagaucuaauaacaguuucuuuaguagauugaauugguugacccacuuaaaauucaaauacccagcauugaacgugacuaugccaaacaaugaacaauuugacaaauuguacauuugggggguucaccacccggguacggacaaugaccaaaucuuccuguaugcucaagcaucaggaagaaucacagucucuaccaaaagaagccaacaaacuguaaucccgaauaucggaucuagacccagaguaaggaauaucccuagcagaauaagcaucuauuggacaauaguaaaaccgggagacauacuuuugauuaacagcacagggaaucuaauugcuccuagggguuacuucaaaauacgaagugggaaaagcucaauaaugagaucagaugcacccauuggcaaaugcaauucugaaugcaucacuccaaauggaagcauucccaaugacaaaccauuccaaaauguaaacaggaucacauacggggccugucccagauauguuaagcaaaacacucugaaauuggcaacagggaugcgaaauguaccagagaaacaaacuagaggcauauuuggcgcaaucgcggguuucauagaaaaugguugggagggaaugguggaugguugguacgguuucaggcaucaaaauucugagggaagaggacaagcagcagaucucaaaagcacucaagcagcaaucgaucaaaucaaugggaagcugaauagauugaucgggaaaaccaacgagaaauuccaucagauugaaaaagaauucucagaagucgaagggagaauucaggaccuugagaaauauguugaggacacuaaaauagaucucuggucauacaacgcggagcuucuuguugcccuggagaaccaacauacaauugaucuaacugacucagaaaugaacaaacuguuugaaaaaacaaagaagcaacugagggaaaaugcugaggauaugggcaaugguuguuucaaaauauaccacaaaugugacaaugccugcauaggaucaaucagaaauggaacuuaugaccacgauguauacagagaugaagcauuaaacaaccgguuccagaucaagggaguugagcugaagucaggguacaaagauuggauccuauggauuuccuuugccauaucauguuuuuugcuuuguguugcuuuguugggguucaucaugugggccugccaaaaaggcaacauuaggugcaacauuugcauuuga

SEQ ID NO: 34536 - RNA, 1701 nt, Artificial Sequence
  derived and/or modified CDS sequence (wt) from hemagglutinin__InfluenzaA__ACL12250
augaagacuaucauugcuuugagcuacauucuaugucugguuuucgcucaaaaauuuccuggaaaugacaacagcacggcaacgcugugccuugggcaccaugcaguaccaaacggaacgauagugaaaacaaucacgaaugaccaaauugaaguuacuaaugcuacugagcugguucagaguuccucaacaggugaaauaugcgacaguccucaucagauccuugauggagaaaacugcacacuaauagaugcucuauugggagacccucagugugauggcuuccaaaauaagaauugggaccuuuuuguugaacgcagcaaagccuacagcaacuguuacccuuaugaugugccggauuaugucucccuuaggucacuaguugccucauccggcacacuggaguuuaacaaugaaagcuucaauuggacuggagucacucaaaacggaacaagcucugcuugcauaaggagaucuaauaacaguuucuuuaguagauugaauugguugacccacucaaaauucaaauacccagcauugaacgugacuaugccaaacaaugaaaauuuugacaaauuguacauuugggggguucaccacccggguacggacaaugaccaaaucuuccuguaugcucaagcaucaggaagaaucacagucucuaccaaaagaagccaacaaacuguaaucccgaauaucggaucuagacccagaguaaggaauaucccuagcagaauaagcaucuauuggacaauaguaaaaccgggagacauacuuuugauuaacagcacagggaaucuaauugcuccuagggguuacuucaaaauacgaagugggaaaagcucaauaaugagaucagaugcacccauuggcaaaugcaauucugaaugcaucacuccaaauggaagcauucccaaugacaaaccauuccaaaauguaaacaggaucacauacggggccugucccagauauguuaagcaaaacacucugaaauuggcaacagggaugcgaaauguaccagagaaacaaacuagaggcauauuuggcgcaaucgcugguuucauagaaaaugguugggagggaaugguggaugguugguacgguuucaggcaucaaaauucugaaggaauaggacaagcagcagaucucaaaagcacucaagcagcaaucgaucaaaucaaugggaagcugaauagguugaucgggaaaaccaacgagaaauuccaucagauugaaaaagaauucucagaagucgaagggagaauucaggaccuugagaaauauguugaggacaccaaaauagaucucuggucauacaacgcggagcuucuuguugcccuggagaaccaacauacaauugaucuaacugauucagaaaugaacaaacuguuugaaaaaacaaagaagcaacugagggaaaaugcugaggauaugggcaaugguuguuucaaaaucuaccacaaaugugacaaugccugcauaggaucaaucagaaauggaacuuaugaccacgaugucuacagagaugaagcauuaaacaaccgguuccagaucaagggcguugagcugaagucaggauacaaagauuggauccuauggauuuccuuugccauaucauguuuuuugcuuugcauugcuuuguugggguucaucaugugggccugccaaaaaggcaacauuaggugcaacauuugcauuuga

SEQ ID NO: 34537 - RNA, 1701 nt, Artificial Sequence
  derived and/or modified CDS sequence (wt) from hemagglutinin__InfluenzaA__ACL12261
augaaagcaaaacuacuaguccuguuaugugcauuuacagcuacagaugcagacacaauauguauaggcuaccaugcgaacaacucaaccgacacuguugacacaguacuugaaaagaacgugacagugacacauucugucaaccuacuugaggacagucacaacgggaaacuaugucgacuaaaaggaauagccccacuacaauuggguaauugcagcauugccggauggaucuuaggaaacccagaaugcgaaucacuguuuucuaagaaaucaugguccuacauugcagaaacaccaaacuccgagaauggaacauguuacccaggguauuucgccgacuaugaggaacugagagagcaauugagcucaguaucaucauucgagagauucgaaauauuccccaaagaaagcucauggcccaaccacaccguaaccaaaggaguaacggcagcaugcucccauaaggggagaagcaguuuuuacagaaauuugcuauggcugacggagaagaauggcuuguacccaaaucugagcaaguccuaugugaacaacaaagagaaagaaguccuuguacuaugggguguucaucacccgucuaacauaggggaccaaagggccaucuaucauacagaaaaugcuuaugucucuguagugucuucacauuauaacaggagauucaccccagaaauagcaaaaagacccaaagucagaggucaagaaggaagaauuaacuacuacuggacucugcuggaacccggggacacaauaauauuugaggcaaauggaaaucuaauagcgccaugguaugcuuucgcacugaguagaggcuuugggucaggaaucaucaccucaaacgcaucaauggaugaaugugacgcgaagugucaaacaccccagggagcuauaaacaguagccuuccuuuccagaauguacacccagucacaauaggagagugcccaaaguaugucaggaguacaaaauuaaggaugguuacaggacuaaggaacaucccauccauucaauccagaggucuguuuggagccauugccgguuucauugaagggggguggacuggaaugauagauggaugguaugguuaucaucaucagaaugaacaaggaucuggcuaugcugcggaucaaaaaagcacacaaaaugccauuaacgggauuacaaacaaggugaauucuguaaucgagaaaaugaacacucaauucacagcugugggcaaagaauucaacaaauuagaaaaaaggauggaaaacuuaaauaaaaaaguugaugauggauuucuggacauuuggacauauaaugcagaauuguugguucuacuggaaaaugaaaggacuuuggauuuucaugacucaaaugugaagaaucuguaugagaaaguaaaaaaccaauuaaagaauaaugccaaagaaauaggaaacggguguuuugaauucuaccacaaguguaacaaugaaugcauggaaagugugaaaaauggaacuuaugacuaucccaaauauuccgaggaaucaaaauuaaacagggaaaaaauugauggagugaaauuggaaucaaugggagucuaucagauucuggcgaucuacucaacggucgccaguucacuggugcuucuggucucccugggggcaaucagcuucuggauguguucuaaugggucuuugcaauguagaauaugcauuuga

SEQ ID NO: 34538 - RNA, 1689 nt, Artificial Sequence
  derived and/or modified CDS sequence (wt) from hemagglutinin__InfluenzaA__ACN32272
auggccaucauuuaucucauacuccuguucacagcagugaggggggaccagauaugcauuggauaccaugccaauaauuccacagaaaagaucgacacaauucuagagcggaaugucacugugacucaugccaaggacauccuugagaagacccauaacggaaagcuaugcaaacuaaacggaaucccuccacuugaacuaggggacuguagcauugccggauggcuccuuggaaauccagaaugugauaggcuucuaagggugccagaaugguccuauauaauggagaaagaaaacccgagauacaguuuguguuacccaggcagcuucaaugacuaugaagaauugaaacaucuccucagcagcguaaaacauuucgagaaaguaaagauuuugcccaaagauagauggacacagcauacaacaacuggagguucaauggccugcgcggugucagguaaaccaucauucuucaggaacauggucuggcugacaacgaaaggaccaaauuauccgguugcccaaggaucguacaacaauacgagcggagaacaaaugcuaauaauuuggggagugcaccauccuaaugaugaggcagaacaaagagcauuguaccagaacgugggaaccuauguuuccgcaagcacaucaacauuguacaaaaggucaaucccagaaauagcagcaaggccuaaagugaauggacuaggaaguagaauggaauucucuuggacccucuuggauaugugggacaccauaaauuuugagagcacugguaaucuaguugcaccagaguauggguuuaaaauaucgaaaagagguaguucagggaucaugaagacagaaggaacacuugagaacugugaaaccaaaugccaaacuccuuugggagcaauaaauacaacacuaccuuuucacaauguccacccacugacaauaggugaaugccccaaauauguaaaaucggagaaauuggucuuagcaacaggacuaaggaauguuccccagauugaaucaagaggauuguuuggggcaauagcugguuuuauagaaggaggauggcaaggaaugguugaugguugguauggauaccaucacagcaaugaccagggaucaggguaugcagcagacaaagaauccacucaaaaggcauuugauggaaucaccaacaagguaaauucugugauugaaaagaugaacacccaauuugaagcuguugggaaagaauucaguaacuuagagaaaagacuggagaacuugaacaaaaagauggaagacggguuucuagauguguggacauacaaugcagagcuucuaguucugauggaaaaugagaggacacuugacuuucaugauucuaaugucaagaaucuguaugauaaagucagaaugcagcugagagacaacgucaaagaacuaggaaauggauguuuugaauuuuaucacaaaugugacaaugaaugcauggauagugugaaaaacgggacauaugauuaucccaaguaugaagaagaaucuaaacuaaauagaaaugaaaucaaagggguaaaauugagcagcauggggguuuaucaaauccuugccauuuaugcuacaguagcagguucucugucacuggcaaucaugauggcugggaucucuuucuggaugugcuccaacgggucucugcagugcagaaucugcauauga

SEQ ID NO: 34539 - RNA, 1701 nt, Artificial Sequence
  derived and/or modified CDS sequence (wt) from hemagglutinin__InfluenzaA__ACN32283
augaagacuaucauugcuuugagcuacauucuaugucugguuuccgcucaaaaauuuccuggaaaugacaacagcacggcaacgcugugccuugggcaccaugcaguaccaaacggaacgauagugaaaacaaucacgaaugaccaaauugaaguuacuaaugcuacugagcugguucagaguuccucaacaggugaaauaugcgacaguccucaucagauccuugauggagaaaacugcacacuaauagaugcucuauugggagacccucagugugauggcuuccaaaauaagaaaugggaccuuuuuguugaacgcagcaaagccuacagcaacuguuacccuuaugaugugccggauuaugccucccuuaggucacuaguugccucaucuggcacacuggaguuuaacaaugaaagcuucaauuggacuggagucacucaaaacggaacaagcucugccugcauaaggagaucuaauaacaguuucuuuaguagacugaauugguugacccacuuaaaauucaaauacccagcauugaacgugacuaugccaaacaaugaagaauuugacaaauuguacauuugggggguucaccacccggguacggacaaugaccaaaucuuccuguaugcucaagcaucaggaagaaucacagucucuaccaaaagaagccaacaaacuguaaucccgaauaucggaucuagacccagaguaaggaauauccccagcagaauaagcaucuauuggacaauaguaaaaccgggagacauacuuuugauuaacagcacagggaaucuaauugcuccuagggguuacuucaaaauacgaagugggaaaagcucaauaaugagaucagaugcacccauuggcaaaugcaauucugaaugcaucacuccaaauggaagcauucccaaugacaaaccauuccaaaauguaaacaggaucacauacggggccugucccagauauguuaagcaaaacacucugaaauuggcaacagggaugcgaaauguaccagagaaacaaacuagaggcauauuuggcgcaaucgcggguuucauagaaaaugguugggagggaaugguggaugguugguacgguuucaggcaucaaaauucugagggaauaggacaagcagcagaucucaaaagcacucaagcagcaaucgaucaaaucaaugggaagcugaauagguugaucgggaaaaccaacgagaaauuccaucagauugaaaaagaauucucagaagucgaagggagaauucaggaccuugagaaauauguugaggacaccaaaauagaucucuggucauacaacgcggagcuucuuguugcccuggagaaccaacauacaauugaucuaacugacucagaaaugaacaaacuguuugaaaaaacaaagaagcaacugagggaaaaugcugaggauaugggcaaugguuguuucaaaauauaccacaaaugugacaaugccugcauaggaucaaucagaaauggaacuuaugaccacgauguauacagagaugaagcauuaaacaaccguuuccagaucaagggcguugagcugaagucaggauacaaagauuggauccuauggauuuccuuugccauaucauguuuuuugcuuuguguugcuuuguugggguucaucaugugggccugccaaaaaggcaacauuaggugcaacauuugcauuuga

SEQ ID NO: 34540 - RNA, 1701 nt, Artificial Sequence
  derived and/or modified CDS sequence (wt) from hemagglutinin__InfluenzaA__ACN32474
augaagacuaucauugcuuugagcuacauucuaugucugguuuccgcucaaaaacuuccuggaaaugacaacagcacggcaacacugugccuugggcaccaugcaguaccaaacggaacgauagugaaaacaaucacgaaugaccaaauugaaguuacuaaugcuacugaacugguucagaguuccucaacaggugaaauaugcgacaguccucaucagguccuugauggagaaaacugcacacuaauagaugcucuauugggagacccucagugugauggcuuccaaaauaagaaaugggaccuuuuuguugaacgcagcaaagccuacagcaacuguuacccuuaugaugugccggauuauaccucccuuaggucacuaguugccucaucuggcacacuggaguuuaacaaugaaagcuucaauuggacuggagucacucaaaacggaacaagcucugcuugcauaaggagaucuaauaacaguuucuuuaguagacugaauugguugacccacuuaaaauucaaauacccagcauugaacaugacuaugccaaacaaugaagaauuugacaaauuguacauuugggggguucaccacccggguacggacaaugaccaaaucuuccuguaugcucaagcaucaggaagaaucacagucucuaccaaaagaagccaacaaacuguaaucccgaauaucggaucuagacccagaguaaggaauauccccagcagaauaagcaucuauuggacaauaguaaaaccaggagacauacuuuugauuaacagcacagggaaucuaauugcuccuagggguuacuucaaaauacgaagugggaaaagcucaauaaugagaucagaugcacccauuggcaaaugcaauucugaaugcaucacuccaaauggaagcauucccaaugacaaaccauuccaaaauguaaacaggaucacauacggggccugucccagauauguuaagcaaaacacucugaaauuggcaacagggaugcgaaauguaccagagaaacaaacuagaggcauauuuggcgcaaucgcggguuucauagaaaaugguugggagggaaugguggaugguugguacgguuucaggcaucaaaauucugagggaauaggacaagcagcagaucucaaaagcacucaagcagcaaucgaucaaaucaaugggaagcugaauagguugaucgggaaaaccaacgagaaauuccaucagauugaaaaagaauucucagaagucgaagggagaauucaggaccuugagaaauauguugaggacaccaaaauagaucucuggucauacaacgcggagcuucuuguugcccuggagaaccaacauacaauugaucuaacugacucagaaaugaacaaacuguuugaaaaaacaaagaagcaacugagggaaaaugcugaggauaugggcaaugguuguuucaaaauauaccacaaaugugacaaugccugcauaggaucaaucagaaauggaacuuaugaccacgagguauacagagaugaagcauuaaacaaccgguuccagaucaagggcguugagcugaagucaggauacaaagauuggauucuauggauuuccuuugccauaucauguuuuuugcuuuguguugcuuuguugggguucaucaugugggccugccaaaaaggcaacauuaggugcaacauuugcauuuga

SEQ ID NO: 34541 - RNA, 1698 nt, Artificial Sequence
  derived and/or modified CDS sequence (wt) from hemagglutinin__InfluenzaA__ACN32501
augaaaguaaaacuacugguccuguuaugcacauuuacagcuacauaugcagacacaauauguauaggcuaccaugcuaacaacucgaccgacacuguugacacaguacuugaaaagaaugugacagugacacacucugucaaccugcuugagaacagucacaauggaaaacugugucuauuaaaaggaauagccccacuacaauuggguaauugcagcguugccggguggaucuuaggaaacccagaaugcgaauuacugauuuccaaggagucaugguccuacauuguagaaaaaccaaauccugagaauggaacauguuacccagggcauuucgcugacuaugaggaacugagggagcaauugaguucaguaucuucguuugagagguucgaaauauuccccaaagaaagcucauggcccaaccacaccguaaccggagugucagcaucaugcucccauaauggggaaagcaguuuuuacagaaauuugcuauggcugacggggaagaaugguuuguacccaaaccugagcaaguccuaugcaaacaacaaagaaaaagaaguccuuguacuaugggguguucaucacccgccaaacauaggugaccaaaaggcccucuaucauacagaaaaugcuuaugucucuguagugucuucacauuauagcagaaaauucaccccagaaauagccaaaagacccaaaguaagagaucaagaaggaagaaucaacuacuacuggacucugcuugaacccggggauacuauaauauuugaggcaaauggaaaucuaauagcgccaagauaugcuuucgcacugaguagaggcuuuggaucaggaaucaucaacucaaaugcuccaauggauaaaugugaugcgaagugccaaacaccucagggagcuauaaacagcagucuuccuuuccagaacguacacccagucacaauaggagaguguccaaaguaugucaggagugcaaaauuaaggaugguuacaggacuaaggaacaucccauccauucaauccagagguuuguuuggagccauugccgguuucauugaagggggguggacuggaaugguagaugguugguaugguuaucaucaucagaaugagcaaggaucuggcuaugcugcagaucaaaaaagcacacaaaaugccaucaaugggauuacaaacaaggugaauucuguaauugagaaaaugaacacucaauucacagcagugggcaaagaauucaacaaauuggaaagaaggauggaaaacuugaauaaaaaaguugaugauggguuuauagacauuuggacauauaaugcagaacuguugguucuacuggaaaaugaaaggacguuggauuuccaugacuccaaugugaagaaucuguaugagaaaguaaaaagccaguuaaagaauaaugcuaaagaaauaggaaauggguguuuugaauucuaucacaaguguaacgaugaaugcauggagaguguaaagaauggaacuuaugacuauccaaaauauuccgaagaaucaaaguuaaacagggagaaaauugauggagugaaauuggaaucaaugggagucuaucagauucuagcgaucuacucaacagucgccaguucucugguucuuuuggucucccugggggcaaucagcuucuggauguguuccaaugggucuuugcaguguagaauaugcaucuaa

SEQ ID NO: 34542 - RNA, 1701 nt, Artificial Sequence
  derived and/or modified CDS sequence (wt) from hemagglutinin__InfluenzaA__ACN32534
augaagacuaucauugcuuugagcuacauuuuaugucugguuuucgcucaaaaacuucccggaaaugacaacagcacggcaacgcugugccuggggcaccaugcagugccaaacggaacgcuagugaaaacaaucacgaaugaccaaauugaaguaacuaaugcuacugagcugguucagaguuccucaacagguagaauaugcgacaguccucaccaaauccuugauggagaaaacugcacacuaauagaugcucuauugggagacccucauugugauggcuuccaaaacaaggaaugggaccuuuuuguugaacgcagcaaagccuacagcaacuguuacccuuaugaugugccggauuaugucucccuuaggucacuaguugccucaucaggcacgcuggaguuuaacaaugaaagcuucaauuggacuggagucgcucagaauggaacaagcucugcuugcaaaaggagauccgauaaaaguuucuuuaguagauugaauugguugcaccaauuaaaauacaaauauccagcacugaacgugacuaugccaaacaaugaaaaauuugacaaauuguacauuugggggguucaccacccggguacagacagugaccaaaucagccuauaugcucaagcaucagggagagucacagucucuaccaaaagaagccaacaaacuguaaucccgaauaucggaucuggacccuggguaaggggugucuccagcagaauaagcaucuauuggacaauaguaaaaccgggagacauacuuuugauuaacagcacagggaaucuaauugcuccucgggguuacuucaaaauacgaagugggaaaagcucaauaaugaggucagaugcacccauuggcaaaugcaauucugaaugcaucacuccaaauggaagcauucccaauggcaaaccauuucaaaauguaaacaggaucacauauggggccugucccagauauguuaagcaaaacacucugaaauuggcaacagggaugcggaaugugccagagaaacaaacuagaggcauauucggugcaaucgcgggcuucauagaaaaugguugggagggaaugauggacgguugguacgguuucaggcaucagaauucugagggcacagggcaagcagcagaucuuaaaagcacucaagcagcaaucaaccaaaucaacgggaaacugaauagguuaaucgagaaaacgaacgagaaauuccaucaaauugaaaaagaauucucagaaguagaagggagaauucaggaccucgagaaauaugucgaggacacuaaaauagaucucuggucguacaaugcggagcuucuuguugcccuggagaaccaacauacaauugaucuaacugacucagaaaugaacaaacuguuugaaagaacaaagaagcaacugagggaaaaugcugaggauaugggcaaugguuguuucaaaauauaccacaaaugugacaaugccugcauagggucaaucagaaauggaacuuaugaccaugauguauacagagacgaagcauugaacaaccgguuccagaucaaagguguugagcugaagucaggauacaaagauuggauccuauggauuuccuuugccauaucauguuuuuugcuuuguauuguuuuacugggguucaucaugugggccugccaaaaaggcaacauuaggugcaacauuugcauuuga

SEQ ID NO: 34543 - RNA, 1701 nt, Artificial Sequence
  derived and/or modified CDS sequence (wt) from hemagglutinin__InfluenzaA__ACN32545
augaagacuaucauugcuuugagcuacauucuaugucugguuuucgcucaaaaacuuccuggaaaugacaacagcacggcaacgcugugccuugggcaccaugcaguaccaaacggaacgauagugaaaacaaucacgaaugaccaaauugaaguuacuaaugcuacugagcugguucagaguuccucaacaggugaaauaugcgacaguccucaucagauccuugauggagaaaacugcacacuaauagaugcucuauugggagacccucauugugauggcuuccaaaauaagaaaugggaccuuuuuguugaacgcagcaaagccuacagcaacuguuacccuuaugaugugccggauuaugccucccuuaggucacuaauugccucauccggcacacuggaguuuaacaaugaaagcuucaauuggacuggagucacucaaaacggaacaagcucugcuugcauaaggagaucuaauaacaguuucuuuaguagauugaauugguugacccacuuaaaauucaaauacccagcauugaacgugacuaugccaaacaaugaaaaauuugacaaauuguauauuugggggguucaccacccggguacggacaaugaccaaaucuuccuguaugcucaagcaucaggaagaaucacagucucuaccaaaagaagccaacaaacuguaaucccgaauaucggaucuagacccagaguaaggaauauccccagcagaauaagcaucuauuggacaauaguaaaaccgggagacauacuuuugauuaacagcacagggaaucuaauugcuccuagggguuacuucaaaauacgaagugggaaaagcucaauaaugagaucagaugcacccauuggcaaaugcaauucugaaugcaucacuccaaauggaagcauucccaaugacaaaccauuccaaaauguaaacaggaucacauacggggccugucccagauauguuaagcaaaacacucugaaauuggcaacagggaugcgaaauguaccagagaaacaaacuagaggcauauuuggcgcaaucgcggguuucauagaaaaugguugggagggaaugguggaugguugguacgguuucaggcaucaaaauucugagggaauaggacaagcagcagaucucaaaagcacucaagcagcaaucgaucaaaucaaugggaagcugaauagguugaucgggaaaaccaacgagaaauuccaucagauugaaaaagaauucucagaagucgaagggaggauucaggaccuugagaaauauguugaggacaccaaaauagaucucuggucauacaacgcggagcuucuuguugcccuggagaaccaacauacaauugaucuaacugacucagaaaugaacaaacuguuugaaaaaacaaagaagcaacugagggaaaaugcugaggauaugggcaaugguuguuucaaaauauaccacaaaugugacaaugccugcauaggaucaaucagaaauggaacuuaugaccacgauguauacagagaugaagcauuaaacaaccgguuccagaucaagggcguugagcugaagucaggauacaaagauuggauccuauggauuuccuuugccauaucauguuuuuugcuuuguguugcuuuguugggguucaucaugugggccugccaaaaaggcaacauuaggugcaacauuugcauuuga

SEQ ID NO: 34544 - RNA, 1698 nt, Artificial Sequence
  derived and/or modified CDS sequence (wt) from hemagglutinin__InfluenzaA__ACN32793
augaaaguaaaacuacugguucuguuauguacauuuacagcuacauaugcagacacaauauguauaggcuaccaugccaacaacucgaccgacacuguugacacaguacuugagaagaaugugacagugacacacucugucaaccuacuugaggacagucacaauggaaaacuaugucuacuaaaaggaauagccccacuacaauuggguaauugcagcguugccggauggaucuuaggaaacccagaaugcgaauuacugauuuccaaggaaucaugguccuacauuguagagacaccaaauccugagaauggaacauguuacccaggguauuucgccgacuaugaggagcugagagagcaauugaguucaguaucuucauuugagagguucgaaauauuccccaaagagagcucauggcccaaccacaccguaaccggaguaucagcaucaugcucccauaacgggaaaagcaguuuuuacagaaauuugcuauggcugacggggaagaaugguuuguauccaaaccugagcgaguccuaugcaaacaacaaagagaaagaaguccuuguacugugggguguucaucacccgccuaacauaggggaccaaagggcccucuaucauacagaaaaugcuuaugucucuguagugucuucacauuauagcagaagauucaccccagaaauagccaaaagacccaaggugagagaucaggaaggaagaaucaacuacuacuggacucugcuugaacccggggauacaauaauauuugaggcaaauggaaaucuaauagcgccaagguuugcuuucgcacugaguagaggcuuuggaucaggaaucaucaccucaaaugcaccaauggaugaaugugaugcaaaaugucaaacaccucagggagcuauaaacagcagucuuccuuuccagaauguacacccagucacaauaggagaguguccaaaguaugucaggaguacaaaauuaagaaugguuacaggacuaaggaacaucccauccauucaauccagagguuuguuuggagccauugccgguuucauugaagggggguggacuggaaugguagauggaugguaugguuaccaccaucagaaugagcaaggaucuggguaugcugcugaucaaaaaagcacacaaaaugccauuaacgggauuacaaacaaggugaauucuguaauugagaaaaugaacacucaauucacagcugugggcaaagaauucaacaaauuggaaagaaggauggaaaacuuaaauaaaaaaguugaugauggguuucuagacauuuggacauauaacgcagaauuguugguucuacuggaaaaugaaaggacuuuggacuuccaugacuccaacgugaagaaucuguaugagaaaguaaaaagccaauuaaagaauaaugccaaagaaauaggaaacggguguuuugaauucuaucacaaguguaacgaugaaugcauggagagugugaaaaauggaacuuaugacuauccaaaauauuccgaagaaucaaaguugaacagggagaaaauugauggagugaaauuggaaucaaugggagucuaucagauuuuggcgaucuacucaacagucgccaguucccugguucuuuuggucucccugggggcaaucagcuucuggauguguuccaaugggucuuugcaguguagaauaugcaucuaa

SEQ ID NO: 34545 - RNA, 1698 nt, Artificial Sequence
  derived and/or modified CDS sequence (wt) from hemagglutinin__InfluenzaA__ACN32804
augaaaguaaaacuacugguucuguuauguacauuuacagcuacauaugcagacacaauauguauaggcuaccaugccaacaacucgaccgacacuguugacacaguacuugagaagaaugugacagugacacacucugucaaccuacuugaggacagucacaauggaaaacuaugucuacuaaaaggaauagccccacuacaauuggguaauugcagcguugccggauggaucuuaggaaacccagaaugcgaauuacugauuuccaaggaaucaugguccuacauuguagagacaccaaauccugagaauggaacauguuacccaggguauuucgccgacuaugaggagcugagagagcaauugaguucaguaucuucauuugagagguucgaaauauuccccaaagagagcucauggcccaaccacaccguaaccggaggaucagcaucaugcucccauaacgggaaaagcaguuuuuacagaaauuugcuauggcugacggggaagaaugguuuguauccaaaccugagcaaguccuaugcaaacaacaaagagaaagaaguccuuguacugugggguguucaucacccgccuaacauaggggaccaaagggcccucuaucauacagaaaaugcuuaugucucuguagugucuucacauuauagcagaagauucaccccagaaauagccaaaagacccaaggugagagaucaggaaggaagaaucaacuacuacuggacucugcuugaacccggggauacaauaauauuugaggcaaauggaaaucuaauagcgccaagguuugcuuucgcauugaguagaggcuuuggaucaggaaucaucaccucaaaugcaccaauggaugaaugugaugcgaaaugucaaacaccucagggagcuauaaacagcagucuuccuuuccagaauguacacccagucacaauaggagaguguccaaaguaugucaggaguacaaaauuaagaaugguuacaggacuaaggaacaucccauccauucaauccagagguuuguuuggagccauugccgguuucauugaagggggguggacuggaaugguagauggaugguaugguuaccaccaucagaaugagcaaggaucuggguaugcugcugaucaaaaaagcacacaaaaugccauuaacgggauuacaaacaaggugaauucuguaauugagaaaaugaacacucaauucacagcugugggcaaagaauucaacaaauuggaaagaaggauggaaaacuuaaauaaaaaaguugaugauggguuucuagacauuuggacauauaacgcagaauuguugguucuacuggaaaaugaaaggacuuuggacuuccaugacuccaacgugaagaaucuguaugagaaaguaaaaagccaauuaaagaauaaugccaaagaaauaggaaacggguguuuugaauucuaucacaaguguaacaaugaaugcauggagagugugaaaaauggaacuuaugacuauccaaaauauuccgaagaaucaaaguugaacagggagaaaauugauggagugaaauuggaaucaaugggagucuaucagauuuuggcgaucuacucaacagucgccaguucccugguucuuuuggucucccugggggcaaucagcuucuggauguguuccaaugggucuuugcaguguagaauaugcaucuaa

SEQ ID NO: 34546 - RNA, 1698 nt, Artificial Sequence
  derived and/or modified CDS sequence (wt) from hemagglutinin__InfluenzaA__ACN32815
augaaaguaaaacuacugguucuguuauguacauuuacagcuacauaugcagacacaauauguauaggcuaccaugccaacaacucgaccgacacuguugacacaguacuugagaagaaugugacagugacacacucugucaaccuacuugaggacagucacaauggaaaacuaugucuacuaaaaggaauagccccacuacaauuggguaauugcagcguugccggauggaucuuaggaaacccagaaugcgaauuacugauuuccaaggaaucaugguccuacauuguagagacaccaaauccugagaauggaacauguuacccagggaauuucgccgacuaugaggagcugagagagcaauugaguucaguaucuucauuugagagguucgaaauauuccccaaagagagcucauggcccaaccacaccguaaccggaguaucagcaucaugcucccauaacgggaaaagcaguuuuuacagaaauuugcuauggcugacggggaagaaugguuuguauccaaaccugagcaaguccuaugcaaacaacaaagagaaagaaguccuuguacugugggguguucaucacccgccuaacauaggggaccaaagggcccucuaucauacagaaaaugcuuaugucucuguagugucuucacauuauagcagaagauucaccccagaaauagccaaaagacccaaggugagagaucaggaaggaagaaucaacuacuacuggacucugcuugaacccggggauacaauaauauuugaggcaaauggaaaucuaauagcgccaagguuugcuuucgcacugaguagaggcuuuggaucaggaaucaucaccucaaaugcaccaauggaugaaugugaugcgaaaugucaaacaccucagggagcuauaaacagcagccuuccuuuccagaauguacacccagucacaauaggagaguguccaaaguaugucaggagugcaaaauuaagaaugguuacagggcuaaggaacaucccauccauucaauccagagguuuguuuggggccauugccgguuucauugaagggggguggacuggaaugguagaugguugguaugguuaucaccaucagaaugagcaaggaucuggguaugcugcagaucaaaaaagcacacaaaaugccauuaacgggauuacaaacaaggugaauucuguaauugagaaaaugaacacucaauucacagcugugggcaaagaauucaacaaauuggaaagaaggauggaaaacuuaaauaaaaaaguugaugauggguuucuagacauuuggacauauaacgcagaauuguugguucuacuggaaaaugaaaggacuuuggacuuccaugacuccaacgugaagaaucuguaugagaaaguaaaaagccaauuaaagaauaaugccaaagaaauaggaaacggguguuuugaauucuaucacaaauguaacgaugaaugcauggagagugugaaaaauggaacuuaugacuauccaaaauauuccgaagaaucaaaguugaacagggagaaaauugauggagugaaauuggaaucaaugggagucuaucagauuuuggcgaucuacucaacagucgccaguucccugguucuuuuggucucccugggggcaaucagcuucuggauguguuccaaugggucuuugcaguguagaauaugcaucuaa

SEQ ID NO: 34547 - RNA, 1698 nt, Artificial Sequence; identical to SEQ ID NO: 33967
  derived and/or modified CDS sequence (wt) from hemagglutinin__InfluenzaA__ACN32826

SEQ ID NO: 34548 - RNA, 1701 nt, Artificial Sequence
  derived and/or modified CDS sequence (wt) from hemagglutinin__InfluenzaA__ACN32848
augaagacuaucauugcuuugagcuacauucuaugucugguuuucgcucaaaaacuuccuggaaaugacaacagcacggcaacgcugugccuugggcaccaugcaguaccaaacggaacgauagugaaaacaaucacgaaugaccaaauugaaguuacuaaugcuacugagcugguucagaguuccucaacaggugaaauaugcgacaguccucaucagauccuugauggagaaaacugcacacuaauagaugcucuauugggagacccucagugugauggcuuccaaaauaagaaaugggaccuuuuuguugaacgcagcaaagccuacagcaacuguuacccuuaugaugugccggauuaugccucccuuaggucacuaguugccucauccggcacacuggaguuuaacaaugaaagcuucaauuggacuggagucacucaaaacggaacaagcucugcuugcauaaggagaucuaauaacaguuucuuuaguagauugaauugguugacccacuuaaaauucaaauacccagcauugaacgugacuaugccaaacaaugaacaauuugacaaauuguacauuugggggguucaccacccggguacggacaaugaccaaaucuuccuguaugcucaagcaucaggaagaaucacagucucuaccaaaagaagccaacaaacuguaaucccgaauaucggaucuagacccagaguaaggaauaucccuaguagaauaagcaucuauuggacaauaguaaaaccgggagacauacuuuugauuaacagcacagggaaucuaauugcuccuagggguuacuucaaaauacgaagugggaaaagcucaauaaugagaucagaugcacccauuggcaaaugcaauucugaaugcaucacuccaaauggaagcauucccaaugacaaaccauuccaaaauguaaacaggaucacauacggggccugucccagauauguuaagcaaaacacucugaaauuggcaacagggaugcgaaauguaccagagaaacaaacuagaggcauauuuggcgcaaucgcggguuucauagaaaaugguugggagggaaugguggaugguugguacgguuucaggcaucaaaauucugagggaagaggacaagcagcagaucucaaaagcacucaagcagcaaucgaucaaaucaaugggaagcugaauagauugaucgggaaaaccaacgagaaauuccaucagauugaaaaagaauucucagaagucgaagggagaauucaggaccuugagaaauauguugaggacaccaaaauagaucucuggucauacaacgcggagcuucuuguugcccuggagaaccaacauacaauugaucuaacugacucagaaaugaacaaacuguuugaaaaaacaaagaagcaacugagggaaaaugcugaggauaugggcaaugguuguuucaaaauauaccacaaaugugacaaugccugcauaggaucaaucagaaauggaacuuaugaccacgauguauacagagaugaagcauuaaacaaccgguuccagaucaagggaguugagcugaagucaggguacaaagauuggauccuauggauuuccuuugccauaucauguuuuuugcuuuguguugcuuuguugggguucaucaugugggccugccaaaaaggcaacauuaggugcaacauuugcauuuga

SEQ ID NO: 34549 - RNA, 1701 nt, Artificial Sequence
  derived and/or modified CDS sequence (wt) from hemagglutinin__InfluenzaA__ACN32870
augaagacuaucauugcuuugagcuacauucuaugucugguuuucgcucaaaaauuuccuggaaaugacaacagcacggcgacgcugugccuugggcaccaugcaguaccaaacggaacgauagugaaaacaaucacgaaugaccaaauugaaguuacuaaugcuacugagcugguucagaguuccucaacaggugaaauaugcgacaguccucaucaaauccuugauggagaaaacugcacacuaauagaugcucuauugggagacccucagugugauggcuuccaaaauaagaauugggaccuuuuuguugaacgcagcaaagccuacagcaacuguuacccuuaugaugugccggauuaugccucccuuaggucacuaguugccucauccggcacacuggaguuuaacaaugaaagcuucaauuggacuggagucacucaaaacggaacaagcucugcuugcauaaggagaucuaauaacaguuucuuuaguagauugaauugguugacccacucaaaauucaaauacccagcauugaaugugacuaugccaaacaaugaaaauuuugacaaauuguacauuugggggguucaccacccggguacggacaaugaccaaaucuuccuguaugcucaagcaucaggaagaaucacagucucuaccaaaagaagccaacaaacuguaaucccgaauaucggaucuagacccagaguaaggaauaucccuagcagaauaagcaucuauuggacaauaguaaaaccgggagacauacuuuugauuaacagcacagggaaucuaauugcuccuagggguuacuucaaaauacgaagugggaaaagcucaauaaugagaucagaugcacccauuggcaaaugcaauucugaaugcaucacuccaaauggaagcauucccaaugacaaaccauuccaaaauguaaacaggaucacauacggggccugucccagauauguuaagcaaaacacucugaaauuggcaacagggaugcgaaauguaccagagaaacaaacuagaggcauauuuggcgcaaucgcugguuucauagaaaaugguugggagggaaugguggaugguugguacgguuucaggcaucaaaauucugagggaauaggacaagcagcagaucucaaaagcacucaagcagcaaucgaucaaaucaaugggaagcugaauagguugaucgggaaaaccaacgagaaauuccaucagauugaaaaagaauucucagaagucgaagggagaauucaggaccuugagaaauauguugaggacaccaaaauagaucucuggucauacaacgcggagcuucuuguugcccuggagaaccaacauacaauugaucuaacugauucagaaaugaacaaacuguuugaaaaaacaaagaagcaacugagggaaaaugcugaggauaugggcaaugguuguuucaaaaucuaccacaaaugugacaaugccugcauaggaucaaucagaaauggaacuuaugaccacgaugucuacagagaugaagcauuaaacaaccgguuccagaucaagggcguugagcugaagucaggauacaaagauuggauccuauggauuuccuuugccauaucauguuuuuugcuuugcauugcuuuguugggguucaucaugugggccugccaaaaaggcaacauuaggugcaacauuugcauuuga

SEQ ID NO: 34550 - RNA, 1701 nt, Artificial Sequence
  derived and/or modified CDS sequence (wt) from hemagglutinin__InfluenzaA__ACN32892
augaagacuaucauugcuuugagcuacauucuaugucugguuuucgcucaaaaauuuccuggaaaugacaacagcacggcaacgcugugccuugggcaccaugcaguaccaaacggaacgauagugaaaacaaucacgaaugaccaaauugaaguuacuaaugcuacugagcugguucagaguuccucaacaggugaaauaugcgacaguccucaucagauccuugauggagaaaacugcacacuaauagaugcucuauugggagacccucagugugauggcuuccaaaauaagaauugggaccuuuuuguugaacgcagcaaagccuacagcaacuguuacccuuaugaugugccggauuaugccucccuuaggucacuaguugccucauccggcacacuggaguuuaacaaugaaagcuucaauuggacuggagucacucaaaacggaacaagcucugcuugcauaaggagaucuaauaacaguuucuuuaguagauugaauugguugacccacucaaaauucaaauacccagcauugaacgugacuaugccaaacaaugaaaauuuugacaaauuguacauuugggggguucaccacccggguacggacaaugaccaaaucuuccuguaugcucaagcaucaggaagaaucacagucucuaccaaaagaagccaacaaacuguaaucccgaauaucggaucuagacccagaguaaggaauaucccuagcagaauaagcaucuauuggacaauaguaaaaccgggagacauacuuuugauuaacagcacagggaaucuaauugcuccuagggguuacuucaaaauacgaaguggaaaaagcucaauaaugagaucagaugcacccauuggcaaaugcaauucugaaugcaucacuccaaauggaagcauucccaaugacaaaccauuccaaaauguaaacaggaucacauacggggccugucccagauauguuaagcaaaacacucugaaauuggcaacagggaugcgaaauguaccagagaaacaaacuagaggcauauuuggcgcaaucgcugguuucauagaaaaugguugggagggaaugguggaugguugguacgguuucaggcaucaaaauucugagggaauaggacaagcagcagaucucaaaagcacucaagcagcaaucgaucaaaucaaugggaagcugaauagguugaucgggaaaaccaacgagaaauuccaucagauugaaaaagaauucucagaagucgaagggagaauucaggaccuugagaaauauguugaggacaccaaaauagaucucuggucauacaacgcggagcuucuuguugcccuggagaaccaacauacaauugaucuaacugauucagaaaugaacaaacuguuugaaaaaacaaagaagcaacugagggaaaaugcugaggauaugggcaaugguuguuucaaaaucuaccacaaaugugacaaugccugcauaggaucaaucagaaauggaacuuaugaccacgaugucuacagagaugaagcauuaaacaaccgguuccagaucaagggcguugagcugaagucaggauacaaagauuggauccuauggauuuccuuugccauaucauguuuuuugcuuugcauugcuuuguugggguucaucaugugggccugccaaaaaggcaacauuaggugcaacauuugcauuuga

SEQ ID NO: 34551 - RNA, 1701 nt, Artificial Sequence
  derived and/or modified CDS sequence (wt) from hemagglutinin__InfluenzaA__ACN32903
augaagacuaucauugcuuugagcuacauucuaugucugguuuucgcucaaaaacuuccuggaaaugacaacagcacggcaacgcugugccuugggcaccaugcaguaccaaacggaacgauagugaaaacaaucacgaaugaccaaauugaaguuacuaaugcuacugagcugguucagaguuccucaacaggugaaauaugcgacaguccucaucagauccuugauggagaaaacugcacacuaauagaugcucuauugggagacccucagugugauggcuuccaaaauaagaaaugggaccuuuuuguugaacgcagcaaagccuacagcaacuguuacccuuaugaugugccggauuaugccucccuuaggucauuaguugccucauccggcacacuggaguuuaacaaugaaagcuucaauuggacuggagucacucaaaacggaacaagcucugcuugcauaaggagaucuaauaacaguuucuuuaguagauugaauugguugacccacuuaaaauucaaauacccagcauugaacgugacuaugccaaacaaugaacaauuugacaaauuguacauuugggggguucaccacccggguacggacaaugaccaaaucuuccuguaugcucaagcaucaggaagaaucacagucucuaccaaaagaagccaacaaacuguaaucccgaauaucggaucuagacccagaguaaggaauaucccuagcagaauaagcaucuauuggacaauaguaaaaccgggagacauacuuuugauuaacagcacagggaaucuaauugcuccuagggguuacuucaaaauacgaagugggaaaagcucaauaaugagaucagaugcacccauuggcaaaugcaauucugaaugcaucacuccaaauggaagcauucccaaugacaaaccauuccaaaauguaaacaggaucacauacggggccugucccagauauguuaagcaaaacacucugaaauuggcaacagggaugcgaaauguaccagagaaacaaacuagaggcauauuuggcgcaaucgcggguuucauagaaaaugguugggagggaaugguggaugguugguacgguuucaggcaucaaaauucugagggaagaggacaagcagcagaucucaaaagcacucaagcagcaaucgaucaaaucaaugggaagcugaauagauugaucgggaaaaccaacgagaaauuccaucagauugaaaaagaauucucagaagucgaagggagaauucaggaccuugagaaauauguugaggacaccaaaauagaucucuggucauacaacgcggagcuucuuguugcccuggagaaccaacauacaauugaucuaacugacucagaaaugaacaaacuguuugaaaaaacaaagaagcaacugagggaaaaugcugaggauaugggcaaugguuguuucaaaauauaccacaaaugugacaaugccugcauaggaucaaucagaaauggaacuuaugaccacgauguauacagagaugaagcauuaaacaaccgguuccagaucaagggaguugagcugaagucaggguacaaagauuggauccuauggauuuccuuugccauaucauguuuuuugcuuuguguugcuuuguugggguucaucaugugggccugccaaaaaggcaacauuaggugcaacauuugcauuuga

SEQ ID NO: 34552 - RNA, 1701 nt, Artificial Sequence
  derived and/or modified CDS sequence (wt) from hemagglutinin__InfluenzaA__ACN32914
augaagacuaucauugcuuugagcuacauucuaugucuggcuuucgcucaaaaacuuccuggaaaugacaacagcacggcaacgcugugccuugggcaccaugcaguaccaaacggaacgauagugaaaacaaucacgaaugaccaaauugaaguuacuaaugcuacugagcugguucagaguuccucaacaggugaaauaugcgacaguccucaucagauccuugauggagaaaacugcacacuaauagaugcucuauugggagacccucagugugauggcuuccaaaauaagaaaugggaccuuuuuguugaacgcagcaaagccuacagcaacuguuacccuuaugaugugccggauuaugccucccuuaggucacuaguugccucauccggcacacuggaguuuaacaaugaaagcuucaauuggacuggagucacucaaaacggaacaagcucugcuugcauaaggagaucuaauaacaguuucuuuaguagauugaauugguugacccacuuaaaauucaaauacccagcauugaacgugacuaugccaaacaaugaacaauuugacaaauuguacauuugggggguucaccacccggguacggacaaugaccaaaucuuccuguaugcucaagcaucaggaagaaucacagucucuaccaaaagaagccaacaaacuguaaucccgaauaucggaucuagacccagaguaaggaauaucccuagcagaauaagcaucuauuggacaauaguaaaaccgggagacauacuuuugauuaacagcacagggaaucuaauugcuccuagggguuacuucaaaauacgaagugggaaaagcucaauaaugagaucagaugcacccauuggcaaaugcaauucugaaugcaucacuccaaauggaagcauucccaaugacaaaccauuccaaaauguaaacaggaucacauacggggccugucccagauauguuaagcaaaacacucugaaauuggcaacagggaugcgaaauguaccagagaaacaaacuagaggcauauuuggcgcaaucgcggguuucauagaaaaugguugggagggaaugguggaugguugguacgguuucaggcaucaaaauucugagggaagaggacaagcagcagaucucaaaagcacucaagcagcaaucgaucaaaucaaugggaagcugaauagauugaucgggaaaaccaacgagaaauuccaucagauugaaaaagaauucucagaagucgaagggagaauucaggaccuugagaaauauguugaggacacuaaaauagaucucuggucauacaacgcggagcuucuuguugcccuggagaaccaacauacaauugaucuaacugacucagaaaugaacaaacuguuugaaaaaacaaagaagcaacugagggaaaaugcugaggauaugggcaaugguuguuucaaaauauaucacaaaugugacaaugccugcauaggaucaaucagaaauggaacuuaugaccacgauguauacagagaugaagcauuaaacaaccgguuccagaucaagggaguugagcugaagucaggguacaaagauuggauccuauggauuuccuuugccauaucauguuuuuugcuuuguguugcuuuguugggguucaucaugugggccugccaaaaaggcaacauuaggugcaacauuugcauuuga

SEQ ID NO: 34553 - RNA, 1701 nt, Artificial Sequence
  derived and/or modified CDS sequence (wt) from hemagglutinin__InfluenzaA__ACN32925
augaagacuaucauugcuuugagcuacauucuaugucugguuuucgcucaaaaacuuccuggaaaugacaacagcacggcaacgcugugccuugggcaccaugcaguaccaaacggaacgauagugaaaacaaucacgaaugaccaaauugaaguuacuaaugcuacugagcugguucagaguuccucaacaggugaaauaugcgacaguccucaucagauccuugauggagaaaacugcacacuaauagaugcucuauugggagacccucagugugauggcuuccaaaauaagaaaugggaccuuuuuguugaacgcagcaaagccuacagcaacuguuacccuuaugaugugccggauuaugccucccuuaggucacuaguugccucauccggcacacuggaguuuaacaaugaaagcuucaauuggacuggagucacucaaaacggaacaagcucugcuugcauaaggagaucuaauaacaguuucuuuaguagauugaauugguugacccacuuaaaauucaaauacccagcauugaacgugacuaugccaaacaaugaacaauuugacaaauuguacauuugggggguucaccacccggguacggacaaugaccaaaucuuccuguaugcucaagcaucaggaagaaucacagucucuaccaaaagaagccaacaaacuguaaucccgaauaucggaucuagacccagaguaaggaauaucccuagcagaauaagcaucuauuggacaauaguaaaaccgggagacauacuuuugauuaacagcacagggaaucuaauugcuccuagggguuacuucaaaauacgaagugggaaaagcucaauaaugagaucagaugcacccauuggcaaaugcaauucugaaugcaucacuccaaauggaagcauucccaaugacaaaccauuccaaaauguaaacaggaucacauacggggccugucccagauauguuaagcaaaacacucugaaauuggcaacagggaugcgaaauguaccagagaaacaaacuagaggcauauuuggcgcaaucgcggguuucauagaaaaugguugggagggaaugguggaugguugguacgguuucaggcaucaaaauucugagggaagaggacaagcagcagaucucaaaagcacucaagcagcaaucgaucaaaucaaugggaagcugaauagauugaucgggaaaaccaacgagaaauuccaucagauugaaaaagaauucucagaagucgaagggagaauucaggaccuugagaaauauguugaggacacuaaaauagaucucuggucauacaacgcggagcuucuuguugcccuggagaaccaacauacaauugaucuaacugacucagaaaugaacaaacuguuugaaaaaacaaagaagcaacugagggaaaaugcugaggauaugggcaaugguuguuucaaaauauaucacaaaugugacaaugccugcauaggaucaaucagaaauggaacuuaugaccacgauguauacagagaugaagcauuaaacaaccgguuccagaucaagggaguugagcugaagucaggguacaaagauuggauccuauggauuuccuuugccauaucauguuuuuugcuuuguguugcuuuguugggguucaucaugugggccugccaaaaaggcaacauuaggugcaacauuugcauuuga

SEQ ID NO: 34554 - RNA, 1701 nt, Artificial Sequence
  derived and/or modified CDS sequence (wt) from hemagglutinin__InfluenzaA__ACN32936
augaagacuaucauugcuuugagcuacauucuaugucugguuuucgcucaaaaauuuccuggaaaugacaacagcacggcaacgcugugccuugggcaccaugcaguaccaaacggaacgauagugaaaacaaucacgaaugaccaaauugaaguuacuaaugcuacugagcugguucagaguuccucaacaggugaaauaugcgacaguccucaucagauccuugauggagaaaacugcacacuaauagaugcucuauugggagacccucagugugauggcuuccaaaauaagaauugggaccuuuuuguugaacgcagcaaagccuacagcaacuguuacccuuaugaugugccggauuaugccucccuuaggucacuaguugccucauccggcacacuggaguuuaacaaugaaagcuucaauuggacuggagucacucaaaacggaacaagcucugcuugcauaaggagaucuaauaacaguuucuuuaguagauugaauugguugacccacucaaaauucaaauacccagcauugaacgugacuaugccaaacaaugaaaauuuugacaaauuguacauuugggggguucaccacccggguacggacaaugaccaaaucuuccuguaugcucaagcaucaggaagaaucacagucucuaccaaaagaagccaacaaacuguaaucccgaauaucggaucuagacccagaauaaagaauaucccuagcagaauaagcaucuauuggacaauaguaaaaccgggagacauacuuuugauuaacagcacagggaaucuaauugcuccuagggguuacuucaaaauacgaagugggaaaagcucaauaaugagaucagaugcacccauuggcaaaugcaauucugaaugcaucacuccaaauggaagcauucccaaugacaaaccauuccaaaauguaaacaggaucacauacggggccugucccagauauguuaagcaaaacacucugaaauuggcaacagggaugcgaaauguaccagagaaacaaacuagaggcauauuuggcgcaaucgcugguuucauagaaaaugguugggagggaaugguggaugguugguacgguuucaggcaucaaaauucugagggaauaggacaagcagcagaucucaaaagcacucaagcagcaaucgaucaaaucaaugggaagcugaauagguugaucgggaaaaccaacgagaaauuccaucagauugaaaaagaauucucagaagucgaagggagaauucaggaccuugagaaauauguugaggacaccaaaauagaucucuggucauacaacgcggagcuucuuguugcccuggagaaccaacauacaauugaucuaacugauucagaaaugaacaaacuguuugaaaaaacaaagaagcaacugagggaaaaugcugaggauaugggcaaugguuguuucaaaaucuaccacaaaugugacaaugccugcauaggaucaaucagaaauggaacuuaugaccacgaugucuacagagaugaagcauuaaacaaccgguuccagaucaagggcguugagcugaagucaggauacaaagauuggauccuauggauuuccuuugccauaucauguuuuuugcuuugcauugcuuuguugggguucaucaugugggccugccaaaaaggcaacauuaggugcaacauuugcauuuga

SEQ ID NO: 34555 - RNA, 1701 nt, Artificial Sequence; identical to SEQ ID NO: 34529
  derived and/or modified CDS sequence (wt) from hemagglutinin__InfluenzaA__ACN32947

SEQ ID NO: 34556 - RNA, 1701 nt, Artificial Sequence
  derived and/or modified CDS sequence (wt) from hemagglutinin__InfluenzaA__ACN32958
augaagacuaucauugcuuugagcuacauucuaugucugguuuucgcucaaaaacuuccuggaaaugacaacagcacggcaacgcugugccuugggcaccaugcaguaccaaacggaacgauagugaaaacaaucacgaaugaccaaauugaaguuacuaaugcuacugagcugguucagaguuccucaacaggugaaauaugcgacaguccucaccagauccuugauggagaaaacugcacacuaauagaugcucuauugggagacccucagugugauggcuuccaaaauaagaaaugggaccuuuuuguugaacgcaacaaagccuacagcaacuguuacccuuaugaugugccggauuaugccucccuuaggucacuaguugccucauccggcacacuggaguuuaacaaugaaagcuucaauuggacuggagucacucaaaacggaacaagcucugcuugcauaaggagaucuaauaacaguuucuuuaguagauugaauugguugacccacuuaaaauucaaauacccagcauugaacgugacuaugccaaacaaugaacaauuugacaaauuguacauuugggggguucaccacccggguacggacaaugaccaaaucuuccuguaugcucaagcaucaggaagaaucacagucucuaccaaaagaagccaacaaacuguaaucccgaauaucggaucuagacccagaguaaggaauaucccuagcagaauaagcaucuauuggacaauaguaaaaccgggagacauacuuuugauuaacagcacagggaaucuaauugcuccuagggguuacuucaaaauacgaagugggaaaagcucaauaaugagaucagaugcacccauuggcaaaugcaauucugaaugcaucacuccaaauggaagcauucccaaugacaaaccauuccaaaauguaaacaggaucacauacggggccugucccagauauguuaagcaaaacacucugaaauuggcaacagggaugcgaaauguaccagagaaacaaacuagaggcauauuuggcgcaaucgcggguuucauagaaaaugguugggagggaaugguggaugguugguacgguuucaggcaucaaaauucugagggaagaggacaagcagcagaucucaaaagcacucaagcagcaaucgaucaaaucaaugggaagcugaauagauugaucgggaaaaccaacgagaaauuccaucagauugaaaaagaauucucagaagucgaagggagaauucaggaccuugagaaauauguugaggacacuaaaauagaucucuggucauacaacgcggagcuucuuguugcccuggagaaccaacauacaauugaucuaacugacucagaaaugaacaaacuguuugaaaaaacaaagaagcaacugagggaaaaugcugaggauaugggcaaugguuguuucaaaauauaucacaaaugugacaaugccugcauaggaucaaucagaaauggaacuuaugaccacgauguauacagagaugaagcauuaaacaaccgguuccagaucaagggaguugagcugaagucaggguacaaagauuggauccuauggauuuccuuugccauaucauguuuuuugcuuuguguugcuuuguugggguucaucaugugggccugccaaaaaggcaacauuaggugcaacauuugcauuuga

SEQ ID NO: 34557 - RNA, 1701 nt, Artificial Sequence
  derived and/or modified CDS sequence (wt) from hemagglutinin__InfluenzaA__ACN32969
augaagacuaucauugcuuugagcuacauucuaugucugguuuccgcucaaaaacuuccuggaaaugacaacagcacggcaacacugugccuugggcaccaugcaguaccaaacggaacgauagugaaaacaaucacgaaugaccaaauugaaguuacuaaugcuacugagcugguucagaguuccucaacaggugaaauaugcgacaguccucaucagguccuugauggagaaaacugcacacuaauagaugcucuauugggagacccucagugugauggcuuccaaaauaagaaaugggaccuuuuuguugaacgcagcaaagccuacagcaacuguuacccuuaugaugugccggauuaugccucccuuaggucacuaguugccucaucuggcacacuggaguuuaacaaugaaagcuucaauuggacuggagucacucaaaacggaacaagcucugcuugcauaaggagauccaauaacaguuucuuuaguagacugaauugguugacccacucaaaauucaaauacccagcauugaacgugacuaugccaaacaaugaagaauuugacaaauuguacauuugggggguucaccacccggguacggacaaugaccaaaucuuccuguaugcucaagcaucaggaagaaucacagucucuaccaaaagaagccaacaaacuguaaucccgaauaucggaucuagacccagaguaaggaauauccccagcagaauaagcaucuauuggacaauaguaaaaccgggagacauacuuuugauuaacagcacagggaaucuaauugcuccuagggguuacuucaaacuacgaagugggaaaagcucaauaaugagaucagaugcacccauuggcaaaugcaauucugaaugcaucacuccaaauggaagcauucccaaugacaaaccauuccaaaauguaaacaggaucacauacggggccugucccagauauguuaagcaaaacacucugaaauuggcaacagggaugcgaaauguaccagagaaacaaacuagaggcauauuuggcgcaaucgcggguuucauagaaaaugguugggagggaaugguggaugguugguacgguuucaggcaucaaaauucugagggaauaggacaagcagcagaucucaaaagcacucaagcagcaaucgaucaaaucaaugggaagcugaauagguugaucgggaaaaccaacgagaaauuccaucagauugaaaaagaauucucagaagucgaagggagaauucaggaccuugagaaauauguugaggacaccaaaauagaucucuggucauacaacgcggagcuucuuguugcccuggagaaccaacauacaauugaucuaacugacucagaaaugaacaaacuguuugaaaaaacaaagaagcaacugagggaaaaugcugaggauaugggcaaugguuguuucaaaauauaccacaaaugugacaaugccugcauaggaucaaucagaaauggaacuuaugaccacgagguauacagagaugaagcauuaaacaaccgguuccagaucaagggcguugagcugaagucaggauacaaagauuggauccuauggauuuccuuugccauaucaugcuuuuugcuuuguguugcuuuguugggguucaucaugugggccugccaaaaaggcaacauuaggugcaacauuugcauuuga

SEQ ID NO: 34558 - RNA, 1701 nt, Artificial Sequence
  derived and/or modified CDS sequence (wt) from hemagglutinin__InfluenzaA__ACN32980
augaagacuaucauugcuuugagcuacauucuaugccugguuuucgcucaaaaacuuccuggaaaugacaacagcacugcaacgcugugccuugggcaccaugcaguaccaaacgggacgauagugaaaacaaucacgaaugaccaaauugaaguuacuaaugcuacugagcugguucagaguuccucaacaggugaaauaugcgacaguccucaucagauccuugauggagaaaacugcacacuaauagaugcucuauugggagacccucagugugauggcuuccaaaauaagaaaugggaccuuuuuguugaacgcagcaaagcccacagcaacuguuacccuuaugaugugccggauuaugccucccuuaggucacuaguugccucauccggcacacuggaguuuaacaaugaaagcuucaauuggacuggagucacucaaaacggaacaagcucugcuugcauaaggagaucuaaaaacaguuucuuuaguagauugaauugguugacccacuuaaaauucaaauacccagcauugaacgugacuaugccaaacgaugaaaaauuugacaaauuguacauuugggggguucaccacccggguacggacaaugaccaaaucuuccuguaugcucaagcaucaggaagaaucacagucucuaccaaaagaagccaacaaacuguaaucccgaauaucggaucuagacccagaguaaggaauauccccagcagaauaagcaucuauuggacaauaguaaaaccgggagacauacuuuugauuaacagcacagggaaucuaauugcuccuagggguuacuucaaaauacgaagugggaaaagcucaauaaugagaucagaugcacccauuggcaaaugcaauucugaaugcaucacuccaaauggaagcauucccaaugacaaaccauuccaaaauguuaacaggaucacauacggggccugucccagauauguuaagcaaaacacucugaaauuggcaacaggaaugcgaaauguaccagagaaacaaacuagaggcauauuuggcgcaaucgcggguuucauagaaaaugguugggagggaaugguggaugguugguacgguuucaggcaucaaaauucugagggaauaggacaagcagcagaucucaaaagcacucaagcagcaaucgaucaaaucaauggaaagcugaauagguugaucgggaaaaccaacgagaaauuccaucagauugaaaaagaauucucagaagucgaagggagaauucaggaccuugagaaauauguugaggacaccaaaauagaucucuggucauacaacgcggagcuucuuguugcccuggagaaccaacauacaauugaucuaacugacucagaaaugaacaaacuguuugaaaaaacaaagaagcaacugagggaaaaugcugaggauaugggcaaugguuguuucaaaauauaccacaaaugugacaaugccugcguaggaucaaucagaaauggaacuuaugaccacgauguauacagagaugaagcauuaaacaaccgguuccagaucaagggcguugagcugaagucaggauacaaagauuggauccuauggauuuccuuugccauaucauguuuuuugcuuuguguugcuuuguugggguucaucaugugggccugccaaaaaggcaacauuaggugcaacauuugcauuuga

SEQ ID NO: 34559 - RNA, 1701 nt, Artificial Sequence; identical to SEQ ID NO: 34535
  derived and/or modified CDS sequence (wt) from hemagglutinin__InfluenzaA__ACN32991

SEQ ID NO: 34560 - RNA, 1701 nt, Artificial Sequence; identical to SEQ ID NO: 34535
  derived and/or modified CDS sequence (wt) from hemagglutinin__InfluenzaA__ACN33002

SEQ ID NO: 34561 - RNA, 1701 nt, Artificial Sequence
  derived and/or modified CDS sequence (wt) from hemagglutinin__InfluenzaA__ACN33013
augaagacuaucauugcuuugagcuacauucuaugucugguuuucgcucaaaaacuuccuggaaaugacaacagcacggcaacgcugugccuugggcaccaugcaguaccaaacggaacgauagugaaaacaaucacgaaugaccaaauugaaguuacuaaugcuacugagcugguucagaguuccucaacaggugaaauaugcgacaguccucaucagauccuugauggagaaaacugcacacuaauagaugcucuauugggagacccucagugugauggcuuccaaaauaagaaaugggaccuuuuuguugaacgaagcaaagccuacagcaacuguuacccuuaugaugugccggauuaugccucccuuaggucacuaguugccucauccggcacacuggaguuuaacaaugaaagcuucaauuggacuggagucacucaaaacggaacaagcucugcuugcauaaggagaucuaauaacaguuucuuuaguagauugaauugguugacccacuuaaaauucaaauacccagcauugaacgugacuaugccaaacaaugaacaauuugacaaauuguacauuugggggguucaccacccggguacggacaaugaccaaaucuuccuguaugcucaagcaucaggaagaaucacagucucuaccaaaagaagccaacaaacuguaaucccgaauaucggaucuagacccagaguaaggaauaucccuagcagaauaagcaucuauuggacaauaguaaaaccgggagacauacuuuugauuaacagcacagggaaucuaauugcuccuagggguuacuucaaaauacgaagugggaaaagcucaauaaugagaucagaugcacccauuggcaaaugcaauucugaaugcaucacuccaaauggaagcauucccaaugacaaaccauuccaaaauguaaacaggaucacauacggggccugucccagauauguuaagcaaaacacucugaaauuggcaacagggaugcgaaauguaccagagaaacaaacuagaggcauauuuggcgcaaucgcggguuucauagaaaaugguugggagggaaugguggaugguugguacgguuucaggcaucaaaauucugagggaagaggacaagcagcagaucucaaaagcacucaagcagcaaucgaucaaaucaaugggaagcugaauagauugaucgggaaaaccaacgagaaauuccaucagauugaaaaagaauucucagaagucgaagggagaauucaggaccuugagaaauauguugaggacacuaaaauagaucucuggucauacaacgcggagcuucuuguugcccuggagaaccaacauacaauugaucuaacugacucagaaaugaacaaacuguuugaaaaaacaaagaagcaacugagggaaaaugcugaggauaugggcaaugguuguuucaaaauauaccacaaaugugacaaugccugcauaggaucaaucagaaauggaacuuaugaccacgauguauacagagaugaagcauuaaacaaccgguuccagaucaagggaguugagcugaagucaggguacaaagauuggauccuauggauuuccuuugccauaucauguuuuuugcuuuguguugcuuuguugggguucaucaugugggccugccaaaaaggcaacauuaggugcaacauuugcauuuga

SEQ ID NO: 34562 - RNA, 1701 nt, Artificial Sequence
  derived and/or modified CDS sequence (wt) from hemagglutinin__InfluenzaA__ACN33035
augaagacuaucauugcuuugagcuacauucuaugucugguuuucgcucaaaaacuuccuggaaaugacaacagcacggcaacgcugugccuugggcaccaugcaguaccaaacggaacgauagugaaaacaaucacgaaugaccaaauugaaguuacuaaugcuacugagcugguucagaguuccucaacaggugaaauaugcgacaguccucaucagauccuugauggagaaaacugcacacuaauagaugcucuauugggagacccucagugugauggcuuccaaaauaagaaaugggaccuuuuuguugaacgcagcaaagccuacagcaacuguuacccuuaugaugugccggauuaugccucccuuaggucacuaguugccucauccggcacacuggaguuuaacaaugaaagcuucaauuggacuggagucacucaaaacggaacaagcucugcuugcauaaggagaucuaauaacaguuucuuuaguagauugaauugguugacccacuuaaaauucaaauacccagcauugaacgugacuaugccaaacaaugaacaauuugacaaauuguacguuugggggguucaccacccggguacggacaaugaccaaaucuuccuguaugcucaagcaucaggaagaaucacagucucuaccaaaagaagccaacaaacuguaaucccgaauaucggaucuagacccagaguaaggaauaucccuagcagaauaagcaucuauuggacaauaguaaaaccgggagacauacuuuugauuaacagcacagggaaucuaauugcuccuagggguuacuucaaaauacgaagugggaaaagcucaauaaugagaucagaugcacccauuggcaaaugcaauucugaaugcaucacuccaaauggaagcauucccaaugacaaaccauuccaaaauguaaacaggaucacauacggggccugucccagauauguuaagcaaaacacccugaaauuggcaacagggaugcgaaauguaccagagaaacaaacuagaggcauauuuggcgcaaucgcggguuucauagaaaaugguugggagggaaugguggaugguugguacgguuucaggcaucaaaauucugagggaagaggacaagcagcagaucucaaaagcacucaagcagcaaucgaucaaaucaaugggaagcugaauagauugaucgggaaaaccaacgagaaauuccaucagauugaaaaagaauucucagaagucgaagggagaauucaggaccuugagaaauauguugaggacacuaaaauagaucucuggucauacaacgcggagcuucuuguugcccuggagaaccaacauacaauugaucuaacugacucagaaaugaacaaacuguuugaaaaaacaaagaagcaacugagggaaaaugcugaggauaugggcaaugguuguuucaaaauauaccacaaaugugacaaugccugcauaggaucaaucagaaauggaacuuaugaccacgauguauacagagaugaagcauuaaacaaccgguuccagaucaagggaguugagcugaagucaggguacaaagauuggauccuauggauuuccuuugccauaucauguuuuuugcuuuguguugcuuuguugggguucaucaugugggccugccaaaaaggcaacauuaggugcaacauuugcauuuga

SEQ ID NO: 34563 - RNA, 1701 nt, Artificial Sequence
  derived and/or modified CDS sequence (wt) from hemagglutinin__InfluenzaA__ACN33046
augaagacuaucauugcuuugagcuacauucuaugucugguuuucgcucaaaaacuuccuggaaaugacaacagcacggcaacgcugugccuugggcaccaugcaguaccaaacggaacgauagugaaaacaaucacgaaugaccaaauugaaguuacuaaugcuacugagcugguucagaguuccucaacaggugaaauaugcgacaguccucaucagauccuugauggagaaaacugcacacuaauagaugcucuauugggagacccucagugugauggcuuccaaaauaagaaaugggaccuuuuuguugaacgcagcaaagccuacagcaacuguuacccuuaugaugugccggauuaugccucccuuaggucacuaguugccucauccggcacacuggaguuuaacaaugaaagcuucaauuggacuggagucacucaaaacggaacaagcucugcuugcauaaggagaucuaauaacaguuucuuuaguagauuaaauugguugacccacuuaaaauucaaauacccagcauugaacgugacuaugccaaacaaugaacaauuugacaaauuguacauuugggggguucaccacccggguacggacaaugaccaaaucuuccuguaugcucaagcaucaggaagaaucacagucucuaccaaaagaagccaacaaacuguaaucccgaauaucggaucuagacccagaguaaggaauaucccuagcagaauaagcaucuauuggacaauaguaaaaccgggagacauacuuuugauuaacagcacagggaaucuaauugcuccuagggguuacuucaaaauacgaagugggaaaagcucaauaaugagaucagaugcacccauuggcaaaugcaauucugaaugcaucacuccaaauggaagcauucccaaugacaaaccauuccaaaauguaaacaggaucacauacggggccugucccagauauguuaagcaaaacacucugaaauuggcaacagggaugcgaaauguaccagagaaacaaacuagaggcauauuuggcgcaaucgcggguuucauagaaaaugguugggagggaaugguggaugguugguacgguuucaggcaucaaaauucugagggaagaggacaagcagcagaucucaaaagcacucaagcagcaaucgaucaaaucaaugggaagcugaauagauugaucgggaaaaccaacgagaaauuccaucagauugaaaaagaauucucagaagucgaagggagaauucaggaccuugagaaauauguugaggacacuaaaauagaucucuggucauacaacgcggagcuucuuguugcccuggagaaccaacauacaauugaucuaacugacucagaaaugaacaaacuguuugaaaaaacaaagaagcaacugagggaaaaugcugaggauaugggcaaugguuguuucaaaauauaccacaaaugugacaaugccugcauaggaucaaucagaaauggaacuuaugaccacgauguauacagagaugaagcauuaaacaaccgguuccagaucaagggaguugagcugaagucaggguacaaagauuggauccuauggauuuccuuugccauaucauguuuuuugcuuuguguugcuuuguugggguucaucaugugggccugccaaaaaggcaacauuaggugcaacauuugcauuuga

SEQ ID NO: 34564 - RNA, 1701 nt, Artificial Sequence
  derived and/or modified CDS sequence (wt) from hemagglutinin__InfluenzaA__ACN33057
augaagacuaucauugcuuugagcuacauucuaugucugguuuucgcucaaaaacuuccuggaaaugacaacagcacggcaacgcugugccuugggcaccaugcaguaccaaacggaacgauagugaaaacaaucacgaaugaccaaauugaaguuacuaaugcuacugagcugguucagaguuccucaacaggugaaauaugcgacaguccucaucagauccuugauggagaaaacugcacacuaauagaugcucuauugggagacccucagugugauggcuuccaaaauaagaaaugggaccuuuuuguugaacgcagcaaagccuacagcaacuguuacccuuaugaugugccggauuaugccucccuuaggucacuaguugccucaucuggcacacuggaguuuaacaaugaaagcuucaauuggacuggagucacucaaaacggaacaagcucugcuugcauaaggagaucuaauaacaguuucuuuaguagauugaauugguugacccacuuaaaauucaaauacccagcauugaacgugacuaugccaaacaaugaacaauuugacaaauuguacauuugggggguucaccacccggguacggacaaugaccaaaucuuccuguaugcucaagcaucaggaagaaucacagucucuaccaaaagaagccaacagacuguaaucccgaauaucggaucuagacccagaguaaggaauaucccuagcagaauaagcaucuauuggacaauaguaaaaccgggagacauacuuuugauuaacagcacagggaaucuaauugcuccuagggguuacuucaaaauacgaagugggaaaagcucaauaaugagaucagaugcacccauuggcaaaugcaauucugaaugcaucacuccaaauggaagcauucccaaugacaaaccauuccaaaauguaaacaggaucacauacggggccugucccagauauguuaagcaaaacacucugaaauuggcaacagggaugcgaaauguaccagagaaacaaacuagaggcauauuuggcgcaaucgcggguuucauagaaaaugguugggagggaaugguggaugguugguacgguuucaggcaucaaaauucugagggaagaggacaagcagcagaucucaaaagcacucaagcagcaaucgaucaaaucaaugggaagcugaauagauugaucgggaaaaccaacgagaaauuccaucagauugaaaaagaauucucagaagucgaagggagaauucaggaccuugagaaauauguugaggacacuaaaauagaucucuggucauacaacgcggagcuucuuguugcccuggagaaccaacauacaauugaucuaacugacucagaaaugaacaaacuguuugaaaaaacaaagaagcaacugagggaaaaugcugaggauaugggcaaugguuguuucaaaauauaccacaaaugugacaaugccugcauaggaucaaucagaaauggaacuuaugaccacgauguauacagagaugaagcauuaaacaaccgguuccagaucaagggaguugagcugaagucaggguacaaagauuggauccuauggauuuccuuugccauaucauguuuuuugcuuuguguugcuuuguugggguucaucaugugggccugccaaaaaggcaacauuaggugcaacauuugcauuuga

SEQ ID NO: 34565 - RNA, 1701 nt, Artificial Sequence
  derived and/or modified CDS sequence (wt) from hemagglutinin__InfluenzaA__ACN33068
augaagacuaucauugcuuugagcuacauucuaugucugguuuucgcucaaaaacuuccuggaaaugacaacagcacggcaacgcugugccuugggcaccaugcaguaccaaacggaacgauagugaaaacaaucacgaaugaccaaauugaaguuacuaaugcuacugagcugguucagaguuccucaacaggugaaauaugcgacaguccucaucagauccuugauggagaaaacugcacacuaauagaugcucuauugggagacccucagugugauggcuuccaaaauaagaaaugggaccuuuuuguugaacgcagcaaagccuacagcaacuguuacccuuaugaugugccggauuaugccucccuuaggucacuaguugccucauccggcacacuggaguuuaacaaugaaagcuucaauuggacuggagucacucaaaacggaacaagcucugcuugcauaaggagaucuaauaacaguuucuuuaguagauugaauugguugacccacuuaaaauucaaauacccagcauugaacgugacuaugccaaacaaugaacaauuugacaaauuguacauuugggggguucaccacccggguacggacaaugaccaaaucuuccuguaugcucaagcaucaggaagaaucacagucucuaccaaaagaagccaacaaacuguaaucccgaauaucggaucuagacccagaguaaggaauaucccuagcagaauaagcaucuauuggacaauaguaaaaccgggagacauacuuuugauuaacagcacagggaaucuaauugcuccuagggguuacuucaaaauacgaaguggaaaaagcucaauaaugagaucagaugcacccauuggcaaaugcaauucugaaugcaucacuccaaauggaagcauucccaaugacaaaccauuccaaaauguaaacaggaucacauacggggccugucccagauauguuaagcaaaacacucugaaauuggcaacagggaugcgaaauguaccagagaaacaaacuagaggcauauuuggcgcaaucgcggguuucauagaaaaugguugggagggaaugguggaugguugguacgguuucaggcaucaaaauucugagggaagaggacaagcagcagaucucaaaagcacucaagcagcaaucgaucaaaucaaugggaagcugaauagauugaucgggaaaaccaacgagaaauuccaucagauugaaaaagaauucucagaagucgaagggagaauucaggaccuugagaaauauguugaggacacuaaaauagaucucuggucauacaacgcggagcuucuuguugcccuggagaaccaacauacaauugaucuaacugacucagaaaugaacaaacuguuugaaaaaacaaagaagcaacugagggaaaaugcugaggauaugggcaaugguuguuucaaaauauaucacaaaugugacaaugccugcauaggaucaaucagaaauggaacuuaugaccacgauguauacagagaugaagcauuaaacaaccgguuccagaucaagggaguugagcugaagucaggguacaaagauuggauccuauggauuuccuuugccauaucauguuuuuugcuuuguguugcuuuguugggguucaucaugugggccugccaaaaaggcaacauuaggugcaacauuugcauuuga

SEQ ID NO: 34566 - RNA, 1701 nt, Artificial Sequence
  derived and/or modified CDS sequence (wt) from hemagglutinin__InfluenzaA__ACN33079
augaagacuaucauugcuuugagcuacauucuaugucugguuuucgcucaaaaauuuccuggaaaugacaacagcacggcaacgcugugccuugggcaccaugcaguaccaaacggaacgauagugaaaacaaucacgaaugaccaaauugaaguuacuaaugcuacugagcugguucagaguuccucaacaggugaaauaugcgacaguccucaucagauccuugauggagaaaacugcacacuaauagaugcucuauugggagacccucagugugauggcuuccaaaauaagaauugggaccuuuuuguugaacgcagcaaagccuacagcaacuguuacccuuaugaugugccggauuaugccucccuuaggucacuaguugccucauccggcacacuagaguuuaacaaugaaagcuucaauuggacuggagucacucaaaacggaacaagcucugcuugcauaaggagaucuaauaacaguuucuuuaguagauugaauugguugacccacucaaaauucaaauacccagcauugaacgugacuaugccaaacaaugaaaauuuugacaaauuguacauuugggggguucaccacccggguacggacaaugaccaaaucuuccuguaugcucaagcaucaggaagaaucacagucucuaccaaaagaagccaacaaacuguaaucccgaauaucggaucuagacccagaguaaggaauaucccuagcagaauaagcaucuauuggacaauaguaaaaccgggagacauacuuuugauuaacagcacagggaaucuaauugcuccuagggguuacuucaaaauacgaagugggaaaagcucaauaaugagaucagaugcacccauuggcaaaugcaauucugaaugcaucacuccaaauggaagcauucccaaugacaaaccauuccaaaauguaaacaggaucacauacggggccugucccagauauguuaagcaaaacacucugaaauuggcaacagggaugcgaaauguaccagagaaacaaacuagaggcauauuuggcgcaaucgcugguuucauagaaaaugguugggagggaaugguggaugguugguacgguuucaggcaucaaaauucugagggaauaggacaagcagcagaucucaaaagcacucaagcagcaaucgaucaaaucaaugggaagcugaauagguugaucgggaaaaccaacgagaaauuccaucagauugaaaaagaauucucagaagucgaagggagaauucaggaccuugagaaauauguugaggacaccaaaauagaucucuggucauacaacgcggagcuucuuguugcccuggagaaccaacauacaauugaucuaacugauucagaaaugaacaaacuguuugaaaaaacaaagaagcaacugagggaaaaugcugaggauaugggcaaugguuguuucaaaaucuaccacaaaugugacaaugccugcauaggaucaaucagaaauggaacuuaugaccacgaugucuacagagaugaagcauuaaacaaccgguuccagaucaagggcguugagcugaagucaggauacaaagauuggauccuauggauuuccuuugccauaucauguuuuuugcuuugcauugcuuuguugggguucaucaugugggccugccaaaaaggcaacauuaggugcaacauuugcauuuga

SEQ ID NO: 34567 - RNA, 1698 nt, Artificial Sequence
  derived and/or modified CDS sequence (wt) from hemagglutinin__InfluenzaA__ACN33090
augaaaguaaaacuacugauucuguuauguacauuuacagcuacauaugcagacacaauauguauaggcuaccaugccaacaacucgaccgacacuguugacacaguacuugagaagaaugugacagugacacacucugucaaccuacuugaggacagucacaauggaaaacuaugucuacuaaaaggaauagccccacuacaauuggguaauugcagcguugccggauggaucuuaggaaacccagaaugcgaauugcugauuuccaaggaaucaugguccuacauuguagagacaccaaauccugagaauggaacauguuacccaggguauuucgccgacuaugaggagcugagagagcaauugaguucaguaucuucauuugagagguucgaaauauuccccaaagagagcucauggcccaaccacaccguaaccggaguaucagcaucaugcucccauaacgggaaaagcaguuuuuacagaaauuugcuauggcugacggggaagaaugguuuguauccaaaccugagcaaguccuaugcaaacaacaaagagaaagaaguccuuguacugugggguguucaucacccgucuaacauaggggaccaaagggcccucuaucauacagaaaaugcuuaugucucuguagugucuucacauuauagcagaagauucaccccagaaauagccaaaagacccaaggugagagaucaggaaggaagaaucaacuacuacuggacucugcuugaacccggggauacaauaauauuugaggcaaauggaaaucuaauagcgccaagguuugcuuucgcacugaguagaggcuuuggaucaggaaucaucaccucaaaugcaccaauggaugaaugugaugcgaaaugucaaacaccucagggagcuauaaacagcagucuuccuuuccagaauguacacccagucacaauaggagaguguccaaaguaugucaggaguacaaaauuaagaaugguuacaggacuaaggaacaucccauccauucaauccagagguuuauuuggagccauugccgguuucauugaagggggguggacuggaaugguagaugguugguaugguuaucaccaucagaaugagcaaggaucuggguaugcugcagaucaaaaaagcacacaaaaugccauuaacgggauuacaaacaaggugaauucuguaauugagaaaaugaacacucaauucacagcugugggcaaagaauucaacaaauuggaaagaaggauggaaaacuuaaauaaaaaaguugaugauggguuucuagacauuuggacauauaacgcagaauuguugguucuacuggaaaaugaaaggacuuuggacuuccaugacuccaacgugaagaaucuguaugagaaaguaaaaagccaauuaaagaauaaugccaaagaaauaggaaacggguguuuugaauucuaucacaaguguaacgaugaaugcauggagagugugaaaaauggaacuuaugacuauccaaaauauuccgaagaaucaaaguugaacagggagaaaauugauggagugaaauuggaaucaaugggagucuaucagauuuuggcgaucuacucaacagucgccaguucccugguucuuuuggucucccugggggcaaucagcuucuggauguguuccaaugggucuuugcaguguagaauaugcaucuaa

SEQ ID NO: 34568 - RNA, 1698 nt, Artificial Sequence; identical to SEQ ID NO: 33926
  derived and/or modified CDS sequence (wt) from hemagglutinin__InfluenzaA__ACN33101

SEQ ID NO: 34569 - RNA, 1701 nt, Artificial Sequence
  derived and/or modified CDS sequence (wt) from hemagglutinin__InfluenzaA__ACN33112
augaagacuaucauugcuuugagcuacauucuaugucugguuuucgcucaaaaauuuccuggaaaugacaacagcacggcaacgcugugccuugggcaccaugcaguaccaaacggaacgauagugaaaacaaucacgaaugaccaaauugaaguuacuaaugcuacugagcugguucagaguuccucaacaggugaaauaugcgacaguccucaucagauccuugauggagaaaacugcacacuaauagaugcucuauugggagacccucagugugauggcuuccaaaauaagaauugggaccuuuuuguugaacgcagcaaagccuacagcaacuguuacccuuaugaugugccggauuaugccucccuuaggucacuaguugccucauccggcacacuggaguuuaacaaugaaagcuucaauuggacuggagucacucaaaacggaacaagcucugcuugcauaaggagaucuaauaacaguuucuuuaguagauugaauugguugacccacucaaaauucaaauacccagcauugaacgugacuaugccaaacaaugaaaauuuugacaaauuguacauuugggggguucaccacccggguacggacaaugaccaaaucuuccuguaugcucaagcaucaggaagaaucacagucucuaccaaaagaagccaacaaacuguaaucccgaauaucggaucuagacccagaguaaggaauaucccuagcagaauaagcaucuauuggacaauaguaaaaccgggagacauacuuuugauuaacagcacagggaaucuaauugcuccuagggguuacuucaaaauacgaagugggaaaagcucaauaaugagaucagaugcacccauuggcaaaugcaauucugaaugcaucacuccaaauggaagcauucccaaugacaaaccauuccaaaauguaaacaggaucacauacggggccugucccagauauguuaagcaaaacacucugaaauuggcaacagggaugcgaaauguaccagagaaacaaacuagaggcauauuuggcgcaaucgcugguuucauagaaaaugguugggagggaaugguggaugguugguacgguuucaggcaucaaaauucugagggaauaggacaagcagcagaucucaaaagcacucaagcagcaaucgaucaaaucaaugggaagcugaauagguugaucgggaaaaccaacgagaaauuccaucagauugaaaaagaauucucagaagucgaagggagaauucaggaccuugagaaauauguugaggacaccaaaauagaucucuggucauacaacgcggagcuucuuguugcccuggagaaccaacauacaauugaucuaacugauucagaaaugaacaaacuguuugaaaaaacaaagaagcaacugagggaaaaugcugaggauaugggcaaugguuguuucaaaaucuaccacaaaugugacaaugccugcauaggaucaaucagaaauggaacuuaugaccacgaugucuacagagaugaagcauuaaacaaccgguuccagaucaagggcguugagcugaagucaggauacaaagauuggauccuauggauuuccuuugccauaucauguuuuuugcuuugcauugcuuuguugggguucaucaugugggccugccaaaaaggcaacauuaggugcaacauuugcauuuga

SEQ ID NO: 34570 - RNA, 1698 nt, Artificial Sequence
  derived and/or modified CDS sequence (wt) from hemagglutinin__InfluenzaA__ACN33123
augaaaguaaaacuacugguccuguuaugcacauuuacagcuacauaugcagacacaauauguauaggcuaccaugcuaacaacucgaccgacacuguugacacaguacuugaaaagaaugugacagugacacacucugucaaccugcuugagaacagucacaauggaaaacuaugucuauuaaaaggaauagccccacuacaauuggguaauugcagcguugccggguggaucuuaggaaacccagaaugcgaauuacugauuuccaaggagucaugguccuacauuguagaaaaaccaaauccugagaauggaacauguuacccagggcauuucgcugacuaugaggaacugagggagcaauugaguucaguaucuucauuugagagguucgaaauauuccccaaagaaagcucauggcccaaccacaccguaaccggagugucagcaucaugcucccauaauggggaaagcaguuuuuacagaaauuugcuauggcugacggggaagaaugguuuguacccaaaccugagcaaguccuaugcaaacaacaaagaaaaagaaguccuuguacuaugggguguucaucacccgccaaacauaggugaccaaaaggcccucuaucauacagaaaaugcuuauguuucuguagugucuucacauuauagcagaaaauucaccccagaaauagccaaaagacccaaaguaagagaucaagaaggaagaaucaacuacuacuggacucugcuugaacccggggauacaauaauauuugaggcaaauggaaaucuaauagcgccaagauaugcuuucgcacugaguagaggcuuuggaucaggaaucaucaacucaaaugcaccaauggauaaaugugaugcgaagugccaaacaccucagggagcuauaaacagcagucuuccuuuccagaacguacacccagucacaauaggagaguguccaaaguaugucagaagugcaaaauuaaggaugguuacaggacuaaggaacaucccauccauucaauccagagguuuguuuggagccauugccgguuucauugaagggggguggacuggaaugguagaugguugguaugguuaucaucaucagaaugagcaaggaucaggcuaugcugcagaucaaaaaagcacacaaaaugccauuaaugggauuacaaacaaggugaauucuguaauugagaaaaugaacacucaauucacagcagugggcaaagaauucaacaaauuggaaagaaggauggaaaacuugaauaaaaaaguugaugauggguuuauagacauuuggacauauaaugcagaacuguugguucuacuggaaaaugaaaggacuuuggauuuccaugacuccaaugugaagaaucuguaugagaaaguaaaaagccaguuaaagaacaaugcuaaagaaauaggaaauggguguuuugaauucuaucacaaguguaacgaugaaugcauggagaguguaaagaauggaacuuaugacuauccaaaauauuccgaagaaucaaaguuaaacagggagaaaauugauggagugaaauuggaaucaaugggagucuaucagauucuggcgaucuacucaacagucgccaguucucugguucuuuuggucucccugggggcaaucagcuucuggauguguuccaaugggucuuugcaguguagaauaugcaucuaa

SEQ ID NO: 34571 - RNA, 1698 nt, Artificial Sequence
  derived and/or modified CDS sequence (wt) from hemagglutinin__InfluenzaA__ACN33145
augaaaguaaaacuacugguccuguuaugcacauuuacagcuacauaugcagacacaauauguauaggcuaccaugcuaacaacucgaccgacacuguugacacaguacuugaaaagaaugugacagugacgcacucugucaaccugcuugagaacagucacaauggaaaacuaugucuauuaaaaggaauagccccacuacaauuggguaacugcagcguugccggguggaucuuaggaaacccagaaugcgaauuacugauuuccaaggagucaugguccuacauuguagaaaaaccaaauccugagaauggaacauguuacccagggcauuucgcugacuaugaggaacugagggagcaauugaguucaguaucuucauuugagagguucgaaauauuccccaaagaaagcucauggcccaaccacaccguaaccggagugucagcaucaugcucccauaauggggaaaguaguuuuuacagaaauuugcuauggcugacggggaagaaugguuuguacccaaaccugagcaaguccuaugcaaacaacaaagaaaaagaaguccuuguacuaugggguguucaucacccgccaaacauaggugaccaaaaggcccucuaucauacagaaaaugcuuauguuucuguagugucuucacauuauagcagaaaauucaccccagaaauagccaaaagacccaaaguaagagaucaagaaggaagaaucaacuacuacuggacucugcuugaacccggggauacaauaauauuugaggcaaauggaaaucuaauagcgccaagauaugcuuucgcacugaguagaggcuuuggaucaggaaucaucaacucaaaugcaccaauggauaaaugugaugcgaagugccaaacaccucagggagcuauaaacagcagucuuccuuuccagaacguacacccagucacaauaggagaguguccaaaguaugucaggagugcaaaauuaaggaugguuacaggacuaaggaacaucccauccauucaauccagagguuuguuuggagccauugccgguuucauugaagggggguggacuggaaugguagaugguugguaugguuaucaucaucagaaugagcaaggaucuggcuaugcugcagaucaaaaaagcacacaaaaugccauuaaugggauuacaaacaaggugaauucuguaauugagaaaaugaacacucaauucacagccgugggcaaagaauucaacaaauuggaaagaaggauggaaaacuugaauaaaaaaguugaugauggguuuauagacaucuggacauauaaugcagaacuguugguucuacuggaaaaugaaaggacuuuggauuuccaugacuccaaugugaagaaucuguaugagaaaguaaaaagccaguuaaagaauaaugcuaaagaaauaggaaauggguguuuugaauucuaucacaaguguaaugaugaaugcauggagaguguaaagaauggaacuuaugacuauccaaaauauuccgaagaaucaaaguuaaacagggagaaaauugauggagugaaauuggaaucaaugggagucuaucagauucuggcgaucuacucaacagucgccaguucucugguucuuuuggucucccugggggcaaucagcuucuggauguguuccaaugggucuuugcaguguagaauaugcaucuaa

SEQ ID NO: 34572 - RNA, 1701 nt, Artificial Sequence
  derived and/or modified CDS sequence (wt) from hemagglutinin__InfluenzaA__ACN33156
augaagacuaucauugcuuugagcuacauucuaugucugguuuucgcucaaaaacuuccuggaaaugacaacagcacggcaacgcugugccuugggcaccaugcaguaccaaacggaacgauagugaaaacaaucacgaaugaccaaauugaaguuacuaaugcuacugagcugguucagaguuccucaacaggugaaauaugcgacaguccucaucagauccuugauggagaaaacugcacacuaauagaugcucuauugggagacccucagugugauggcuuccaaaauaagaaaugggaccuuuuuguugaacgcagcaaagccuacagcaacuguuacccuuaugaugugccggauuaugccucccuuaggucacuaguugccucauccggcacacuggaguuuaacaaugaaagcuucaauuggacuggagucacucaaaacggaacaagcucugcuugcauaaggagaucuaauaacaguuucuuuaguagauugaauugguugacccacuuaaaauucaaauacccagcauugaacgugacuaugccaaacaaugaacaauuugacaaauuguacauuugggggguucaccacccugguacggacaaugaccaaaucuuccuguaugcucaagcaucaggaagaaucacagucucuaccaaaagaagccaacaaacuguaaucccgaauaucggaucuagacccagaguaaggaauaucccuagcagaauaagcaucuauuggacaauaguaaaaccgggagacauacuuuugauuaacagcacagggaaucuaauugcuccuagggguuacuucaaaauacgaagugggaaaagcucaauaaugagaucagaugcacccauuggcaaaugcaauucugaaugcaucacuccaaauggaagcauucccaaugacaaaccauuccaaaauguaaacaggaucacauacggggccugucccagauauguuaagcaaaacacucugaaauuggcaacagggaugcgaaauguaccagagaaacaaacuagaggcauauuuggcgcaaucgcggguuucauagaaaaugguugggagggaaugguggaugguugguacgguuucaggcaucaaaauucugagggaagagggcaagcagcagaucucaaaagcacucaagcagcaaucgaucaaaucaaugggaagcugaauagauugaucgggaaaaccaacgagaaauuccaucagauugaaaaagaauucucagaagucgaagggagaauucaggaccuugagaaauauguugaggacacuaaaauagaucucuggucauacaacgcggagcuucuuguugcccuggagaaccaacauacaauugaucuaacugacucagaaaugaacaaacuguuugaaaaaacaaagaagcaacugagggaaaaugcugaggauaugggcaaugguuguuucaaaauauaccacaaaugugacaaugccugcauaggaucaaucagaaauggaacuuaugaccacgauguauacagagaugaagcauuaaacaaccgguuccagaucaagggaguugagcugaagucaggguacaaagauuggauccuauggauuuccuuugccauaucauguuuuuugcuuuguguugcuuuguugggguucaucaugugggccugccaaaaaggcaacauuaggugcaacauuugcauuuga

SEQ ID NO: 34573 - RNA, 1701 nt, Artificial Sequence
  derived and/or modified CDS sequence (wt) from hemagglutinin__InfluenzaA__ACN33178
augaagacuaucauugcuuugagcuacauucuaugucugguuuucgcucaaaaauuuccuggaaaugacaacagcacggcaacgcugugccuugggcaccaugcaguaccaaacggaacgauagugaaaacaaucacgaaugaccaaauugaaguuacuaaugcuacugagcugguucagaguuccucaacaggugaaauaugcgacaguccucaucagauccuugauggagaaaacugcacacuaauagaugcucuauugggagacccucagugugauggcuuccaaaauaagaauugggaccuuuuuguugaacgcagcaaagccuacagcaacuguuacccuuaugaugugccggauuaugccucccuuaggucacuaguugccucauccggcacacuggaguuuaacaaugaaagcuucaauuggacuggagucacucaaaacggaacaagcucugcuugcauaaggagaucuaauaacaguuucuuuaguagauugaauugguugacccacucaaaauucaaauacccagcauugaacgugacuaugccaaacaaugaaaauuuugacaaauuguacauuugggggguucaccacccggguacggacaaugaccaaaucuuccuguaugcucaagcaucaggaagaaucacagucucuaccaaaagaagccaacaaacuguaaucccgaauaucggaucuagacccagaguaaggaauaucccuagcagaauaagcaucuauuggacaauaguaaaaccgggagacauacuuuugauuaacagcacagggaaucuaauugcuccuagggguuacuucaaaauacgaaguggaaaaagcucaauaaugagaucagaugcacccauuggcaaaugcaauucugaaugcaucacuccaaauggaagcauucccaaugacaaaccauuccaaaauguaaacaggaucacauacggggccugucccagauauguuaagcaaaacacucugaaauuggcaacagggaugcgaaauguaccagagaaacaaacuagaggcauauuuggcgcaaucgcugguuucauagaaaaugguugggagggaaugguggaugguugguacgguuucaggcaucaaaauucugagggaauaggacaagcagcagaucucaaaagcacucaagcagcaaucgaucaaaucaaugggaagcugaauagguugaucgggaaaaccaacgagaaauuccaucagauugaaaaagaauucucagaagucgaagggagaauucaggaccuugagaaauauguugaggacaccaaaauagaucucuggucauacaacgcggagcuucuuguugcccuggagaaccaacauacaauugaucuaacugauucagaaaugaacaaacuguuugaaaaaacaaagaagcaacugagggaaaaugcugaggauaugggcaaugguuguuucaaaaucuaccacaaaugugacaaugccugcauaggaucaaucagaaauggaacuuaugaccacgaugucuacagagaugaagcauuaaacaaccgguuccauaucaagggcguugagcugaagucaggauacaaagauuggauccuauggauuuccuuugccauaucauguuuuuugcuuugcauugcuuuguugggguucaucaugugggccugccaaaaaggcaacauuaggugcaacauuugcauuuga

SEQ ID NO: 34574 - RNA, 1701 nt, Artificial Sequence
  derived and/or modified CDS sequence (wt) from hemagglutinin__InfluenzaA__ACN33189
augaagacuaucauugcuuugagcuacauucuaugucugguuuucgcucaaaaacuuccuggaaaugacaacagcacggcaacgcugugccuugggcaccaugcaguaccaaacggaacgauagugaaaacaaucacgaaugaccaaauugaaguuacuaaugcuacugagcugguucagaguuccucaacaggugaaauaugcgacaguccucaucagauccuugauggagaaaacugcacacuaauagaugcucuauugggagacccucagugugauggcuuccaaaauaagaaaugggaccuuuuuguugaacgaagcaaagccuacagcaacuguuacccuuaugaugugccggauuaugccucccuuaggucacuaguugccucauccggcacacuggaguuuaacaaugaaagcuucaauuggacuggagucacucaaaacggaacaagcucugcuugcauaaggagaucuaauaacaguuucuuuaguagauugaauugguugacccacuuaaaauucaaauacccagcauugaacgugacuaugccaaacaaugaacaauuugacaaauuguacauuugggggguucaccacccggguacggacaaugaccaaaucuuccuguaugcucaagcaucaggaagaaucacagucucuaccaaaagaagccaacaaacuguaaucccgaauaucggaucuagacccagaguaaggaauaucccuagcagaauaagcaucuauuggacaauaguaaaaccgggagacauacuuuugauuaacagcacagggaaucuaauugcuccuagggguuacuucaaaauacgaagugggaaaagcucaauaaugagaucagaugcacccauuggcaaaugcaauucugaaugcaucacuccaaauggaagcauucccaaugacaaaccauuccaaaauguaaacaggaucacauacggggccugucccagauauguuaagcaaaacacucugaaauuggcaacagggaugcgaaauguaccagagaaacaaacuagaggcauauuuggagcaaucgcggguuucauagaaaaugguugggagggaaugguggaugguugguacgguuucaggcaucaaaauucugagggaagaggacaagcagcagaucucaaaagcacucaagcagcaaucgaucaaaucaaugggaagcugaauagauugaucgggaaaaccaacgagaaauuccaucagauugaaaaagaauucucagaagucgaagggagaauucaggaccuugagaaauauguugaggacacuaaaauagaucucuggucauacaacgcggagcuucuuguugcccuggagaaccaacauacaauugaucuaacugacucagaaaugaacaaacuguuugaaaaaacaaagaagcaacugagggaaaaugcugaggauaugggcaaugguuguuucaaaauauaccacaaaugugacaaugccugcauaggaucaaucagaaauggaacuuaugaccacgauguauacagagaugaagcauuaaacaaccgguuccagaucaagggaguugagcugaagucaggguacaaagauuggauccuauggauuuccuuugccauaucauguuuuuugcuuuguguugcuuuguugggguucaucaugugggccugccaaaaaggcaacauuaggugcaacauuugcauuuga

SEQ ID NO: 34575 - RNA, 1701 nt, Artificial Sequence
  derived and/or modified CDS sequence (wt) from hemagglutinin__InfluenzaA__ACN33200
augaagacuaucauugcuuugagcuacauucuaugucugguuuucgcucaaaaauuuccuggaaaugacaacagcacggcaacgcugugccuugggcaccaugcaguaccaaacggaacgauagugaaaacaaucacgaaugaccaaauugaaguuacuaaugcuacugagcugguucagaguuccucaacaggugaaauaugcgacaguccucaucagauccuugauggagaaaacugcacacuaauagaugcucuauugggagacccucagugugauggcuuccaaaauaagaauugggaccuuuuuguugaacgcagcaaagccuacagcaacuguuacccuuaugaugugccggauuaugccucccuuaggucacuaguugccucauccggcacacuggaguuuaacaaugaaagcuucaauuggacuggagucacucaaaacggaacaagcucugcuugcauaaggagaucuaauaacaguuucuuuaguagauugaauugguugacccacucaaaauucaaauacccagcauugaacgugacuaugccaaacaaugaaaauuuugacaaauuguacauuugggggguucaccacccggguacggacaaugaccaaaucuuccuguaugcucaagcaucaggaagaaucacagucucuaccaaaagaagccaacaaacuguaaucccgaauaucggaucuagacccagaguaaggaauaucccuagcagaauaagcaucuauuggacaauaguagaaccgggagacauacuuuugauuaacagcacagggaaucuaauugcuccuagggguuacuucaaaauacgaagugggaaaagcucaauaaugagaucagaugcacccauuggcaaaugcaauucugaaugcaucacuccaaauggaagcauucccaaugacaaaccauuccaaaauguaaacaggaucacauacggggccugucccagauauguuaagcaaaacacucugaaauuggcaacagggaugcgaaauguaccagagaaacaaacuagaggcauauuuggcgcaaucgcugguuucauagaaaaugguugggagggaaugguggaugguugguacgguuucaggcaucaaaauucugagggaauaggacaagcagcagaucucaaaagcacucaagcagcaaucgaucaaaucaaugggaagcugaauagguugaucgggaaaaccaacgagaaauuccaucagauugaaaaagaauucucagaagucgaagggagaauucaggaccuugagaaauauguugaggacaccaaaauagaucucuggucauacaacgcggagcuucuuguugcccuggagaaccaacauacaauugaucuaacugauucagaaaugaacaaacuguuugaaaaaacaaagaagcaacugagggaaaaugcugaggauaugggcaaugguuguuucaaaaucuaccacaaaugugacaaugccugcauaggaucaaucagaaauggaacuuaugaccacgaugucuacagagaugaagcauuaaacaaccgguuccagaucaagggcguugagcugaagucaggauacaaagauuggauccuauggauuuccuuugccauaucauguuuuuugcuuugcauugcuuuguugggguucaucaugugggccugccaaaaaggcaacauuaggugcaacauuugcauuuga

SEQ ID NO: 34576 - RNA, 1701 nt, Artificial Sequence
  derived and/or modified CDS sequence (wt) from hemagglutinin__InfluenzaA__ACN33211
augaagacuaucauugcuuugagcuacauucuaugucugguuuucgcucaaaaacuuccuggaaaugacaacagcacggcaacgcugugccuugggcaccaugcaguaccaaacggaacgauagugaaaacaaucacgaaugaccaaauugaaguuacuaaugcuacugagcugguucagaguuccucaacaggugaaauaugcgacaguccucaucagauccuugauggagaaaacugcacacuaauagaugcucuauugggagacccucagugugauggcuuccaaaauaagaaaugggaccuuuuuguugaacgcagcaaagccuacagcaacuguuacccuuaugaugugccggauuaugccucccuuaggucacuaguugccucauccggcacacuggaguuuaacaaugaaagcuucaauuggacuggagucacucaaaacggaacaagcucugcuugcauaaggagaucuaauaacaguuucuuuaguagauugaauugguugacccacuuaaaauucaaauacccagcauugaacgugacuaugccaaacaaugaacaauuugacaaauuguacauuugggggguucaccacccggguacggacaaugaccaaaucuuccuguaugcucaagcaucagggagaaucacagucucuaccaaaagaagccaacaaacuguaaucccgaauaucggaucuagacccagaguaaggaauaucccuagcagaauaagcaucuauuggacaauaguaaaaccgggagacauacuuuugauuaacagcacagggaaucuaauugcuccuagggguuacuucaaaauacgaagugggaaaagcucaauaaugagaucagaugcacccauuggcaaaugcaauucugaaugcaucacuccaaauggaagcauucccaaugacaaaccauuccaaaauguaaacagaaucacauacggggccugucccagauauguuaagcaaaacacucugaaauuggcaacagggaugcgaaauguaccagagaaacaaacuagaggcauauuuggcgcaaucgcggguuucauagaaaaugguugggagggaaugguggaugguugguacgguuucaggcaucaaaauucugagggaagaggacaagcagcagaucucaaaagcacucaagcagcaaucgaucaaaucaaugggaagcugaauagauugaucgggaaaaccaacgagaaauuccaucagauugaaaaagaauucucagaagucgaagggagaauucaggaccuugagaaauauguugaggacacuaaaauagaucucuggucauacaacgcggagcuucuuguugcccuggagaaccaacauacaauugaucuaacugacucagaaaugaacaaacuguuugaaaaaacaaagaagcaacugagggaaaaugcugaggauaugggcaaugguuguuucaaaauauaccacaaaugugacaaugccugcauaggaucaaucagaaauggaacuuaugaccacgauguauacagagaugaagcauuaagcaaccgguuccagaucaagggaguugagcugaagucaggguacaaagauuggauccuauggauuuccuuugccauaucauguuuuuugcuuuguguugcuuuguugggguucaucaugugggccugccaaaaaggcaacauuaggugcaacauuugcauuuga

SEQ ID NO: 34577 - RNA, 1698 nt, Artificial Sequence; identical to SEQ ID NO: 34085
  derived and/or modified CDS sequence (wt) from hemagglutinin__InfluenzaA__ACN42981

SEQ ID NO: 34578 - RNA, 1698 nt, Artificial Sequence; identical to SEQ ID NO: 34202
  derived and/or modified CDS sequence (wt) from hemagglutinin__InfluenzaA__ACN42992

SEQ ID NO: 34579 - RNA, 1701 nt, Artificial Sequence
  derived and/or modified CDS sequence (wt) from hemagglutinin__InfluenzaA__ACN43003
augaagacuaucauugcuuugagcuacauucuaugucugguuuucgcucaaaaacuuccuggaaaugacaacagcacggcaacgcugugccuugggcaccaugcaguaccaaacggaacgauagugaaaacaaucacgaaugaccaaauugaaguuacuaaugcuacugagcugguucagaguuccucaacaggugaaauaugcgacaguccucaucagauccuugauggagaaaacugcacacuaauagaugcucuauugggagacccucagugugauggcuuccaaaauaagaaaugggaccuuuuuguugaacgcagcaaagccuacagcaacuguuacccuuaugaugugccggauuaugccucccuuaggucacuaguugccucauccggcacacuggaguuuaacaaugaaagcuucaauuggacuggagucacucaaaacggaacaagcucugcuugcauaaggagaucuaauaacaguuucuuuaguagauugaauugguugacccacuuaaaauucaaauacccagcauugaacgugacuaugccaaacaaugaacaauuugacaaauuguacauuugggggguucaccacccggguacggacaaugaccaaaucuuccuguaugcucaagcaucaggaagaaucacagucucuaccaaaagaagccaacaaacuguaaucccgaauaucggaucuagacccagaguaaggaauaucccuagcagaauaagcaucuauuggacaauaguaaaaccgggagacauacuuuugauuaacagcacagggaaucuaauugcuccuagggguuacuucaaaauacgaagugggaaaagcucaauaaugagaucagaugcacccauuggcaaaugcaauucugaaugcaucacuccaaauggaagcauucccaaugacaaaccauuccaaaauguaaacaggaucacauacggggccugucccagauauguuaagcaaaacacucugaaauuggcaacagggaugcgaaauguaccagagaaacaaacuagaggcauauuuggcgcaaucgcggguuucauagaaaaugguugggagggaaugguggaugguugguacgguuucaggcaucaaaauucugagggaagaggacaagcagcagaucucaaaagcacucaagcagcaaucgaucaaaucaaugggaagcugaauagauugaucgggaaaaccaacgagaaauuccaucagauugaaaaagaauucucagaagucgaagggagaauucaggaccuugagaaauauguugaggacacuaaaauagaucucuggucauacaacgcggagcuucuuguugcccuggagaaccaacauacaauugaucuaacugacucagaaaugaacaaacuguuugaaaaaacaaagaagcaacugagggaaaaugcugaggauaugggcaaugguuguuucaaaauauaccacaaaugugacaaugccugcauaggaucaaucagaaauggaacuuaugaccacgauguauacagagaugaagcauuaaacaaccgguuccagaucaagggaguugagcugaagucaggguacaaagauuggauacuauggauuuccuuugccauaucauguuuuuugcuuuguguugcuuuguugggguucaucaugugggccugccaaaaaggcaacauuaggugcaacauuugcauuuga

SEQ ID NO: 34580 - RNA, 1701 nt, Artificial Sequence
  derived and/or modified CDS sequence (wt) from hemagglutinin__InfluenzaA__ACN43014
augaagacuaucauugcuuugagcuacauucuaugucugguuuucgcucaaaaauuuccuggaaaugacaacagcacggcaacgcugugccuugggcaccaugcaguaccaaacggaacgauagugaaaacaaucacgaaugaccaaauugaaguuacuaaugcuacugagcugguucagaguuccucaacaggugaaauaugcgacaguccucaucagauccuugauggagaaaacugcacacuaauagaugcucuauugggagacccucagugugauggcuuccaaaauaagaauugggaccuuuuuguugaacgcagcaaagccuacagcaacuguuacccuuaugaugugccggauuaugccucccuuaggucacuaguugccucauccggcacacuggaguuuaacaaugaaagcuuuaauuggauuggagucacucaaaacggaacaagcucugcuugcauaaggagaucuaauaacaguuucuuuaguagauugaauugguugacccacucaaaauucaaauacccagcauugaacgugacuaugccaaacaaugaaaauuuugacaaauuguacauuugggggguucaccacccggguacggacaaugaccaaaucuuccuguaugcucaagcaucaggaagaaucacagucucuaccaaaagaagucaacaaacuguaaucccgaauaucggaucuagacccagaguaaggaauaucccuagcagaauaagcaucuauuggacaauaguaaaaccgggagacauacuuuugauuaacagcacagggaaucuaauugcuccuagggguuacuucaaaauacgaagugggaaaagcucaauaaugagaucagaugcacccauuggcaacugcaauucugaaugcaucacuccaaauggaagcauucccaaugacaaaccauuccaaaauguaaacaggaucacauacggguccugucccagauauguuaagcaaaacacucugaaauuggcaacagggaugcgaaauguaccagagaaacaaacuagaggcauauuuggcgcaaucgcugguuucauagaaaaugguugggagggaaugguggaugguugguacgguuucaggcaucaaaauucugagggaauaggacaagcagcugaucucaaaagcacucaagcagcaaucgaucaaaucaaugggaagcugaauagguugaucgggaaaaccaacgagaaauuccaucagauugaaaaagaauucucagaagucgaagggagaauucaggaccuugagaaauauguugaggacaccaaaauagaucucuggucauacaacgcggagcuucuuguugcccuggagaaccaacauacaauugaucuaacugauucagaaaugaacaaacuguuugaaaaaacaaagaagcaacugagggaaaaugcugaggauaugggcaaugguuguuucaaaaucuaccacaaaugugacaaugccugcauaggaucaaucagaaauggaacuuaugaccacgaugucuacagagaugaagcauuaaacaaccgguuccagaucaagggcguugagcugaagucaggauacaaagauuggauccuauggauuuccuuugccauaucauguuuuuugcuuugcauugcuuuguugggguucaucaugugggccugccaaaaaggcaacauuaggugcaacauuugcauuuga

SEQ ID NO: 34581 - RNA, 1701 nt, Artificial Sequence
  derived and/or modified CDS sequence (wt) from hemagglutinin__InfluenzaA__ACN43025
augaagacuaucauugcuuugagcuacauucuaugucugguuuucgcucaaaaacuuccuggaaaugacaacagcacggcaacgcugugccuugggcaccaugcaguaccaaacggaacgauagugaaaacaaucacgaaugaccaaauugaaguuacuaaugcuacugagcugguucagaguuccucaacaggugaaauaugcgacaguccucaucagauccuugauggagaaaacugcacacuaauagaugcucuauugggagacccucagugugauggcuuccaaaauaagaaaugggaccuuuuuguugaacgcagcaaagccuacagcaacuguuacccuuaugaugugccggauuaugccucccuuaggucacuaguugccucauccggcacacuggaguuuaacaaugaaagcuucaauuggacuggagucacucaaaacggaacaagcucugcuugcauaaggagaucuaauaacaguuucuuuaguagauugaauugguugacccacuuaaaauucaaauacccagcauugaacgugacuaugccaaacaaugaacaauuugacaaauuguacauuugggggguucaccacccggguacggacaaugaccaaaucuuccuguaugcucaagcaucaggaagaaucacagucucuaccaaaagaagccaacaaacuguaaucccgaauaucggaucuagacccagaguaaggaauaucccuagcagaauaagcaucuauuggacaauaguaaaaccgggagacauacuuuugauuaacagcacagggaaucuaauugcuccuagggguuacuucaaaauacgaagugggaaaagcucaauaaugagaucagaugcacccauuggcaaaugcaauucugaaugcaucacuccaaauggaagcauucccaaugacaaaccauuccaaaauguaaacaggaucacauacggggccugucccagauauguuaagcaaaacacucugaaauuggcaacagggaugcgaaauguaccagagaaacaaacuagaggcauauuuggcgcaaucgcggguuucauagaaaaugguugggagggaaugguggaugguugguacgguuucaggcaucaaaauucugagggaagaggacaagcagcagaucucaaaagcacucaagcagcaaucgaucaaaucaaugggaagcugaauagauugaucgggaaaaccaacgagaaauuccaucagauugaaaaagaauucucagaagucgaagggagaauucaggaccuugagaaauauguugaggacacuaaaauagaucucuggucauacaacgcggagcuucuuguugccuuggagaaccaacauacaauugaucuaacugacucagaaaugaacaaacuguuugaaaaaacaaagaagcaacugagggaaaaugcugaggauaugggcaaugguuguuucaaaauauaccacaaaugugacaaugccugcauaggaucaaucagaaauggaacuuaugaccacgauguauacagagaugaagcauuaaacaaccgguuccagaucaagggaguugagcugaagucaggguacaaagauuggauccuauggauuuccuuugccauaucauguuuuuugcuuuguguugcuuuguugggguucaucaugugggccugccaaaaaggcaacauuaggugcaacauuugcauuuga

SEQ ID NO: 34582 - RNA, 1701 nt, Artificial Sequence
  derived and/or modified CDS sequence (wt) from hemagglutinin__InfluenzaA__ACN43036
augaagacuaucauugcuuugagcuacauucuaugucugguuuucgcucaaaaacuuccuggaaaugacaacagcacggcaacgcugugccuugggcaccaugcaguaccaaacggaacgauagugaaaacaaucacgaaugaccaaauugaaguuacuaaugcuacugagcugguucagaguuccucaacaggugaaauaugcgacaguccucaucagauccuugauggagaaaacugcacacuaauagaugcucuauugggagacccucagugugauggcuuccaaaauaagaaaugggaccuuuuuguugaacgcagcaaagccuacagcaacuguuacccuuaugaugugccggauuaugccucccuuaggucacuaguugccucauccggcacacuggaguuuaacaaugaaagcuucaauuggacuggagucacucaaaacggaacaagcucugcuugcauaaggagaucuaauaacaguuucuuuaguagauugaauugguugacccacuuaaaauucaaauacccagcauugaacgugacuaugccaaacaaugaacaauuugacaaauuguacauuugggggguucaccacccggguacggacaaugaccaaaucuuccuguacgcucaagcaucaggaagaaucacagucucuaccaaaagaagccaacaaacuguaaucccgaauaucggaucuagacccagaguaaggaauaucccuagcagaauaagcaucuauuggacaauaguaaaaccgggagacauacuuuugauuaacagcacagggaaucuaauugcuccuagggguuacuucaaaauacgaagugggaaaagcucaauaaugagaucagaugcacccauuggcaaaugcaauucugaaugcaucacuccaaauggaagcauucccaaugacaaaccauuccaaaauguaaacaggaucacauacggggccugucccagauauguuaagcaaaacacucugaaauuggcaacagggaugcgaaauguaccagagaaacaaacuagaggcauauuuggcgcaaucgcggguuucauagaaaaugguugggagggaaugguggaugguugguacgguuucaggcaucaaaauucugagggaagaggacaagcagcagaucucaaaagcacucaagcagcaaucgaucaaaucaaugggaagcugaauagauugaucgggaaaaccaacgagaaauuccaucagauugaaaaagaauucucagaagucgaagggagaauucaggaccuugagaaauauguugaggacacuaaaauagaucucuggucauacaacgcggagcuucuuguugcccuggagaaccaacauacaauugaucuaacugacucagaaaugaacaaacuguuugaaaaaacaaagaagcaacugagggaaaaugcugaggauaugggcaaugguuguuucaaaauauaccacaaaugugacaaugccugcauaggaucaaucagaaauggaacuuaugaccacgauguauacagagaugaagcauuaaacaaccgguuccagaucaagggaguugagcugaagucaggguacaaagauuggauccuauggauuuccuuugccauaucauguuuuuugcuuuguguugcuuuguugggguucaucaugugggccugccaaaaaggcaacauuaggugcaacauuugcauuuga

SEQ ID NO: 34583 - RNA, 1701 nt, Artificial Sequence
  derived and/or modified CDS sequence (wt) from hemagglutinin__InfluenzaA__ACN43047
augaagacuaucauugcuuugagcuacauucuaugucugguuuucgcucaaaaacuuccuggaaaugacaacagcacggcaacgcugugccuugggcaccaugcaguaccaaacggaacgauagugaaaacaaucacgaaugaccaaauugaaguuacuaaugcuacugagcugguucagaguuccucaacaggugaaauaugcgacaguccucaucagauccuugauggagaaaacugcacacuaauagaugcucuauugggagacccucagugugauggcuuccaaaauaagaaaugggaccuuuuuguugaacgcagcaaagccuacagcaacuguuacccuuaugaugugccggauuaugccucccuuaggucacuaguugccucauccggcacacuggaguuuaacaaugaaagcuucaauuggacuggggucacucaaaacggaacaagcucugcuugcauaaggagaucuaauaacaguuucuuuaguagauugaauugguugacccacuuaaaauucaaauacccagcauugaacgugacuaugccaaacaaugaacaauuugacaaauuguacauuugggggguucaccacccggguacggacaaugaccaaaucuuccuguaugcucaagcaucaggaagaaucacagucucuaccaaaagaagccaacaaacuguaaucccgaauaucggaucuagacccagaguaaggaauaucccuagcagaauaagcaucuauuggacaauaguaaaaccgggagacauacuuuugauuaacagcacagggaaucuaauugcuccuagggguuacuucaaaauacgaagugggaaaagcucaauaaugagaucagaugcacccauuggcaaaugcaauucugaaugcaucacuccaaauggaagcauucccaaugacaaaccauuccaaaauguaaacaggaucacauacggggccugucccagauauguuaagcaaaacacucugaaauuggcaacagggaugcgaaauguaccagagaaacaaacuagaggcauauuuggcgcaaucgcggguuucauagaaaaugguugggagggaaugguggaugguugguacgguuucaggcaucaaaauucugagggaagaggacaagcagcagaucucaaaagcacucaagcagcaaucgaucaaaucaaugggaagcugaauagauugaucgggaaaaccaacgagaaauuccaucagauugaaaaagaauucucagaagucgaagggagaauucaggaccuugagaaauauguugaggacacuaaaauagaucucuggucauacaacgcggagcuucuuguugcccuggagaaccaacauacaauugaucuaacugacucagaaaugaacaaacuguuugaaaaaacaaagaagcaacugagggaaaaugcugaggauaugggcaaugguuguuucaaaauauaccacaaaugugacaaugccugcauaggaucaaucagaaauggaacuuaugaccacgauguauacagagaugaagcauuaaacaaccgguuccagaucaagggaguugagcugaagucaggauacaaagauuggauccuauggauuuccuuugccauaucauguuuuuugcuuuguguugcuuuguugggguucaucaugugggccugccaaaaaggcaacauuaggugcaacauuugcauuuga

SEQ ID NO: 34584 - RNA, 1701 nt, Artificial Sequence
  derived and/or modified CDS sequence (wt) from hemagglutinin__InfluenzaA__ACN43058
augaagacuaucauugcuuugagcuacauucuaugucugguuuucgcucaaaaacuuccuggaaaugacaacagcacggcaacgcugugccuugggcaccaugcaguaccaaacggaacgauagugaaaacaaucacgaaugaccaaauugaaguuacuaaugcuacugagcugguucagaguuccucaacaggugaaauaugcggcaguccucaucagauccuugauggagaaaacugcacacuaauagaugcucuauugggagacccucagugugauggcuuccaaaauaagaaaugggaccuuuuuguugaacgcagcaaagccuacagcaacuguuacccuuaugaugugccggauuaugccucccuuaggucacuaguugccucauccggcacacuggaguuuaacaaugaaagcuucaauuggacuggagucacucaaaacggaacaagcucugcuugcauaaggagaucuaauaacaguuucuuuaguagauugaauugguugacccacuuaaaauucaaauacccagcauugaacgugacuaugccaaacaaugaacaauuugacaaauuguacauuugggggguucaccacccggguacggacaaugaccaaaucuuccuguaugcucaagcaucaggaagaaucacagucucuaccaaaagaagccaacaaacuguaaucccgaauaucggaucuagacccagaguaaggaauaucccuagcagaauaagcaucuauuggacaauaguaaaaccgggagacauacuuuugauuaacagcacagggaaucuaauugcuccuagggguuacuucaaaauacgaagugggaaaagcucaauaaugagaucagaugcacccauuggcaaaugcaauucugaaugcaucacuccaaauggaagcauucccaaugacaaaccauuccaaaauguaaacaggaucacauacggggccugucccagauauguuaagcaaaacacucugaaauuggcaacagggaugcgaaauguaccagagaaacaaacuagaggcauauuuggcgcaaucgcggguuucauagaaaaugguugggagggaaugguggaugguugguacgguuucaggcaucaaaauucugagggaagaggacaagcagcagaucucaaaagcacucaagcagcaaucgaucaaaucaaugggaagcugaauagauugaucgggaaaaccaacgagaaauuccaucagauugaaaaagaauucucagaagucgaagggagaauucaggaccuugagaaauauguugaggacacuaaaauagaucucuggucauacaacgcggagcuucuuguugcccuggagaaccaacauacaauugaucuaacugacucagaaaugaacaaacuguuugaaaaaacaaagaagcaacugagggaaaaugcugaggauaugggcaaugguuguuucaaaauauaccacaaaugugacaaugccugcauaggaucaaucagaaauggaacuuaugaccacgauguauacagagaugaagcauuaaacaaccgguuccagaucaagggaguugagcugaagucaggguacaaagauuggauccuauggauuuccuuugccauaucauguuuuuugcuuuguguugcuuuguugggguucaucaugugggccugccaaaaaggcaacauuaggugcaacauuugcauuuga

SEQ ID NO: 34585 - RNA, 1701 nt, Artificial Sequence; identical to SEQ ID NO: 34535
  derived and/or modified CDS sequence (wt) from hemagglutinin__InfluenzaA__ACN43069

SEQ ID NO: 34586 - RNA, 1701 nt, Artificial Sequence; identical to SEQ ID NO: 34569
  derived and/or modified CDS sequence (wt) from hemagglutinin__InfluenzaA__ACN43080

SEQ ID NO: 34587 - RNA, 1701 nt, Artificial Sequence
  derived and/or modified CDS sequence (wt) from hemagglutinin__InfluenzaA__ACN72617
auggaagcaaaauuguuuguauuauucugugcauucacugcauugaaagcugacaccauuuguguaggcuaucaugcuaacaauuccacagacacugucgacacaauacuggagaagaaugugacuguuacccauucaguuaauuuacuagaaaacagccacaaugggaaacucugcagccugaauggaaaggcccccuuacaacuggggaauugcaacguagcaggauggauccuuggcaacccagaaugugacuugcugcucacagcgaauucguggucuuacauaauagagacuucagauucaaaaaauggagcaugcuauccuggagaauuugcugauuaugaggaauuaagggagcagcugaguacaguuucuucauuugaaagauuugaaauuuucccaaaagcaaccucauggccaaaucaugagacaaccaaagguaccacaguugcaugcucccacucuggagccaacaguuuuuaucggaacuugcuauggauaguaaaaaagggaaacuccuauccuaagcucagcaagucauacacaaacaacaaaggaaaagaagugcuuguaaucuggggagugcaucacccuccgacugauagugaucaacaaacccucuaucagaauaagcacacauauguuucaguuggaucaucaaaauacuaccaaagguucaccccagaaauaguaaccagaccaaaagucagagagcaagcgggcagaaugaacuauuauuggacacuauuagaucaaggggacaccauaaccuuugaagccacggggaauuuaauagcaccauggcaugcauuugcauugaauaagggcucuaauucuggaauuaugaugucagaugcucauguucacaauugcacuacgaagugccaaacuccucauggggcuuugaaaggcaaucuuccuuuucagaauguacaucccaucacuauuggggaaugccccaaauauguuaaaagcacccaacuaagaauggcaacaggauuaaggaauauccccucuauucaauccagaggacuuuuuggggcaauugccggauucauugaaggaggauggacaggaaugauagauggaugguaugguuaucaucaucaaaaugagcagggaucugguuacgcagcagaucggaaaaguacacaaaucgcaauugaugggaucagcaacaaaguaaacucaguaauugaaaaaaugaacauucaauuuacuucagugggcaaagaguucaauaaucuagagaaaaggauugagaauuugaauaaaaaggucgaugauggauuuuuggauguauggacuuauaacgcugaauuacucauccugcucgagaacgaaagaacccuagauuuccaugacuuuaacgugaaaaauuuauaugaaaaggucaaaucacaacugagaaacaaugccaaggaaaucgguaaugguuguuuugaguucuaucacaaaugugauaaugaaugcauggaaagcguaaagaauggcacauauaauuaucccagauauucagaagaauccaaauugaauagagaggaaauagacgguguaaaauuagaaucagugggaguucaucagauuuuggcgaucuacuccacagucgccaguucccugguauugcuagucucccugggggcaaucagcuucuggaugugcucuaaugggucauugcaaugcagaauaugcauuuaa

SEQ ID NO: 34588 - RNA, 1701 nt, Artificial Sequence
  derived and/or modified CDS sequence (wt) from hemagglutinin__InfluenzaA__ACN72632
augaagacugucauugcuuuaagcuacgucuuuugucugguuuuuggccaagaucuuccaggaaagggcaacaacacagcaacacugugccugggacaucaugcagugccaaauggaacacuagugaaaacaaucacagaugaucagaucgaaguaaccaaugcuacagaacugguccaaaauuucucaauagguaaaauaugcaagaauccucaucgaauucuugauggggcaaauugcacacugauagacucucuauugggggacccucacugugaugguuuucaaaaugagaaaugggaccuuuucauugaacgcagcaaggcuuucagcaacuguuacccuuaugaugugccggaguauaccucucuuaggucacuaauugccucgucaggcaccuuggaauuuaccaaugaagauuucaauuggacugggguuacccagaauggaggaagcagugcuugcaagagggggccuaacaacagcuuuuucaguaggcugaacugguuguacaaaucagguaacacauauccgaugcuaaauguuacuaugccaaacagugaugauuuugacaaauuguacauuugggggguucaucauccgaguaccgauagagaacagaccaaccuguauauucaagcaucagggaaaauaauagucuccacaaagagaagucaacaaaccauaaucccgaauaucgggucuagacccuggguaagggguuugucuaguaggauaagcaucuacuggacaauaguuaaaccaggagacauccugauaaucaacagcaauggaaaccuaauugcuccucgggguuacuucaaaauacagacugggaaaagcucaguaaugagaucagaugcaccuauuggcaccugcaauuaugaaugcauuacuccaaacggaagcauacccaaugacaagcccuuucaaaacguaaacaggaucacauauggggcaugcccccauuacaucaagcaaaacacucugaaguuagcaacagggaugcggaauauaccagaaagacaaacuagagguauauucggugcaauagcaggguucauagagaaugguugggaaggaauggugaacgguugguacgguuucaggcaccaaaauucugagggcauaggacaggcagcagaucuuaaaaguacccaagcagcuaucaaccaaaucaauggaaaacugaauagaguaaucgagaagacgaacgagaaauuccaucaaaucgaaaaggaguucucagaaguagaaggaagaauccaagaccucgaaagauauguugaagauacuaagauagaucuuuggucuuacaacgcggaacuucuugucgcacuagagaaucaacacacaauugaccugacugacucagaaaugaacaaacucuuugaaaaaacaagaaaacaacuaagggaaaaugcugaggacaugggaaaugguugcuucaaaauauaccacaaaugugacaacucuugcauggagucaaucagaaauggaacuuacgaccauaacgaauacagagacgaagcaguaaacaaucgauuucagaucaaaaguguugagcugaagucaggauacaaagacuggauccuguggauuuccuuugccauaucaugcuuuuugcuuugugcuguuuggcugggauucauaauaugggccugccagaaaggcaacauuaggugcaacauuugcaucuga

SEQ ID NO: 34589 - RNA, 1701 nt, Artificial Sequence
  derived and/or modified CDS sequence (wt) from hemagglutinin__InfluenzaA__ACN76478
augaagacuaucauugcuuugagcuacauucuaugucugguuuucgcucaaaaacuuccuggaaaugacaacagcacggcaacgcugugccuugggcaccaugcaguaccaaacggaacgauagugaaaacaaucacgaaugaccaaauugaaguuacuaaugcuacugagcugguucagaguuccucaacaggugaaauaugcgacaguccucaucagauccuugauggagaaaacugcacacuaauagaugcucuauugggagacccucagugugauggcuuccaaaauaagaaaugggaccuuuuuguugaacgcagcaaagccuacagcaacuguuacccuuaugaugugccggauuaugccucccuuaggucauuaguugccucauccggcacacuggaguuuaacaaugaaagcuucaauuggacuggagucacucaaaacggaacaagcucugcuugcauaaggagaucuaauaacaguuucuuuaguagauugaauugguugacccacuuaaaauucaaauacccagcauugaacgugacuaugccaaacaaugaacaauuugacaaauuguacauuugggggguucaccacccggguacggacaaugaccaaaucuuccuguaugcucaagcaucaggaagaaucacagucucuaccaaaagaagccaacaaacuguaaucccgaauaucggaucuagacccagaguaaggaauaucccuagcagaauaagcaucuauuggacaauaguaaaaccgggagacauacuuuugauuaacagcacagggaaucuaauugcuccuagggguuacuucaaaauacgaagugggaaaagcucaauaaugagaucagaugcacccauuggcaaaugcaauucugaaugcaucacuccaaauggaagcauucccaaugacaaaccauuccaaaauguaaacaggaucacauacggggccugucccagauauguuaagcaaaacacucugaaauuggcaacagggaugcgaaauguaccagagaaacaaacuagaggcauauuuggcgcaaucgcggguuuuauagaaaaugguugggagggaaugguggaugguugguacgguuucaggcaucaaaauucugagggaagaggacaagcagcagaucucaaaagcacucaagcagcaaucgaucaaaucaaugggaagcugaauagauugaucgggaaaaccaacgagaaauuccaucagauugaaaaagaauucucagaagucgaagggagaauucaggaccuugagaaauauguugaggacaccaaaauagaucucuggucauacaacgcggagcuucuuguugcccuggagaaccaacauacaauugaucuaacugacucagaaaugaacaaacuguuugaaaaaacaaagaagcaacugagggaaaaugcugaggauaugggcaaugguuguuucaaaauauaccacaaaugugacaaugccugcauaggaucaaucagaaauggaacuuaugaccacgauguauacagagaugaagcauuaaacaaccgguuccagaucaagggaguugagcugaagucaggguacaaagauuggauccuauggauuuccuuugccauaucauguuuuuugcuuuguguugcuuuguugggguucaucaugugggccugccaaaaaggcaacauuaggugcaacauuugcauuuga

SEQ ID NO: 34590 - RNA, 1701 nt, Artificial Sequence
  derived and/or modified CDS sequence (wt) from hemagglutinin__InfluenzaA__ACN76489
augaagacuaucauugcuuugggcuacauucuaugucugguuuccgcucaaaaacuuccuggaaaugacaacagcacggcaacacugugccuugggcaccaugcaguaccaaacggaacgauagugaaaacaaucacgaaugaccaaauugaaguuacuaaugcuacugagcugguucagaguuccucaacaggugaaauaugcgacaguccucaucagguccuugauggagaaaacugcacacuaauagaugcucuauugggagacccucagugugauggcuuccaaaauaagaaaugggaccuuuuuguugaacgcagcaaagccuacagcaacuguuacccuuaugaugugccggauuaugccucccuuaggucacuaguugccucaucuggcacacuggaguuuaacaaugaaagcuucaauuggacuggagucacucaaaacggaacaagcucugcuugcauaaggagaucuaauaacaguuucuuuaguagacugaauugguugacccacuuaaaauucaaauacccagcauugaacgugacuaugccaaacaaugaagaauuugacaaauuguacauuugggggguucaccacccggguacggacaaugaccaaaucuuccuguaugcucaagcaucaggaagaaucacagucucuaccaaaagaagccaacaaacuguaaucccgaauaucggaucuagacccagaguaaggaauauccccagcagaauaagcaucuauuggacaauaguaaaaccgggagacauacuuuugauuaacagcacagggaaucuaauugcuccuagggguuacuucaaaauacgaagugggaaaagcucaauaaugagaucagaugcacccauuggcaaaugcaauucugaaugcaucacuccaaauggaagcauucccaaugacaaaccauuccaaaauguaaacaggaucacauauggggccugucccagauauguuaagcaaaacacucugaaauuggcaacagggaugcgaaauguaccagagaaacaaacuagaggcauauuuggcgcaaucgcggguuucauagaaaaugguugggagggaaugguggaugguugguacggcuucaggcaucaaaauucugagggaauaggacaagcagcagaucucaaaagcacucaagcagcaaucgaucaaaucaaugggaagcugaauagguugaucgggaaaaccaacgagaaauuccaucagauugaaaaagaauucucagaagucgaagggagaauucaggaccuugagaaauauguugaggacaccaaaauagaucucuggucauacaacgcggagcuucuuguugcccuggagaaccaacauacaauugaucuaacugacucagaaaugaacaaacuguuugaaaaaacaaagaagcaacugagggaaaaugcugaggauaugggcaaugguuguuucaaaauauaccacaaaugugacaaugccugcauaggaucaaucagaaauggaacuuaugaccacgagguauacagagaugaagcauuaaacaaccgguuccagaucaagggcguugagcugaagucaggauacaaagauuggauccuauggauuuccuuugccauaucauguuuuuugcuuuguguugcuuuguugggguucaucaugugggccugccaaaaaggcaacauuaggugcaacauuugcauuuga

SEQ ID NO: 34591 - RNA, 1701 nt, Artificial Sequence
  derived and/or modified CDS sequence (wt) from hemagglutinin__InfluenzaA__ACN76500
augaagacuaucauugcuuugagcuacauucuaugucugguuuucgcucaaaaacuuccuggaaaugacaacagcacggcaacgcugugccuugggcaccaugcaguaccaaacggaacgauagugaaaacaaucacgaaugaccaaauugaaguuacuaaugcuacugagcugguucagaguuccucaacaggugaaauaugcgacaguccucaucagauccuugauggagaaaacugcacacuaauagaugcucuauugggagacccucagugugauggcuuccaaaauaagaaaugggaccuuuuuguugaacgcagcaaagccuacagcaacuguuacccuuaugaugugccggauuaugccucccuuaggucacuaguugccucauccggcacacuggaguuuaacaaugaaagcuucaauuggacuggagucacucaaaacggaacaagcucugcuugcauaaggagaucuaauaacaguuucuuuaguagauugaauugguugacccacuuaaaauucaaauacccagcauugaacgugacuaugccaaacaaugaacaauucgacaaauuguacauuugggggguucaccacccggguacggacaaugaccaaaucuuccuguaugcucaagcaucaggaagaaucacagucucuaccaaaagaagccaacaaacuguaaucccgaauaucggaucuagacccagaguaaggaauaucccuaguagaauaagcaucuauuggacaauaguaaaaccgggagacauacuuuugauuaacagcacagggaaucuaauugcuccuagggguuacuucaaaauacgaagugggaaaagcucaauaaugagaucagaugcacccauuggcaaaugcaauucugaaugcaucacuccaaauggaagcauucccaaugacaaaccauuccaaaauguaaacaggaucacauacggggccugucccagauauguuaagcaaaacacucugaaauuggcaacagggaugcgaaauguaccagagaaacaaacuagaggcauauuuggcgcaaucgcggguuucauagaaaaugguugggagggaaugguggaugguugguacgguuucaggcaucaaaauucugagggaagaggacaagcagcagaucucaaaagcacucaagcagcaaucgaucaaaucaaugggaagcugaauagauugaucgggaaaaccaacgagaaauuccaucagauugaaaaagaauucucagaagucgaagggagaauucaggaccuugagaaauauguugaggacaccaaaauagaucucuggucauacaacgcggagcuucuuguugcccuggagaaccaacauacaauugaucuaacugacucagaaaugaacaaacuguuugaaaaaacaaagaagcaacugagggaaaaugcugaggauaugggcaaugguuguuucaaaauauaccacaaaugugacaaugccugcauaggaucaaucagaaauggaacuuaugaccacgauguauacagagaugaagcauuaaacaaccgguuccagaucaagggaguugagcugaagucaggguacaaagauuggauccuauggauuuccuuugccauaucauguuuuuugcuuuguguugcuuuguugggguucaucaugugggccugccaaaaaggcaacauuaggugcaacauuugcauuuga

SEQ ID NO: 34592 - RNA, 1701 nt, Artificial Sequence; identical to SEQ ID NO: 34553
  derived and/or modified CDS sequence (wt) from hemagglutinin__InfluenzaA__ACN76511

SEQ ID NO: 34593 - RNA, 1701 nt, Artificial Sequence; identical to SEQ ID NO: 34529
  derived and/or modified CDS sequence (wt) from hemagglutinin__InfluenzaA__ACN76522

SEQ ID NO: 34594 - RNA, 1701 nt, Artificial Sequence; identical to SEQ ID NO: 34446
  derived and/or modified CDS sequence (wt) from hemagglutinin__InfluenzaA__ACO36331

SEQ ID NO: 34595 - RNA, 1701 nt, Artificial Sequence
  derived and/or modified CDS sequence (wt) from hemagglutinin__InfluenzaA__ACO36342
augaagacuaucauugcuuugagcuacauucuaugucugguuuucgcucaaaaauuuccuggaaaugacaacagcacggcaacgcugugccuugggcaccaugcaguaccaaacggaacgauagugaaaacaaucacgaaugaccaaauugaaguuacuaaugcuacugagcugguucagaguuccucaacaggugaaauaugcgacaguccucaucagauccuugauggagaaaacugcacacuaauagaugcucuauugggagacccucagugugauggcuuccaaaauaagaauugggaccuuuuuguugaacgcagcaaagccuacagcaacuguuacccuuaugaugugccggauuaugccucccuuaggucacuaguugccucauccggcacacuggaguuuaacaaugaaagcuucaauuggacuggagucacucaaaacggaacaagcucugcuugcauaaggagaucuaauaacaguuucuuuaguagauugaauugguugacccacucaaaauucaaauacccagcauugaacgugacuaugccaaacaaugaaaauuuugacaaauuguacauuugggggguucaccacccggguacggacaaugaccaaaucuuccuguaugcucaagcaucaggaagaaucacagucucuaccaaaagaagccaacaaacuguaaucccgaauaucggaucuagacccagaguaaggaauaucccaagcagaauaagcaucuauuggacaauaguaaaaccgggagacauacuuuugauuaacagcacagggaaucuaauugcuccuagggguuacuucaaaauacgaagugggaaaagcucaauaaugagaucagaugcacccauuggcaaaugcaauucugaaugcaucacuccaaauggaagcauucccaaugacaaaccauuccaaaauguaaacaggaucacauacggggccugucccagauauguuaagcaaaacacucugaaauuggcaacagggaugcgaaauguaccagagaaacaaacuagaggcauauuuggcgcaaucgcugguuucauagaaaaugguugggagggaaugguggaugguugguacgguuucaggcaucaaaauucugagggaauaggacaagcagcagaucucaaaagcacucaagcagcaaucgaucaaaucaaugggaagcugaauagguugaucgggaaaaccaacgagaaauuccaucagauugaaaaagaauucucagaaaucgaagggagaauucaggaccuugagaaauauguugaggacaccaagauagaucucuggucauacaacgcggagcuucuuguugcccuggagaaccaacauacaauugaucuaacugauucagaaaugaacaaacuguuugaaaaaacaaagaagcaacugagggaaaaugcugaggauaugggcaaugguuguuucaaaaucuaccacaaaugugacaaugccugcauaggaucaaucagaaauggaacuuaugaccacgaugucuacagagaugaagcuuuaaacaaccgguuccagaucaagggcguugagcugaagucaggauacaaagauuggauccuauggauuuccuuugccauaucauguuuuuugcuuugcauugcuuuguugggguucaucaugugggccugccaaaaaggcaacauuaggugcaacauuugcauuuga

SEQ ID NO: 34596 - RNA, 1701 nt, Artificial Sequence
  derived and/or modified CDS sequence (wt) from hemagglutinin__InfluenzaA__ACO36364
augaagacuaucauugcuuugagcuacauucuaugucugguuuucgcucaaaaacuuccuggaaaugacaacagcacggcaacgcugugccuugggcaccaugcaguaccaaacggaacgauagugaaaacaaucacgaaugaccaaauugaaguuacuaaugcuacugagcugguucagaguuccucaacaggugaaauaugcgacaguccucaucagauccuugauggagaaaacugcacacuaauagaugcucuauugggagacccucagugugauggcuuccaaaauaagaaaugggaccuuuuuguugaacgcagcaaagccuacagcaacuguuacccuuaugaugugccggauuaugccucccuuaggucacuaguugccucauccggcacacuggaguuuaacaaugaaagcuucaauuggacuggagucacucaaaacggaacaagcucugcuugcauaaggagaucuaauaacaguuucuuuaguagauugaauugguugacccacuuaaaauucaaauacccagcauugaacgugacuaugccaaacaaugaaaaauuugacaaauuguauauuugggggguucaccacccggguacggacaaugaccaaaucuuccuguaugcucaagcaucaggaagaaucacagucucuaccaaaagaagccaacaaacuguaaucccgaauaucggaucuagacccagaguaaggaauauccccagcagaauaagcaucuauuggacaauaguaaaaccgggagacauacuuuugauuaacagcacagggaaucuaauugcuccuagggguuacuucaaaauacgaagugggaaaagcucaauaaugagaucagaugcacccauuggcaaaugcaauucugaaugcaucacuccaaauggaagcauucccaaugacaaaccauuccaaaauguaaacaggaucacauacggggccugucccagauauguuaagcaaaacacucugaaauuggcaacagggaugcgaaauguaccagagaaacaaacuagaggcauauuuggcgcaaucgcggguuucauagaaaaugguugggagggaaugguggaugguugguacgguuucaggcaucaaaauucugagggaacaggacaagcagcagaucucaaaagcacucaagcagcaaucgaucaaaucaaugggaagcugaauagguugaucgggaaaaccaacgagaaauuccaucagauugaaaaagaauucucagaagucgaagggaggauucaggaccuugagaaauauguugaggacaccaaaauagaucucuggucauacaacgcggagcuucuuguugcccuggagaaccaacauacaauugaucuaacugacucagaaaugaacaaacuguuugaaaaaacaaagaagcaacugagggaaaaugcugaggauaugggcaaugguuguuucaaaauauaccacaaaugugacaaugccugcauaggaucaaucagaaauggaacuuaugaccacgauguauacagagaugaagcauuaaacaaccgguuccagaucaagggcguugagcugaagucaggauacaaagauuggauccuauggauuuccuuugccauaucauguuuuuugcuuuguguugcuuuguugggguucaucaugugggccugccaaaaaggcaacauuaggugcaacauuugcauuuga

SEQ ID NO: 34597 - RNA, 1701 nt, Artificial Sequence; identical to SEQ ID NO: 34314
  derived and/or modified CDS sequence (wt) from hemagglutinin__InfluenzaA__ACO36375

SEQ ID NO: 34598 - RNA, 1698 nt, Artificial Sequence
  derived and/or modified CDS sequence (wt) from hemagglutinin__InfluenzaA__ACO36397
augaaaguaaaacuacugguccuguuaugcacauuuacagcuacauaugcagacacaauauguauaggcuaccaugcuaacaacucgaccgacacuguugacacaguacuugaaaagaaugugacagugacacacucugucaaccugcuugagaacagucacaauggaaaacuaugucuauuaaaaggaauagccccacuacaauuggguaacugcagcguugccggguggaucuuaggaaacccagaaugcgaauuacugauuuccaaggagucaugguccuacauuguagaaaaaccaaauccugagaauggaacauguuacccagggcauuucgcugacuaugaggaacugagggagcaauugaguucaguaucuucauuugagagguucgaaauauuccccaaagaaagcucauggcccaaccacaccguaaccggagugucagcaucaugcucccauaauggggaaaguaguuuuuacagaaauuugcuauggcugacggggaagaaugguuuguacccaaaccugagcaaguccuaugcaaacaacaaagaaaaagaaguccuuguacuaugggguguucaucacccgccaaacauaggugaccaaaaggcccucuaucauacagaaaaugcuuauguuucuguagugucuucacauuauagcagaaaauucaccccagaaauagccaaaagacccaaaguaagagaucaagaaggaagaaucaacuacuacuggacucugcuugaacccggggauacaauaauauuugaggcaaauggaaaucuaauagcgccaagauaugcuuucgcacugaguagaggcuuuggaucaggaaucaucaacucaaaugcaccaauggauaaaugugaugcgaagugccaaacaccucagggagcuauaaacagcagucuuccuuuccagaacguacacccagucacaauaggagaguguccaaaguaugucaggagugcaaaauuaaggaugguuacaggacuaaggaacaucccauccauucaaucuagagguuuguuuggagccauugccgguuucauugaagggggauggacuggaaugguagaugguugguaugguuaucaucaucagaaugagcaaggaucuggcuaugcugcagaucaaaaaagcacacaaaaugccauuaaugggauuacaaacaaggugaauucuguaauugagaaaaugaacacucaauucacagccgugggcaaagaauucaacaaauuggaaagaaggauggaaaacuugaauaaaaaaguugaugauggguuuauagacaucuggacauauaaugcagaacuguugguucuacuggaaaaugaaaggacuuuggauuuccaugacuccaaugugaagaaucuguaugagaaaguaaaaagccaguuaaagaauaaugcuaaagaaauaggaaauggguguuuugaauucuaucacaaguguaacgaugaaugcauggagaguguaaagaauggaacuuaugacuauccaaaauauuccgaagaaucuaaguuaaacagggagaaaauugauggagugaaauuggaaucaaugggagucuaucagauuuuggcgaucuacucaacagucgccaguucucugguucuuuuggucucccugggggcaaucagcuucuggauguguuccaaugggucuuugcaguguagaauaugcaucuaa

SEQ ID NO: 34599 - RNA, 1701 nt, Artificial Sequence; identical to SEQ ID NO: 34313
  derived and/or modified CDS sequence (wt) from hemagglutinin__InfluenzaA__ACO36408

SEQ ID NO: 34600 - RNA, 1701 nt, Artificial Sequence; identical to SEQ ID NO: 34316
  derived and/or modified CDS sequence (wt) from hemagglutinin__InfluenzaA__ACO36419

SEQ ID NO: 34601 - RNA, 1701 nt, Artificial Sequence; identical to SEQ ID NO: 34316
  derived and/or modified CDS sequence (wt) from hemagglutinin__InfluenzaA__ACO36430

SEQ ID NO: 34602 - RNA, 1701 nt, Artificial Sequence
  derived and/or modified CDS sequence (wt) from hemagglutinin__InfluenzaA__ACO36441
augaagacuaucauugcuuugagcuacauucuaugucugguuuucgcucaaaaacuucccggaaaugacaacagcacggcaacgcugugccuugggcaccaugcaguaccaaacggaacgauagugaaaacaaucacgaaugaccaaauugaaguuacuaaugcuacugagcugguucagaguuccucaacagguggaauaugcgacaguccucaucagauccuugauggagaaaacugcacacuaauagaugcucuauugggagacccucagugugauggcuuccaaaauaagaaaugggaccuuuuuguugaacgcagcaaagccuacagcaacuguuacccuuaugaugugccggauuaugccucccuuaggucacuaguugccucauccggcacacuggaguuuaacaaugaaagcuucgauuggacuggagucacucagaauggaacaagcucugcuugcaaaaggagaucuaauaaaaguuucuuuaguagauugaauugguugacccacuuaaaauacaaauacccagcauugaacgugacuaugccaaacaaugaaaaauuugacaaauuguacauuugggggguucaccacccggguacggacagugaccaaaucagccuauaugcucaagcaucaggaagaaucacagucucuaccaaaagaagccaacaaacuguaaucccgaauaucggaucuagacccaggguaagggaugucuccagccgaauaagcaucuauuggacaauaguaaaaccgggagacauacuuuugauuaacagcacagggaaucuaauugcuccucgggguuacuucaaaauacgaagugggaaaagcucaauaaugagaucagaugcacccauuggcaaaugcaauucugaaugcaucacuccaaauggaagcauucccaaugacaaaccauuucaaaauguaaacaggaucacauauggggccugucccagauauguuaagcaaaacacucugaaauuggcaacagggaugcgaaauguaccagagaaacaaacuagaggcauauuuggcgcaaucgcggguuucauagaaaaugguugggagggaaugguggacgguugguacgguuucaggcaucaaaauucugagggcacaggacaagcagcagaucucaaaagcacucaagcagcaaucaaccaaaucaaugggaaacugaauagguuaaucgggaaaacaaacgagaaauuccaucagauugaaaaagaauucucagaaguagaagggagaauucaggaccucgagaaauauguugaggacacuaaaauagaucucuggucauacaacgcggagcuucuuguugcccuggagaaccaacauacaauugaucuaacugacucagaaaugaacaaacuguuugaaagaacaaagaagcaacugagggaaaaugcugaggauaugggcaaugguuguuucaaaauauaccacaaaugugacaaugccugcauagggucaaucagaaauggaacuuaugaccaugauguguacagagaugaagcauugaacaaccgguuccagaucaaagguguugagcugaagucuggauacaaagauuggauccuauggauuuccuuugccauaucauguuuuuugcuuuguguugcuuuguugggguucaucaugugggccugccaaaaaggcaacauuaggugcgacauuugcauuuga

SEQ ID NO: 34603 - RNA, 1701 nt, Artificial Sequence
  derived and/or modified CDS sequence (wt) from hemagglutinin__InfluenzaA__ACO36452
augaagacuaucauugcuuugagcuacauccuaugucugguuuucgcucaaaaacuucccggaaaugacaacagcacggcaacgcugugccuugggcaccaugcaguaccaaacggaacgauagugaaaacaaucacgaaugaccaaauugaaguuacuaaugcuacugagcugguucagaguuccucaacagguggaauaugcgacaguccucaucagauccuugauggagaaaacugcacacuaauagaugcucuauugggagacccucagugugauggcuuccaaaauaagaaaugggaccuuuuuguugaacgcagcaaagccuacagcaacuguuacccuuaugaugugccggauuaugccucccuuaggucacuaguugccucauccggcacacuggaguuuaacaaugaaagcuucgauuggacuggagucacucagaauggaacaagcucuucuugcaaaaggagaucuaauaacaguuucuuuaguagauugaauugguugacccacuuaaaauacaaauacccagcauugaacgugacuaugccaaacaaugaaaaauuugacaaauuguacauuugggggguucaccacccggguacggacagugaccaaaucagccuauaugcucaagcaucaggaagaaucacaaucucuaccaaaagaagccaacaaacuguaaucccgaauaucggaucuagacccaggguaagggaugucuccagccggauaagcaucuauuggacaauaguaaaaccgggagacauacuuuugauuaacagcacagggaaucuaauagcuccucgggguuacuucaaaauacgaagugggaaaagcucaauaaugagaucagaugcacccauuggcaaaugcaauucugaaugcaucacuccaaauggaagcauucccaaugacaaaccauuucaaaauguaaacaggaucacauauggggccugucccagauauguuaagcaaaacacucugaaauuggcaacagggaugcgaaauguaccagagaaacaaacuagaggcauauuuggcgcaaucgcggguuucauagaaaaugguugggagggaaugguggacgguugguacgguuucaggcaucaaaauucugagggcacaggacaagcagcagaucucaaaagcacucaagcagcaaucaaccaaaucaaugggaaacugaauagguuaauagggaaaacaaacgagaaauuccaucagauugaaaaagaauucucggaaguagaagggagaauucaggaccucgagaaauauguugaggacacuaaaauagaucucuggucauacaacgcggagcuucuuguugcccuggagaaccaacauacaauugaucuaacugacucagaaaugaacaaacuguuugaaagaacaaagaagcaacugagggaaaaugcugaggauaugggcaaugguuguuucaaaauauaccacaaaugugacaaugccugcauagggucaaucagaaauggaacuuaugaccaugauguguacagagaugaagcauuaaacaaccgguuccagaucaaagguguugagcugaagucaggauacaaagauuggauccuauggauuuccuuugccauaucauguuuuuugcuuuguguugcuuuguugggguucaucaugugggccugccaaaaaggcaacauuaggugcaacauuugcauuuga

SEQ ID NO: 34604 - RNA, 1701 nt, Artificial Sequence
  derived and/or modified CDS sequence (wt) from hemagglutinin__InfluenzaA__ACO36463
augaagacuaucauugcuuugagcuacauucuaugucugguuuucgcucaaaaacuucccggaaaugacaacagcacggcaacgcugugccuugggcaccaugcaguaccaaacggaacgauagugaaaacaaucacgaaugaccaaauugaaguuacuaaugcuacugagcugguucagaguuccucaacagguggaauaugcgacaguccucaucagauccuugauggagaaaacugcacacuaauagaugcucuauugggagacccucagugugauggcuuccaaaauaagaaaugggaccuuuuuauugaacgcagcaaagccuacagcaacuguuacccuuaugaugugccggauuaugccucccuuaggucacuaguugccucauccggcacacuggaguuuaacaaugaaagcuucaauuggacuggagucacucagaauggaacaagcucugcuugccaaaggagaucuaauaaaaguuucuuuaguagauugaauugguugacccacuuaaaauucaaauacccagcauugaacgugacuaugccaaacaaugaaaaauuugacaaauuguacauuugggggguucaccacccggguacggacaaugaccaaaucagccuauaugcucaaacaucaggaagaaucacagucucuaccaaaagaagccaacaaacuguaaucccgaauaucggaucuagacccaggguaagggauguccccagcagaauaagcaucuauuggacaauaguaaaaccgggagacauacuuuugauuaacagcacagggaaucuaauugcuccucgggguuacuucaaaauacgaagugggaaaagcucaauaaugagaucagaugcacccauuggcaaaugcaauucugaaugcaucacuccaaauggaagcauucccaaugacaaaccauuucaaaauguaaacaggaucacauauggggccugccccagauauguuaagcaaaacacucugaaauuggcaacagggaugcgaaauguaccagagagacaaacuagaggcauauuuggcgcaaucgcggguuucauagaaaaugguugggagggaaugguggacgguugguacgguuucaggcaucaaaauucugagggcacaggacaagcagcagaucucaaaagcacucaagcagcaaucaaccaaaucaaugggaaacugaauagguuaaucgggaaaacaaacgagaaauuccaucagauugaaaaagaauucucagaaguagaagggagaauucaggaccucgagaaauauguugaggacacuaaaauagaucucuggucauacaacgcggagcuucuuguugcccuggagaaccaacauacaauugaucuaacugacucagaaaugaacaaacuguuugaaagaacaaagaagcaacugagggaaaaugcugaggauaugggcaaugguuguuucaaaauauaccacaaaugugacaaugccugcauagggucaaucagaaauggaacuuaugaccaugauguauacagagaugaagcauuaaacaaccgguuccagaucaaagguguugagcugaagucaggauacaaagauuggauccuauggauuuccuuugccauaucauguuuugugcuuuguguugcuuuguugggguucaucaugugggccugccaaaaaggcaacauuaggugcaacauuugcauuuga

SEQ ID NO: 34605 - RNA, 1701 nt, Artificial Sequence
  derived and/or modified CDS sequence (wt) from hemagglutinin__InfluenzaA__ACO36474
augaagacuaucauugcuuugagcuacauucuaugucugguuuucgcucaaaaacuucccggaaaugacaacagcacggcaacgcugugccuugggcaccaugcaguaccaaacggaacgauagugaaaacaaucacgaaugaccaaauugaaguuacuaaugcuacugagcugguucagaguuccucaacagguggaauaugcgacaguccucaucagauccuugauggagaaaacugcacacuaauagaugcucuauugggagacccucagugugauggcuuccaaaauaagaaaugggaccuuuuuguugaacgcagcaaagccuacagcaacuguuacccuuaugaugugccggauuaugccucccuuaggucacuaguugccucauccggcacacuggaguuuaacaaugaaagcuucgauuggacuggagucacucagaauggaacaagcucuucuugcaaaaggagaucuaauaacaguuucuuuaguagauugaauugguugacccacuuaagauacaaauacccagcauugaacgugacuaugccaaacaaugaaaaauuugacaaauuguacauuugggggguucaccacccggguacggacagugaccaaaucagccuauaugcucaagcaucaggaagaaucacagucucuaccaaaagaagccaacaaacuguaaucccgaauaucggaucuagacccagaguaagggaugucuccagccggauaagcaucuauuggacaauaguaaaaccgggagacauacuuuugauuaacagcacagggaaucuaauagcuccucgggguuacuucaaaauacgaagugggaaaagcucaauaaugagaucagaugcacccauuggcaaaugcaauucugaaugcaucacuccaaauggaagcauucccaaugacaaaccauuucaaaauguaaacaggaucacauauggggacugucccagauauguuaagcaaaacacucugaaauuggcaacagggaugcgaaauguaccagagaaacaaacuagaggcauauuuggcgcaaucgcggguuucauagaaaaugguugggagggaaugguggacgguugguacgguuucaggcaucaaaauucugagggcacaggacaagcagcagaucucaaaagcacucaagcagcaaucaaccaaaucaaugggaaacugaauagguuaauagggaaaacaaacgagaaauuccaucagauugaaaaagaauucucggaaguagaagggagaauucaggaccucgagaaauauguugaggacacuaaaauagaucucuggucauacaacgcggagcuucuuguugcccuggagaaccaacauacaauugaucuaacugacucagaaaugaacaaacuguuugaaagaacaaagaagcaacugagggaaaaugcugaggauaugggcaaugguuguuucaaaauauaccacaaaugugacaaugccugcauagggucaaucagaaauggaacuuaugaccaugauguguacagagaugaagcauuaaacaaccgguuccagaucaaagguguugagcugaagucaggauacaaagauuggauccuauggauuuccuuugccauaucauguuuuuugcuuuguguugcuuuguugggguucaucaugugggccugccaaaaaggcaacauuaggugcaacauuugcauuuga

SEQ ID NO: 34606 - RNA, 1701 nt, Artificial Sequence
  derived and/or modified CDS sequence (wt) from hemagglutinin__InfluenzaA__ACO36496
augaagacuaucauugcuuugagcuacauucuaugucugguuuucgcucaaaaacuucccggaaaugacaacagcacggcaacgcugugccuugggcaccaugcaguaccaaacggaacgauagugaaaacaaucacaaaugaccaaauugaaguuacuaaugcuacugagcugguucagaguuccucaacagguggaauaugcgacaguccucaucagauccucgauggagaaaacugcacacuaauagaugcucuauugggagacccucagugugauggcuuccaaaauaagaaaugggaccuuuuuguugaacgcagcaaagccuacagcaacuguuacccuuaugaugugccggauuaugccucccuuaggucacuaguugccucauccggcacacuggaguuuaacaaugaaagcuucaauuggacuggagucacucagaauggaacaagcucugcuugcaaaaggagaucuaauaacgguuucuuuaguagauugaauugguugacccacuuaaaauucaaauacccagcauugaacgugacuaugccaaacaaugaaaaauuugacaaauuguacauuugggggguucaccacccggguacggacaaugaccaaaucagccuauaugcccaagcaucaggaagaaucacagucucuaccaaaagaagccaacaaacuguaaucccgaauaucggaucuagacccaggguaagggauaucuccagcagaauaagcaucuauuggacaauaguaaaaccgggagacauacuuuugauuaacagcacagggaaucuaauugcuccucgggguuacuucaaaauacgaagugggaaaagcucaauaaugagaucagaugcacccauuggcaaaugcaauucugaaugcaucacuccaaauggaagcauucccaaugacaaaccauuucaaaauguaaacaggaucacauauggggccugucccagauauguuaagcaaaacacucugaaauuggcaacagggaugcgaaauguaccagagacacaaacuagaggcauauuuggcgcaaucgcagguuucauagaaaaugguugggagggaaugguggacgguugguacgguuucaggcaucaaaauucugagggcacaggacaagcagcagaucuuaaaagcacucaagcagcaaucaaccaaaucaaugggaaacugaauagguuaaucgggaaaacaaacgagaaauuccaucagauugaaaaagaauucucagaaguagaagggagaauucaggaccucgagaaauauguugaggacacuaaaauagaucucuggucauacaacgcggagcuucuuguugcccuggagaaccaacauacaauugaucuaacugacucagaaaugaacaaacuguuugaaagaacaaagaagcaacugagggaaaaugcugaggauaugggcaaugguuguuucaaaauauaccacaaaugugacaaugccugcauagggucaaucagaaauggaacuuaugaccaugauguauacagagaugaagcauuaaacaaccgguuccagaucaaagguguugagcugaagucaggauacaaagauuggauccuauggauuuccuuugccauaucauguuuuuugcuuuguguugcuuuguugggguucaucaugugggccugccaaaaaggcaacauuaggugcaacauuugcauuuga

SEQ ID NO: 34607 - RNA, 1701 nt, Artificial Sequence
  derived and/or modified CDS sequence (wt) from hemagglutinin__InfluenzaA__ACO36518
augaagacuaucauugcuuugagcuacauucuaugucugguuuucgcucaaaaacuucccggaaaugacaacagcacggcaacgcugugccuugggcaccaugcaguaccaaacggaacaauagugaaaacaaucacgaaugaccaaauugaaguuacuaaugcuacugagcugguucagaguuccucaacagguggaauaugcgacaguccucaucagauccuugauggagaaaacugcacacuaauagaugcucuauugggagacccucagugugauggcuuccaaaauaagaaaugggaccuuuuuguugaacgcagcaaagccuacagcaacuguuacccuuaugaugugccggauuaugccucccuuaggucacuaguugccucauccggcacacuggaguuuaacaaugaaagcuucaauuggacuggagucacucaaaauggaacaaguucugcuugcaaaaggagaucuaauaaaaguuucuuuaguagauugaauugguugacccacuuaaaauucaaauacccagcauugaacgugacuaugccaaacaaugaaaaauuugacaaauuguacauuugggggguucaccacccggguacggacaaugaccaaaucagccuauaugcucaagcaucaggaagaaucacagucucuaccaaaagaagccaacaaacuguaaucccgaauaucggaucuagacccaggguaagggauguucccagcagaauaagcaucuauuggacaauaguaaaaccgggagacauacuuuugauuaacagcacagggaaucuaauugcuccucgggguuacuucaaaauacgaagugggaaaagcucaauaaugagaucagaugcacccauuggcaaaugcaauucugaaugcaucacuccaaauggaagcauucccaaugacaaaccauuucaaaacguaaacaggaucacauaugggaccugucccagauauguuaagcaaaacacucugaaauuggcaacagggaugcgaaacguaccagagaaacaaacuagaggcauauuuggcgcaaucgcggguuucauagaaaaugguugggagggaaugguggacgguugguacgguuucaggcaucaaaauucugagggaacaggacaagcagcagaucucaaaagcacucaagcagcaaucaaccaaaucaaugggaagcugaauagguugaucgggaaaacaaacgagaaauuccaucagauugaaaaagaauucucagaaguagaagggagaauucaggaccucgagaaauauguugaggacacuaaaauagaucucuggucauacaacgcggagcuucuuguugcccuggagaaccaacauacaauugaucuaacugacucagaaaugaacaaacuguuugaaagaacaaagaagcaacugagggaaaaugcugaggauaugggcaaugguuguuucaaaauauaucacaaaugugacaaugccugcauagggucaaucagaaauggaacuuaugaccaugauguauacagagaugaagcauuaaacaaccgguuccagaucaaagguguugagcugaaguuaggauacaaagauuggauccuauggauuuccuuugccauaucauguuuuuugcuuuguguugcuuuguugggguucaucaugugggccugccaaaaaggcaacauuaggugcaacauuugcauuuga

SEQ ID NO: 34608 - RNA, 1701 nt, Artificial Sequence
  derived and/or modified CDS sequence (wt) from hemagglutinin__InfluenzaA__ACO36551
augaagacuaucauugcuuugagccacauucuaugucugguuuucgcucaaaaaccucccggaaaugacaacagcacggcaacgcugugccuugggcaccaugcaguaccaaacggaacgauagugaaaacaaucacaaaugaccaaauugaaguuacuaaugcuacugagcugguucagaguuccucaacagguggaauaugcgacaguccucaucagauccucgauggagaaaacugcacacuaauagaugcucuauugggagacccucagugugauggcuuccaaaauaagaaaugggaccuuuuuguugaacgcagcaaagccuacagcaacuguuacccuuaugaugugccggauuaugccucccuuaggucacuaguugccucauccggcacacuggaguuuaacaaugaaagcuucaauuggacuggagucacucagaauggaacaagcucugcuugcaaaaggagaucuaauaacaguuucuuuaguagauugaauugguugacccacuuaaaauucaaauacccagcauugaacgugacuaugccaaacaaugaaaaauuugacaaauuguacauuugggggguucaccacccggguacggacaaugaccaaaucagccuauaugcucaagcaucaggaagaaucacagucucuaccaaaagaagccaacaaacuguaaucccgaauaucggaucuagacccaggguaagggauaucuccagcagaauaagcaucuauuggacaauaguaaaaccgggagacauacuuuugauuaacagcacagggaaucuaauugcuccucgggguuacuucaaaauacgaagugggaaaagcucaauaaugagaucagaugcacccauuggcaaaugcaauucugaaugcaucacuccaaauggaagcauucccaaugacaaaccauuucaaaauguaaacaggaucacauauggggccugucccagauauguuaagcaaaacacucugaaauuggcaacagggaugcgaaauguaccagagacacaaacuagaggcauauuuggcgcaaucgcagguuucauagaaaaugguugggagggaaugguggacgguugguacgguuucaggcaucaaaauucugagggcacaggacaagcagcagaucucaaaagcacucaagcagcaaucaaccaaaucaaugggaaacugaauagguuaaucgggaaaacaaacgagaaauuccaucagauugaaaaagaauucucagaaguagaagggagaauucaggaccucgagaaauauguugaggacacuaaaauagaucucuggucauacaacgcggagcuucuuguugcccuggagaaccaacauacaauugaucuaacugacucagaaaugaacaaacuguuugaaagaacaaagaagcaacugagggaaaaugcugaggauaugggcaaugguuguuucaaaauauaccacaaaugugacaaugccugcauagggucaaucagaaaugaaacuuaugaccaugauguauacagagaugaagcauuaaacaaccgguuccagaucaaagguguugagcugaagucaggauacaaagauuggauccuauggauuuccuuugccauaucauguuuuuugcuuuguguugcuuuguugggguucaucaugugggccugccaaaaaggcaacauuaggugcaacauuugcauuuga

SEQ ID NO: 34609 - RNA, 1701 nt, Artificial Sequence
  derived and/or modified CDS sequence (wt) from hemagglutinin__InfluenzaA__ACO36562
augaagacuaucauugcuuugagcuacauucuaugucugguuuucgcucaaaaacuucccggaaaugacaacagcacggcaacgcugugccuugggcaccaugcaguaccaaacggaacgauagugaaaacaaucacaaaugaccaaauugaaguuacuaaugcuacugagcugguucagaguuccucaacagguggaauaugcgacaguccucaucagauccucgauggagaaaacugcacacuaauagaugcucuauugggagacccucagugugauggcuuccaaaauaagaaaugggaccuuuuuguugaacgcagcaaagccuacagcaacuguuacccuuaugaugugccggauuaugccucccuuaggucacuaguagccucauccggcacacuggaguuuaacaaugaaagcuucaauuggacuggagucacucagaauggaacaagcucugcuugcaaaaggagaucuaauaacaguuucuuuaguagauugaauugguugacccacuuaaaauucaaauacccagcauugaacgugacuaugccaaacaaugaaaaauuugacaaauuguacauuugggggguucaccacccggguacggacaaugaccaaaucagccuauaugcucaagcaucaggaagaaucacagucucuaccaaaagaagccaacaaacuguaaucccgaauaucggaucuagacccaggguaagggauauccccagcagaauaagcaucuauuggacaauaguaaaaccgggagacauacuuuugauuaacagcacagggaaucuaauugcuccucgggguuacuucaaaauacgaagugggaaaagcucaauaaugagaucagaugcacccauuggcaaaugcaauucugaaugcaucacuccaaauggaagcauucccaaugacaaaccauuucaaaauguaaacaggaucacauauggggccugucccagauauguuaagcaaaacacucugaaauuggcaacagggaugcgaaauguaccagagacacaaacuagaggcauauuuggcgcaaucgcagguuucauagaaaaugguugggagggaaugguggacgguugguacgguuucaggcaucaaaauucugagggcacaggacaagcagcagaucucaaaagcacucaagcagcaaucaaccaaaucaaugggaaacugaauagguuaaucgggaaaacaaacgagaaauuccaucagauugaaaaagaauucucagaaguagaagggagaauucaggaccucgagaaauauguugaggacacuaaaauagaucucuggucauacaacgcggagcuucuuguugcccuggagaaccaacauacaauugaucuaacugacucagaaaugaacaaacuguuugaaagaacaaagaagcaacugagggaaaaugcugaggauaugggcaaugguuguuucaaaauauaccacaaaugugacaaugccugcauagggucaaucagaaaugaaacuuaugaccaugauguauacagagaugaagcauuaaacaaccgguuccagaucaaagguguugagcugaagucaggauacaaagauuggauccuauggauuuccuuugccauaucauguuuuuugcuuuguguugcuuuguugggguucaucaugugggccugccaaaaaggcaacauuaggugcaacauuugcauuuga

SEQ ID NO: 34610 - RNA, 1701 nt, Artificial Sequence
  derived and/or modified CDS sequence (wt) from hemagglutinin__InfluenzaA__ACO36573
augaagacuaucauugcuuugagcuacauucuaugucugguuuucgcucaaaaacuucccggaaaugacaacagcacggcaacgcugugccuugggcaccaugcaguaccaaacggaacgauagugaaaacaaucacaaaugaccaaauugaaguuacuaaugcuacugagcugguucagaguuccucaacagguggaauaugcgacaguccucaucagauccucgauggagaaaacugcacacuaauagaugcucuauugggagacccucagugugauggcuuccaaaauaagaaaugggaccuuuuuguugaacgcagcaaagccuacagcaacuguuacccuuaugaugugccggauuaugccucccuuaggucacuaguugccucauccggcacacuggaguuuaacaaugaaagcuucaauuggacuggagucacucagaauggaacaagcucugcuugcaaaaggagaucuaauaacaguuucuuuaguagauugaauugguugacccacuuaaaauucaaauacccagcauugaacgugacuaugccaaacaaugaaaaauuugacaaauuguacauuugggggguucaccacccggguacggacaaugaccaaaucagccuauaugcucaagcaucaggaagaaucacagucucuaccaaaagaagccaacaaacuguaaucccgaauaucggaucuagacccaggguaagggauaucuccagcagaauaagcaucuauuggacaauaguaaaaccgggagacauacuuuugauuaacagcacagggaaucuaauugcuccucgggguuacuucaaaauacgaagugggaaaagcucaauaaugagaucagaugcacccauuggcaaaugcaauucugaaugcaucacuccaaauggaagcauucccaaugacaaaccauuucaaaauguaaacaggaucacauauggggccugucccagauauguuaagcaaaacacucugaaauuggcaacagggaugcgaaauguaccagagacacaaacuagaggcauauuuggcgcaaucgcagguuucauagaaaaugguugggagggaaugguggacgguugguacgguuucaggcaucaaaauucugagggcacaggacaagcagcagaucucaaaagcacucaagcagcaaucaaccaaaucaaugggaaacugaauagguuaaucgggaaaacaaacgagaaauuccaucagauugaaaaagaauucucagaaguagaagggagaauucaggaccucgagaaauauguugaggacacuaaaauagaucucuggucauacaacgcggagcuucuuguugcccuggagaaccaacauacaauugaucuaacugacucagaaaugaacaaacuguuugaaagaacaaagaagcaacugagggaaaaugcugaggauaugggcaaugguuguuucaaaauauaccacaaaugugacaaugccugcauagggucaaucagaaaugaaacuuaugaccaugauguauacagagaugaagcauuaaacaaccgguuccagaucaaagguguugagcugaagucaggauacaaagauuggauccuauggauuuccuuugccauaucauguuuuuugcuuuguguugcuuuguugggguucaucaugugggccugccaaaaaggcaacauuaggugcaacauuugcauuuga

SEQ ID NO: 34611 - RNA, 1701 nt, Artificial Sequence
  derived and/or modified CDS sequence (wt) from hemagglutinin__InfluenzaA__ACO36584
augaagacuaucauugcuuugagcuacauucuaugucugguuuucucucaaaaacuucccggaaaugacaacagcacggcaacgcugugccuugggcaccaugcaguaccaaacggaacgauagugaaaacaaucacaaaugaccaaauugaaguuacuaaugcuacugagcugguucagaguuccucaacagguggaauaugcgacaguccucaucagauccucgauggagaaaacugcacacuaauagaugcucuauugggagacccucagugugauggcuuccaaaauaagaaaugggaccuuuuuguugaacgcagcaaagccuacagcaacuguuacccuuaugaugugccggauuaugccucccuuaggucacuaguugccucauccggcacacuggaguuuaacaaugaaagcuucaauuggacuggagucacucagaauggaacaagcucugcuugcaaaaggagaucuaauaacaguuucuuuaguagauugaauugguugacccacuuaaaauucaaauacccagcauugaacgugacuaugccaaacaaugaaaaauuugacaaauuguacauuugggggguucaccacccggguacggacaaugaccaaaucagccuauaugcucaagcaucaggaagaaucacagucucuaccaaaaaaagccaacaaacuguaaucccgaauaucggaucuagacccaggguaagggauaucuccagcagaauaagcaucuauuggacaauaguaaaaccgggagacauacuuuugauuaacagcacagggaaucuaauugcuccucgggguuacuucaaaauacgaagugggaaaagcucaauaaugagaucagaugcacccauuggcaaaugcaauucugaaugcaucacuccaaauggaagcauucccaaugacaaaccauuucaaaauguaaacaggaucacauauggggccugucccagauauguuaagcaaaacacucugaaauuggcaacagggaugcgaaauguaccagagacacaaacuagaggcauauuuggcgcaaucgcaggcuucauagaaaaugguugggagggaaugguggacgguugguacgguuucaggcaucaaaauucugagggcacaggacaagcagcagaucucaaaagcacucaagcagcaaucaaccaaaucaaugggaaacugaauagguuaaucgggaaaacaaacgagaaauuccaucagauugaaaaagaauucucagaaguagaagggagaauucaggaccucgagaaauauguugaggacacuaaaauagaucucuggucauacaacgcggagcuucuuguugcccuggagaaccaacauacaauugaucuaacugacucagaaaugaacaaacuguuugaaagaacaaagaagcaacugagggaaaaugcugaggauaugggcaaugguuguuucaaaauauaccacaaaugugacaaugccugcauagggucaaucagaaaugaaacuuaugaccaugauguauacagagaugaagcauuaaacaaccgguuccagaucaaagguguugagcugaagucaggauacaaagauuggauccuauggauuuccuuugccauaucauguuuuuugcuuuguguugcuuuguugggguucaucaugugggccugccaaaaaggcaacauuaggugcaacauuugcauuuga

SEQ ID NO: 34612 - RNA, 1701 nt, Artificial Sequence
  derived and/or modified CDS sequence (wt) from hemagglutinin__InfluenzaA__ACO36595
augaagacuaucauugcuuugagcuacauucuaugucugguuuucgcucaaaaacuucccggaaaugacaacagcacggcaacgcugugccuugggcaccaugcaguaccaaacggaacgauagugaaaacaaucacgaaugaccaaauugaaguuacuaaugcuacugagcugguucagaguuccucaacagguggaauaugcgacaguccucaucagauccuugauggagaaaacugcacacuaauagaugcucuauugggagacccucagugugauggcuuccaaaauaagaaaugggaccuuuuuguugaacgcagcaaagccuacagcaacuguuacccuuaugaugugccggauuaugccucccuuaggucacuaguugccucauccggcacacuggaguuuaacaaugaaagcuucaauuggacuggagucacucaaaauggaacaagcucugcuugcaaaaggagaucuaauaacaguuucuuuaguagauugaauugguugacccacuuaaaauucaaauacccagcauugaacgugacuaugccaaacaaugaaaaauuugacaaauuguacauuugggggguucaccacccggguacggacaaugaccaaaucuuccuguaugcucaagcaucaggaagaaucacagucucuaccaaaagaagccaacaaacuguaaucccgaauaucggaucuagacccagaguaaggaauauccccagcagaauaagcaucuauuggacaauaguaaaaccgggagacauacuuuugauuaacagcacagggaaucuaauugcuccuagggguuacuucaaaauacgaagugggaaaagcucaauaaugagaucagaugcacccauuggcaaaugcaauucugaaugcaucacuccaaauggaagcauucccaaugacaaaccauuucaaaauguaaacaggaucacauauggggccugucccagauauguuaagcaaaacacucugaaauuggcaacagggaugcgaaauguaccagagaaacaaacuagaggcauauuuggcgcaaucgcggguuucauagaaaaugguugggagggaaugguggaugguugguacgguuucaggcaucaaaauucugagggaauaggacaagcagcagaucucaaaagcacucaagcagcaaucaaucaaaucaaugggaagcugaauagguugaucgggaaaaccaacgagaaauuccaucagauugaaaaagaauucucagaaguagaagggagaauucaggaccucgagaaauauguugaggacacuaaaauagaucucuggucauacaacgcggaacuucuuguugcccuggagaaccaacauacaauugaucuaacugacucagaaaugaacaaacuguuugaaagaacaaagaagcaacugagggaaaaugcugaggauaugggcaaugguuguuucaaaauauaccacaaaugugacaaugccugcauaggaucaaucagaaauggaacuuaugaccaugauguauacagagaugaagcauuaaacaaccgguuccagaucaaagguguugagcugaagucaggauacaaagauuggauccuauggauuuccuuugccauaucauguuuuuugcuuuguguugcuuuguugggguucaucaugugggccugccaaaaaggcaacauuaggugcaacauuugcauuuga

SEQ ID NO: 34613 - RNA, 1701 nt, Artificial Sequence
  derived and/or modified CDS sequence (wt) from hemagglutinin__InfluenzaA__ACO36606
augaagacuaucauugcuuugagcuacauucuaugucugguuuuugcucaaaaacuucccggaaaugacaacagcacggcaacgcugugccuugggcaccaugcaguaccaaacggaacgauagugaaaacaaucacgaaugaccaaauugaaguuacuaaugcuacugagcugguucagaguuccucaacagguggaauaugcgacaguccucaucagauccuugauggagaaaacugcacacuaauagaugcucuauugggagacccucagugugauggcuuccaaaauaagaaaugggaccuuuuuguugaacgcagcaaagccuacagcaacuguuacccuuaugaugugccggauuaugccucccuuaggucacuaguugccucauccggcacacuggaguuuaaaaaugaaagcuucaauuggacuggagucacucaaaauggaacaagcucugcuugcaaaaggagaucuaauaacaguuucuuuaguagauugaauugguugacccacuuaaaauucaaauacccagcauugaacgugacuaugccaaacaaugaaaaauuugacaaauuguacauuugggggguucaccacccggguacggacaaugaccaaaucuuccuguaugcucaagcaucaggaagaaucacagucucuacccaaagaagccaacaaacuguaaucccgaauaucggaucuaggcccagaguaaggaauauccccagcagaauaagcaucuauuggacaauaguaaaaccgggagacauacuuuugauuaacagcacagggaaucuaauugcuccuagggguuacuucaaaauacgaagugggaaaagcucaauaaugagaucagaugcacccauuggcaaaugcaauucugaaugcaucacuccaaauggaagcauucccaaugacaaaccauuucaaaauguaaacaggaucacauacggggccugucccagauauguuaagcaaaacacucugaaauuggcaacagggaugcgaaauguaccagagaaacaaacuagaggcauauuuggcgcaaucgcggguuucauagaaaaugguugggagggaaugguggaugguugguacgguuucaggcaucaaaauucugagggaauaggacaagcagcagaucucaaaagcacucaagcagcaaucaaucaaaucaaugggaagcugaauagguugaucgggaaaaccaacgagaaauuccaucagauugaaaaagaauucucagaaguagaagggagaauucaggaccucgagaaauauguugaggacacuaaaauagaucucuggucauacaacgcggagcuucuuguugcccuggagaaccaacauacaauugaucuaacugacucagaaaugaacaaacuguuugaaagaacaaagaagcaacugagggaaaaugcugaggauaugggcaaugguuguuucaaaauauaccacaaaugugacaaugccugcauaggaucaaucagaaauggaacuuaugaccaugauguauacagagaugaagcauuaaacaaccgguuccagaucaaaggcguggagcugaagucaggauacaaagauuggauccuauggauuuccuuugccauaucauguuuuuugcuuuguguugcuuuguugggguucaucaugugggccugccaaaaaggcaacauuaggugcaacauuugcauuuga

SEQ ID NO: 34614 - RNA, 1701 nt, Artificial Sequence
  derived and/or modified CDS sequence (wt) from hemagglutinin__InfluenzaA__ACO36617
augaagacuaucauugcuuugagcuacauucuaugucugguuuucgcucaaaaacuucccggaaaugacaacagcacggcaacgcugugccuugggcaccaugcaguaccaaacggaacgauagugaaaacaaucacgaaugaccaaauugaaguuacuaaugcuacugagcugguucagaguuccucaacagguggaauaugcgacaguccucaucagauccuugauggagaaaacugcacacuaauagaugcucuauugggagacccucagugugauggcuuccaaaauaagaaaugggaccuuuuuguugaacgcagcaaagccuacagcaacuguuacccuuaugaugugccggauuaugccucccuuaggucacuaguugccucauccggcacacuggaguuuaacaaugaaagcuucaauuggacuggagucacucaaaauggaacaagcucugcuugcaaaaggagaucuaauaacaguuucuuuaguagauugaauugguugacccacuuaaaauucaaauacccagcauugaacgugacuaugccaaacaaugaaaaauuugacaaauuguacauuugggggguucaccacccggguacggacaaugaccaaaucuuccuguaugcucaagcaucaggaagaaucacagucucuaccaaaagaagccaacaaacuguaaucccgaauaucgggucuagacccagaguaaggaauauccccagcagaauaagcaucuauuggacaauaguaaaaccgggagacauacuuuugauuaacagcacagggaaucuaauugcuccuagggguuacuucaaaauacgaagugggaaaagcucaauaaugagaucagaugcacccauuggcaaaugcaauucugaaugcaucacuccaaauggaaguauucccaaugacaaaccauuucaaaauguaaacagaaucacauauggggccugucccagauauguuaagcaaaacacucugaaauuggcaacagggaugcgaaauguaccagagaaacaaacuagaggcauauuuggcgcaaucgcggguuucauagaaaaugguugggagggaaugguggaugguugguacgguuucaggcaucaaaauucugagggaauaggacaagcagcagaucucaaaagcacucaagcagcaaucaaucaaaucaaugggaagcugaauagguugaucgggaaaaccaacgagaaauuccaucagauugaaaaagaauucucagaaguagaagggagaauucaggaccucgagaaauauguugaggacacuaaaauagaucucuggucauacaacgcggagcuucuuguugcccuggagaaccaacauacaauugaucuaacugacucagaaaugaacaaacuguuugaaagaacaaagaagcaacugagggaaaaugcugaggauaugggcaaugguuguuucaaaauauaccacaaaugugacaaugccugcauaggaucaaucagaaauggaacuuaugaccaugauguauacagagaugaagcauuaaacaaccgguuccagaucaaaggcguugagcugaagucaggauacaaagauuggauccuauggauuuccuuugccauaucauguuuuuugcuuuguguugcuuuguugggguucaucaugugggccugccaaaaaggcaacauuaggugcaacauuugcauuuga

SEQ ID NO: 34615 - RNA, 1701 nt, Artificial Sequence
  derived and/or modified CDS sequence (wt) from hemagglutinin__InfluenzaA__ACO36628
augaagacuaucauugcuuugagcuacauucuaugucugguuuucgcucaaaaacuucccggaaaugacaacagcacggcaacgcugugccuugggcaccaugcaguaccaaacggaacgauagugaaaacaaucacgaaugaccaaauugaaguuacuaaugcuacugagcugguucagaguuccucaacagguggaauaugcgacaguccucaucagauccuugauggagaaaacugcacacuaauagaugcucuauugggagacccucagugugauggcuuccaaaauaagaaaugggaccuuuuuguugaacgcagcaaagccuacagcaacuguuacccuuaugaugugccggauuaugccucccuuaggucacuaguugccucauccggcacacuggaguuuaacaaugaaagcuucaauuggacuggagucacucaaaauggaacaagcucugcuugcaaaaggagaucuaauaacaguuucuuuaguagauugaauugguugacccacuuaaaauucaaauacccagcauugaacgugacuaugccaaacaaugaaaaauuugacaaauuguacauuugggggguucaccacccggguacggacaaugaccaaaucuuccuguaugcucaagcaucaggaagaaucacagucucuaccaaaagaagccaacaaacuguaaucccgaauaucggaucuagacccagaguaaggaauauccccagcagaauaagcaucuauuggacaauaguaaaaccgggagacauacuuuugauuaacagcacagggaaucuaauugcuccuagggguuacuucaaaauacgaagugggaaaagcucaauaaugagaucagaugcacccauuggcaaaugcaauucugaaugcaucacuccaaauggaagcauucccaaugacaaaccauuucaaaauguaaacaggaucacauauggggccugucccagauauguuaagcaaaacacucugaaauuggcaacagggaugcgaaauguaccagagaaacaaacuagaggcauauuuggcgcaaucgcggguuucauagaaaaugguugggagggaaugguggaugguugguacgguuucaggcaucaaaauucugagggaauaggacaagcagcagaucucaaaagcacucaagcagcaaucaaucaaaucaaugggaagcugaauagguugaucgggaaaaccaacgagaaauuccaucagauugaaaaagaauucucagaaguagaagggagaauucaggaccucgagaaauauguugaggacacuaaaauagaucucuggucauacaacgcggagcuucuuguugcccuggagaaccaacauacaauugaucuaacugacucagaaaugaacaaacuguuugaaagaacaaagaagcaacugagggaaaaugcugaggauaugggcaaugguuguuucaaaauauaccacaaaugugacaaugccugcauaggaucaaucagaaauggaacuuaugaccaugauguauacagagaugaagcauuaaacaaccgguuccagaucaaaggcguugagcugaagucaggauacaaagauuggauccuauggauuuccuuugccauaucauguuuuuugcuuuguguugcuuuguugggguucaucaugugggccugccaaaaaggcaacauuaggugcaacauuugcauuuaa

SEQ ID NO: 34616 - RNA, 1701 nt, Artificial Sequence
  derived and/or modified CDS sequence (wt) from hemagglutinin__InfluenzaA__ACO36639
augaagacuaucauugcuuugagcuacauucuaugucugguuuucgcucaaaaacuucccggaaaugacaacagcacggcaacgcugugccuugggcaccaugcaguaccaaacggaacgauagugaaaacaaucacgaaugaccaaauugaaguuacuaaugcuacugagcugguucagaguuccucaacagguggaauaugcgacaguccucaucagauccuugauggagaaaacugcacacuaauagaugcucuauugggagacccucagugugauggcuuccaaaauaagaaaugggaccuuuuuguugaacgcagcaaagccuacagcaacuguuacccuuaugaugugccggauuaugccucccuuaggucacuaguugccucauccggcacacuggaguuuaacaaugaaagcuucaauuggacuggagucacucaaaauggaacaagcucugcuugcaaaaggagaucuaauaacaguuucuuuaguagauugaauugguugacccacuuaaaauucaaauacccagcauugaacgugacuaugccaaacaaugaaaaauuugacaaauuguacauuugggggguucaccacccggguacggacaaugaccaaaucuuccuguaugcucaagcaucaggaagaaucacagucucuaccaaaagaagccaacaaacuguaaucccgaauaucggaucuagacccagaguaaggaauauccccagcagaauaagcaucuauuggacaauaguaaaaccgggagacauacuuuugauuaacagcacagggaaucuaauugcuccuagggguuacuucaaaauacgaagugggaaaagcucaauaaugagaucagaugcacccauuggcaaaugcaauucugaaugcaucaccccaaauggaagcauucccaaugacaaaccauuucaaaauguaaacaggaucacauauggggccugucccagauauguuaagcaaaacacucugaaauuggcaacagggaugcgaaauguaccagagaaacaaacuagaggcauauuuggcgcaaucgcggguuucauagaaaaugguugggagggaaugguggaugguugguacgguuucaggcaucaaaauucugagggaauaggacaagcagcagaucucaaaagcacucaagcagcaaucaaucaaaucaaugggaagcugaauagguugaucgggaaaaccaacgagaaauuccaucagauugaaaaagaauucucagaaguagaagggagaauucaggaccucgagaaauauguugaggacacuaaaauagaucucuggucauacaacgcggagcuucuuguugcccuggagaaccaacauacaauugaucuaacugacucagaaaugaacaaacuguuugaaagaacaaagaagcaacugagggaaaaugcugaggauaugggcaaugguuguuucaaaauauaccacaaaugugacaaugccugcauaggaucaaucagaaauggaacuuaugaccaugauguauacagagaugaagcauuaaacaaccgguuccagaucaaaggcguugagcugaagucaggauacaaagauuggauccuauggauuuccuuugccauaucauguuuuuugcuuuguuuugcuuuguugggguucaucaugugggccugccaaaaaggcaacauuaggugcaacauuugcauuuga

SEQ ID NO: 34617 - RNA, 1701 nt, Artificial Sequence
  derived and/or modified CDS sequence (wt) from hemagglutinin__InfluenzaA__ACO36661
augaagacuaucauugcuuugagcuacauucuaugucugguuuucgcucaaaaacuucccggaaaugacaacagcacggcaacgcugugccuugggcaccaugcaguaccaaacggaacgauagugaaaacaaucacgaaugaccaaauugaaguuacuaaugcuacugagcugguucagaguuccucaacagguggaauaugcgacaguccucaucagauccuugauggagaaaacugcacacuaauagaugcucuauugggagacccucagugugauggcuuccaaaauaagaaaugggaccuuuuuguugaacgcagcaaagccuacagcaacuguuacccuuaugaugugccggauuaugccucccuuaggucacuaguugccucauccggcacacuagaguuuaacaaugaaaguuucaauuggacuggagucacucaaaauggaacaagcucugcuugcaaaaggagaucuaauaacaguuucuuuaguagauugaauugguugacccacuuaaaauucaaauacccagcauugaacgugacuaugccaaacaaugaaaaauuugacaaauuguacauuugggggguucaccacccggguacggacaaugaccaaaucuuccuguaugcucaagcaucaggaagaaucacagucucuaccaaaagaagccaacaaacuguaaucccgaauaucggaucuagacccagaguaaggaauauccccagcagaauaagcaucuauuggacaauaguaaaaccgggagacauacuuuugauuaacagcacagggaaucuaauugcuccuagggguuacuucaaaauacgaagugggaaaagcucaauaaugagaucagaugcacccauuggcaaaugcaauucugaaugcaucacuccaaauggaagcauucccaaugacaaaccauuucaaaauguaaacaggaucacauauggggccugucccagauauguuaagcaaaacacucugaaauuggcaacagggaugcgaaauguaccagagaaacaaacuagaggcauauuuggcgcaaucgcggguuucauagaaaaugguugggagggaaugguggaugguugguacgguuucaggcaucaaaauucugagggaauaggacaagcagcagaucucaaaagcacucaagcagcaaucaaucaaaucaaugggaagcugaauagguugaucgggaaaaccaacgagaaauuccaucagauugaaaaagaauucucagaaguagaagggagaauucaggaccucgagaaauauguugaggacauuaaaauagaucucuggucauacaacgcggagcuucuuguugcccuggagaaccaacauacaauugaucuaacugacucagaaaugaacaaacuguuugaaagaacaaagaagcaacugagggaaaaugcugaggauaugggcaaugguuguuucaaaauauaccacaaaugugacaaugccugcauaggaucaaucagaaauggaacuuaugaccaugauguauacagagaugaagcauuaaacaaccgguuccagaucaaaggcguugagcugaagucaggauacaaagauuggauccuauggauuuccuuugccauaucauguuuuuugcuuuguguugcuuuguugggguucaucaugugggccugccaaaaaggcaacauuaggugcaacauuugcauuuga

SEQ ID NO: 34618 - RNA, 1701 nt, Artificial Sequence
  derived and/or modified CDS sequence (wt) from hemagglutinin__InfluenzaA__ACO36683
augaagacuaucauugcuuugagcuacauucuaugucugguuuucgcucaaaaacuucccggaaaugacaacagcacggcaacgcugugccuugggcaccaugcaguaccaaacggaacgauagugaaaacaaucacgaaugaccaaauugaaguuacuaaugcuacugagcugguucagaguuccucaacagguggaauaugugacaguccucaucagauccuugauggagaaaacugcacacuaauagaugcucuauugggagacccucagugugauggcuuccaaaauaagaaaugggaccuuuuuguugaacgcagcaaagccuacagcaacuguuacccuuaugaugugccggauuaugccucccuuaggucacuaguugccucauccggcacacuggaguuuaacaaugaaagcuucaauuggacuggagucacucaaaauggaacaagcucugcuugcaaaaggagaucuaauaacaguuucuuuaguagauugaauugguugacccacuuaaaauucaaauacccagcauugaacgugacuaugccaaacaaugaaaaauuugacaaauuguacauuugggggguucaccacccggguacggacaaugaccaaaucuuccuguaugcucaagcaucaggaagaaucacagucucuaccaaaagaagccaacaaacuguaaucccgaauaucggaucuagacccagaguaaggaauauccccagcagaauaagcaucuauuggacaauaguaaaaccgggagacauacuuuugauuaacagcacagggaaucuaauugcuccuagggguuacuucaaaauacgaagugggaaaagcucaauaaugagaucagaugcacccauuggcaaaugcaauucugaaugcaucacuccaaauggaagcauucccaaugacaaaccauuucaaaauguaaacaggaucacauauggggccugucccagauauguuaagcaaaacacucugaaauuggcaacagggaugcgaaauguaccagagaaacaaacuagaggcauauuuggcgcaaucgcggguuucauagaaaaugguugggagggaaugguggaugguugguacgguuucaggcaucaaaauucugagggaauaggacaagcagcagaucucaaaagcacucaagcagcaaucaaucaaaucaaugggaagcugaauagguugaucgggaaaaccaacgagaaauuccaucagauugaaaaagaauucucagaaguagaagggagaauucaggaccucgagaaauauguugaggacacuaaaauagaucucuggucauacaacgcggagcuucuuguugcccuggagaaccaacauacaauugaucuaacugacucagaaaugaacaaacuguuugaaagaacaaagaagcaacugagggaaaaugcugaggauaugggcaaugguuguuucaaaauauaccacaaaugugacaaugccugcauaggaucaaucagaaauggaacuuaugaucaugauguauacagagaugaagcauuaaacaaccgguuccagaucaaaggcguugagcugaagucaggauacaaagauuggauccuauggauuuccuuugccauaucauguuuuuugcuuuguguugcuuuguugggguucaucaugugggccugccaaaaaggcaacauuaggugcaacauuugcauuuga

SEQ ID NO: 34619 - RNA, 1701 nt, Artificial Sequence
  derived and/or modified CDS sequence (wt) from hemagglutinin__InfluenzaA__ACO37122
augaagacuaucauugcuuugagcuacauucuaugucugguuuucgcucaaaaacuucccggaaaugacaacagcacggcaacgcugugccuugggcaccaugcaguaccaaacggaacgauagugaaaacaaucacaaaugaccaaauugaaguuacuaaugcuacugagcugguucagaguuccucaacagguggaauaugcgacaguccucaccagauccucgauggagaaaacugcacacuaauagaugcucuauugggagacccucagugugauggcuuccaaaauaagaaaugggaccuuuuuguugaacgcagcaaagccuacagcaacuguuacccuuaugaugugccggauuaugccucccuuaggucacuaguagccucauccggcacacuggaguuuaacaaugaaagcuucaauuggacuggagucacucagaauggaacaagcucugcuugcaaaaggagaucuaauaacaguuucuuuaguagauugaauugguugacccacuuaaaauucaaauacccagcauugaacgugacuaugccaaacaaugaaaaauuugacaaauuguacauuugggggguucaccacccggguacggacaaugaccaaaucagccuauaugcucaagcaucaggaagaaucacagucucuaccaaaagaagccaacaaacuguaaucccgaauaucggaucuagacccaggguaagggauauccccagcagaauaagcaucuauuggacaauaguaaaaccgggagacauacuuuugauuaacagcacagggaaucuaauugcuccucgggguuacuucaaaauacgaagugggaaaagcucaauaaugagaucagaugcacccauuggcaaaugcaauucugaaugcaucacuccaaauggaagcauucccaaugacaaaccauuucaaaauguaaacaggaucacauauggggccugucccagauauguuaagcaaaacacucugaaauuggcaacagggaugcgaaauguaccagagacacaaacuagaggcauauuuggcgcaaucgcagguuucauagaaaaugguugggagggaaugguggacgguugguacgguuucaggcaucaaaauucugagggcacaggacaagcagcagaucucaaaagcacucaagcagcaaucaaccaaaucaaugggaaacugaauagguuaaucgggaaaacaaacgagaaauuccaucagauugaaaaagaauucucagaaguagaagggagaauucaggaccucgagaaauauguugaggacacuaaaauagaucucuggucauacaacgcggagcuucuuguugcccuggagaaccaacauacaauugaucuaacugacucagaaaugaacaaacuguuugaaagaacaaagaagcaacugagggaaaaugcugaggauaugggcaaugguuguuucaaaauauaccacaaaugugacaaugccugcauagggucaaucagaaaugaaacuuaugaccaugauguauacagagaugaagcauuaaacaaccgguuccagaucaaagguguugagcugaagucaggauacaaagauuggauccuauggauuuccuuugccauaucauguuuuuugcuuuguguugcuuuguugggguucaucaugugggccugccaaaaaggcaacauuaggugcaacauuugcauuuga

SEQ ID NO: 34620 - RNA, 1701 nt, Artificial Sequence
  derived and/or modified CDS sequence (wt) from hemagglutinin__InfluenzaA__ACO94514
augaagacuaucauugcuuugagcuacauucuaugucugguuuucgcucaaaaacuuccuggaaaugacaacagcacggcaacgcugugccuugggcaccaugcaguaccaaacggaacgauagugaaaacaaucacgaaugaccaaauugaaguuacuaaugcuacugagcugguucagaguuccucaacaggugaaauaugcgacaguccucaucagauccuugauggagaaaacugcacacuaauagaugcucuauugggagacccucagugugauggcuuccaaaauaagaaaugggaccuuuuuguugaacgcagcaaagccuacagcaacuguuacccuuaugaugugccggauuaugccucccuuaggucacuaguugccucauccggcacacuggaguuuaacaaugaaagcuucaauuggacuggagucacucaaaacggaacaagcucugcuugcauaaggaaaucuaauaacaguuucuuuaguagauugaauugguugacccacuuaaaauucaaauacccagcauugaacgugacuaugccaaacaaugaacaauuugacaaauuguacauuugggggguucaccacccggguacggacaaugaccaaaucuuccuguaugcucaagcaucaggaagaaucacagucucuaccaaaagaagccaacaaacuguaaucccgaauaucggaucuagacccagaguaaggaauaucccuagcagaauaagcaucuauuggacaauaguaaaaccgggagacauacuuuugauuaacagcacagggaaucuaauugcuccuagggguuacuucaaaauacgaagugggaaaagcucaauaaugagaucagaugcacccauuggcaaaugcaauucugaaugcaucacuccaaauggaagcauucccaaugacaaaccauuccaaaauguaaacaggaucacauacggggccugucccagauauguuaagcaaaacacucugaaauuggcaacagggaugcgaaauguaccagagaaacaaacuagaggcauauuuggcgcaaucgcggguuucauagaaaaugguugggagggaaugguggaugguugguacgguuucaggcaucaaaauucugagggaagaggacaagcagcagaucucaaaagcacucaagcagcaaucgaucaaaucaaugggaagcugaauagauugaucgggaaaaccaacgagaaauuccaucagauugaaaaagaauucucagaagucgaagggagaauucaggaccuugagaaauauguugaggacaccaaaauagaucucuggucauacaacgcggagcuucuuguugcccuggagaaccaacauacaauugaucuaacugacucagaaaugaacaaacuguuugaaaaaacaaagaagcaacugagggaaaaugcugaggauaugggcaaugguuguuucaaaauauaccacaaaugugacaaugccugcauaggaucaaucagaaauggaacuuaugaccacgauguauacagagaugaagcauuaaacaaccgguuccagaucaagggaguugagcugaagucaggguacaaagauuggauccuauggauuuccuuugccauaucauguuuuuugcuuuguguugcuuuguugggguucaucaugugggccugccaaaaaggcaacauuaggugcaacauuugcauuuga

SEQ ID NO: 34621 - RNA, 1701 nt, Artificial Sequence
  derived and/or modified CDS sequence (wt) from hemagglutinin__InfluenzaA__ACO94515
augaagacuaucauugcuuugagcuacauucuaugucugguuuucgcucaaaaacuuccuggaaaugacaacagcacggcaacgcugugccuugggcaccaugcaguaccaaacggaacgauagugaaaacaaucacgaaugaccaaauugaaguuacuaaugcuacugagcugguucagaguuccucaacaggugaaauaugcgacaguccucaucagauccuugauggagaaaacugcacacuaauagaugcucuauugggagacccucagugugauggcuuccaaaauaagaaaugggaccuuuuuguugaacgcagcaaagccuacagcaacuguuacccuuaugaugugccggauuaugccucccuuaggucacuaguugccucauccggcacacuggaguuuaacaaugaaagcuucaauuggacuggagucacucaaaacggaacaagcucugcuugcauaaggaaaucuaauaacaguuucuuuaguagauugaauugguugacccacuuaaaauucaaauacccagcauugaacgugacuaugccaaacaaugaacaauuugacaaauuguacauuugggggguucaccacccggguacggacaaugaccaaaucuuccuguaugcucaagcaucaggaagaaucacagucucuaccaaaagaagccaacaaacuguaaucccgaauaucggaucuagacccagaguaaggaauaucccuagcagaauaagcaucuauuggacaauaguaaaaccgggagacauacuuuugauuaacagcacagggaaucuaauugcuccuagggguuacuucaaaauacgaagugggaaaagcucaauaaugagaucagaugcacccauuggcaaaugcaauucugaaugcaucacuccaaauggaagcauucccaaugacaaaccauuccaaaauguaaacaggaucacauacggggccugucccagauauguuaagcaaaacacucugaaauuggcaacagggaugcgaaauguaccagagaaacaaacuagaggcauauuuggcgcaaucgcggguuucauagaaaaugguugggagggaaugauggaugguugguacgguuucaggcaucaaaauucugagggaagaggacaagcagcagaucucaaaagcacucaagcagcaaucgaucaaaucaaugggaagcugaauagauugaucgggaaaaccaacgagaaauuccaucagauugaaaaagaauucucagaagucgaagggaggauucaggaccuugagaaauauguugaggacaccaaaauagaucucuggucauacaacgcggagcuucuuguugcccuggagaaccaacauacaauugaucuaacugacucagaaaugaacaaacuguuugaaaaaacaaagaagcaacugagggaaaaugcugaggauaugggcaaugguuguuucaaaauauaccacaaaugugacaaugccugcauaggaucaaucagaaauggaacuuaugaccacgauguauacagagaugaagcauuaaacaaccgguuccagaucaagggaguugagcugaagucaggguacaaagauuggauccuauggauuuccuuugccauaucauguuuuuugcuuuguguugcuuuguugggguucaucaugugggccugccaaaaaggcaacauuaggugcaacauuugcauuuga

SEQ ID NO: 34622 - RNA, 1701 nt, Artificial Sequence
  derived and/or modified CDS sequence (wt) from hemagglutinin__InfluenzaA__ACO94516
augaagacuaucauugcuuugagcuacauucuaugucugguuuucgcucaaaaacuuccuggaaaugacaacagcacggcaacgcugugccuugggcaccaugcaguaccaaacggaacgauagugaaaacaaucacgaaugaccaaauugaaguuacuaaugcuacugagcugguucagaguuccucaacaggugaaauaugcgacaguccucaucagauccuugauggagaaaacugcacacuaauagaugcucuauugggagacccucagugugauggcuuccaaaauaagaaaugggaccuuuuuguugaacgcagcaaagccuacagcaacuguuacccuuaugaugugccggauuaugccucccuuaggucacuaguugccucauccggcacacuggaguuuaacaaugaaagcuucaauuggaccggagucacucaaaacggaacaagcucugcuugcauaaggagaucuaauaacaguuucuuuaguagauugaauugguugacccacuuaaaauucaaauacccagcauugaacgugacuaugccaaacaaugaacaauuugacaaauuguacauuugggggguucaccacccggguacggacaaugaccaaaucuuccuguaugcucaagcaucaggaagaaucacagucucuaccaaaagaagccaacaaacuguaaucccgaauaucggaucuagacccagaguaaggaauaucccuagcagaauaagcaucuauuggacaauaguaaaaccgggagacauacuuuugauuaacagcacagggaaucuaauugcuccuagggguuacuucaaaauacgaagugggaaaagcucaauaaugagaucagaugcacccauuggcaaaugcaacucugaaugcaucacuccaaauggaagcauucccaaugacaaaccauuccaaaauguaaacaggaucacauacggggccugucccagauauguuaagcaaaacacucugaaauuggcaacagggaugcgaaauguaccagagaaacaaacuagaggcauauuuggcgcaaucgcggguuucauagaaaaugguugggagggaaugguggaugguugguacgguuucaggcaucaaaauucugagggaagaggacaagcagcagaucucaaaagcacucaagcagcaaucgaucaaaucaaugggaagcugaauagauugaucgggaaaaccaacgagaaauuccaucagauugaaaaagaauucucagaagucgaagggagaauucaggaccuugagaaauauguugaggacacuaaaauagaucucuggucauacaacgcggagcuucuuguugcccuggagaaccaacauacaauugaucuaacugacucagaaaugaacaaacuguuugaaaaaacaaagaagcaacugagggaaaaugcugaggauaugggcaaugguuguuucaaaauauaccacaaaugugacaaugccugcauaggaucaaucagaaauggaacuuaugaccacgauguauacagagaugaagcauuaaacaaccgguuccagaucaagggaguugagcugaagucaggguacaaagauuggauccuauggauuuccuuugccauaucauguuuuuugcuuuguguugcuuuguugggguucaucaugugggccugccaaaaaggcaacauuaggugcaacauuugcauuuga

SEQ ID NO: 34623 - RNA, 1701 nt, Artificial Sequence; identical to SEQ ID NO: 34535
  derived and/or modified CDS sequence (wt) from hemagglutinin__InfluenzaA__ACO94672

SEQ ID NO: 34624 - RNA, 1701 nt, Artificial Sequence
  derived and/or modified CDS sequence (wt) from hemagglutinin__InfluenzaA__ACO94683
augaagacuaucauugcuuugagcuacauucuaugucugguuuccgcucaaaaacuuccuggaaaugacaacagcacggcaacacugugccuugggcaccaugcaguaccaaacggaacgauagugaaaacaaucacgaaugaccaaauugaaguuacuaaugcuacugagcugguucagaguuccucaacaggugaaauaugcgacaguccucaucagguccuugauggagaaaacugcacacuaauagaugcucuauugggagacccucagugugauggcuuccaaaauaagaaaugggaccuuuuuguugaacgcagcaaagccuacagcaacuguuacccuuaugaugugccggauuaugccucccuuaggucacuaguugccucaucuggcacacuggaguuuaacaaugaaagcuucaauuggacuggagucacucaaaacggaacaagcucugcuugcauaaggagauccaauaacaguuucuuuaguagacugaauugguugacccacucaaaauucaaauacccagcauugaacgugacuaugccaaacaaugaagaauuugacaaauuguacauuugggggguucaccacccggguacggacaaugaccaaaucuuccuguaugcucaagcaucaggaagaaucacagucucuaccaaaagaagccaacaaacuguaaucccgaauaucggaucuagacccagaguaaggaauauccccagcagaauaagcaucuauuggacaauaguaaaaccgggagacauacuuuugauuaacagcacagggaaucuaauugcuccuagggguuacuucaaaauacgaagugggaaaagcucaauaaugagaucagaugcacccauuggcaaaugcaauucugaaugcaucacuccaaauggaagcauucccaaugacaaaccauuccaaaauguaaacaggaucacauacggggccugucccagauauguuaagcaaaacacucugaaauuggcaacagggaugcgaaauguaccagagaaacaaacuagaggcauauuuggcgcaaucgcggguuucauagaaaaugguugggagggaaugguggaugguugguacgguuucaggcaucaaaauucugagggaauaggacaagcagcagaucucaaaagcacucaagcagcaaucgaucaaaucaaugggaagcugaauagguugaucgggaaaaccaacgagaaauuccaucagauugaaaaagaauucacagaagucgaagggagaauucaggaccuugagaaauauguugaggacaccaaaauagaucucuggucauacaacgcggagcuucuuguugcccuggagaaccaacauacaauugaucuaacugacucagaaaugaacaaacuguuugaaaaaacaaagaagcaacugagggaaaaugcugaggauaugggcaaugguuguuucaaaauauaccacaaaugugacaaugccugcauaggaucaaucagaaauggaacuuaugaccacgagguauacagagaugaagcauuaaacaaccgguuccagaucaagggcguugagcugaagucaggauacaaagauuggauccuauggauuuccuuugccauaucauguuuuuugcuuuguguugcuuuguugggguucaucaugugggccugccaaaaaggcaacauuaggugcaacauuugcauuuga

SEQ ID NO: 34625 - RNA, 1701 nt, Artificial Sequence; identical to SEQ ID NO: 34535
  derived and/or modified CDS sequence (wt) from hemagglutinin__InfluenzaA__ACO94694

SEQ ID NO: 34626 - RNA, 1698 nt, Artificial Sequence
  derived and/or modified CDS sequence (wt) from hemagglutinin__InfluenzaA__ACO94705
augaaaguaaaacuacugguccuguuaugcacauuuacagcuacauaugcagacacaauauguauaggcuaccaugcuaacaacucgaccgacacuguugacacaguacuugaaaagaaugugacagugacacacucugucaaccugcuugagaacagccacaauggaaaacuaugucuauuaaaaggaauagccccacuacaauuggguaauugcagcguugccggguggaucuuaggaaacccagaaugcgaauuacugauuuccaaggagucaugguccuacauuguagaaaaaccaaauccugagaauggaacauguuacccagggcauuucgcugacuaugaggaacugagggagcaauugaguucaguaucuucauuugagagguucgaaauauuccccaaagaaagcucauggcccaaccacaccguaaccggagugucagcaucaugcucccauaauggggaaagcaguuuuuacagaaauuugcuauggcugacggggaagaaugguuuguacccaaaccugagcaaguccuaugcaaacaacaaagaaaaagaaguccuuguacuaugggguguucaucacccgccaaacauaggugaccaaaaggcccucuaucauacagaaaaugcuuauguuucuguagugucuucacauuauagcagaaaauucaccccagaaauagccaaaagacccaaaguaagagaucaagaaggaagaaucaacuacuacuggacucugcuugaacccggggauacaauaauauuugaggcaaauggaaaucuaauagcgccaagauaugcuuucgcacugaguagaggcuuuggaucaggaaucaucaacucaaaugcaccaauggauaaaugugaugcgaagugccaaacaccucagggagcuauaaacagcagucuuccuuuccagaacguacacccagucacaauaggagaguguccaaaguaugucagaagugcaaaauuaaggaugguuacaggacuaaggaacaucccauccauucaauccagagguuuguuuggagccauugccgguuucauugaagggggguggacuggaaugguagaugguugguaugguuaucaucaucagaaugagcaaggaucuggcuaugcugcagaucaaaaaagcacacaaaaugccauuaaugggauuacaaacaaggugaauucuguaauugagaaaaugaacacucaauucacagcagugggcaaagaauucaacaaauuggaaagaaggauggaaaacuugaauaaaaaaguugaugauggguuuauagacauuuggacauauaaugcagaacuguugguucuacuggaaaaugaaaggacuuuggauuuccaugacuccaaugugaagaaucuguaugagaaaguaaaaagccaguuaaagaacaaugcuaaagaaauaggaaauggguguuuugaauucuaucacaaguguaacgaugaaugcauggagaguguaaagaauggaacuuaugacuauccaaaauauuccgaagaaucaaaguuaaacagggagaaaauugauggagugaaauuggaaucaaugggagucuaucagauucuggcgaucuacucaacagucgccaguucucugguucuuuuggucucccugggggcaaucagcuucuggauguguuccaaugggucuuugcaguguagaauaugcaucuaa

SEQ ID NO: 34627 - RNA, 1701 nt, Artificial Sequence
  derived and/or modified CDS sequence (wt) from hemagglutinin__InfluenzaA__ACO94727
augaagacuaucauugcuuugagcuacauucuaugucugguuuucgcucaaaaacuuccuggaaaugacaacagcacggcaacgcugugccuugggcaccaugcaguaccaaacggaacgauagugaaaacaaucacgaaugaccaaauugaaguuacuaaugcuacugagcugguucagaguuccucaacaggugaaauaugcgacaguccucaucagauccuugauggagaaaacugcacacuaauagaugcucuauugggagacccucagugugauggcuuccaaaauaagaaaugggaccuuuuuguugaacgcagcaaagccuacagcaacuguuacccuuaugaugugccggauuaugccucccuuaggucacuaguugccucauccggcacacuggaguuuaacaaugaaagcuucaauuggacuggagucacucaaaacggaacaagcucugcuugcauaaggagaucuaauaacaguuucuuuaguagauugaauugguugacccacuuaaaauucaaauacccagcauugaacgugacuaugccaaacaaugaacaauuugacaaauuguacauuugggggguucaccacccggguacggacaaugaccaaaucuuccuguaugcucaagcaucaggaagaaucacagucucuaccaaaagaagccaacaaacuguaaucccgaauaucggaucuagacccagaguaaggaauaucccuagcagaauaagcaucuauuggacaauaguaaaaccgggagacauacuuuugauuaacagcacagggaaucuaauugcuccuagggguuacuucaaaauacgaagugggaaaagcucaauaaugaaaucagaugcacccauuggcaaaugcaauucugaaugcaucacuccaaauggaagcauucccaaugacaaaccauuccaaaauguaaacaggaucacauacggggccugucccagauauguuaagcaaaacacucugaaauuggcaacagggaugcgaaauguaccagagaaacaaacuagaggcauauuuggcgcaaucgcggguuucauagaaaaugguugggagggaaugguggaugguugguacgguuucaggcaucaaaauucugagggaagaggacaagcagcagaucucaaaagcacucaagcagcaaucgaucaaaucaaugggaagcugaauagauugaucgggaaaaccaacgagaaauuccaucagauugaaaaagaauucucagaagucgaagggagaauucaggaccuugagaaauauguugaggacacuaaaauagaucucuggucauacaacgcggagcuucuuguugcccuggagaaccaacauacaauugaucuaacugacucagaaaugaacaaacuguuugaaaaaacaaagaagcaacugagggaaaaugcugaggauaugggcaaugguuguuucaaaauauaccacaaaugugacaaugccugcauaggaucaaucagaaaugggacuuaugaccacgauguauacagagaugaagcauuaaacaaccgguuccagaucaagggaguugagcugaagucaggguacaaagauuggauccuauggauuuccuuugccauaucaugucuuuugcuuuguguugcuuuguugggguucaucaugugggccugccaaaaaggcaacauuaggugcaacauuugcauuuga

SEQ ID NO: 34628 - RNA, 1701 nt, Artificial Sequence
  derived and/or modified CDS sequence (wt) from hemagglutinin__InfluenzaA__ACO94738
augaagacuaucauugcuuugagcuacauucaaugucugguuuucgcucaaaaauuuccuggaaaugacaacagcacggcaacgcugugccuugggcaccaugcaguaccaaacggaacgguagugaaaacaaucacgaaugaccaaauugaaguuacuaaugcuacugagcugguucagaguuccucaacaggugaaauaugcgacaguccucaucagauccuugauggagaaaacugcacacuaauagaugcucuauugggagacccucagugugauggcuuccaaaauaagaauugggaccuuuuuguugaacgcagcaaagccuacagcaacuguuacccuuaugaugugccggauuaugccucccucaggucacuaguugccucauccggcacacuggaguuuaacaaugaaagcuucaauuggacuggagucacucaaaacggaacaagcucugcuugcauaaggagaucuaauaacaguuucuuuaguagauugaauugguugacccacucaaaauucaaauacccagcauugaacgugacuaugccaaacaaugaaaauuuugacaaauuguacauuugggggguucaccacccggguacggacaaugaccaaaucuuccuguaugcucgagcaucaggaagaaucacagucucuaccaaaagaagccaacaaacuguaaucccgaauaucggaucuagacccagaguaaggaauaucccuagcagaauaagcaucuauuggacaauaguaaaaccgggagacauacuuuugauuaacagcacagggaaucuaauugcucccagggguuacuucaaaauacgaagugggaaaagcucaauaaugagaucagaugcacccauuggcaaaugcaauucugaaugcaucacuccaaauggaagcauucccaaugacaaaccauuccaaaauguaaacaggaucacauacggagccugucccagauauguuaagcaaaacacucugaaauuggcaacagggaugcgaaauguaccagagaaacaaacuagaggcauauuuggcgcaaucgcugguuucauagaaaaugguugggagggaaugguggaugguugguacgguuucaggcaucaaaauucugagggaauaggacaagcagcagaucucaaaagcacucaagcagcaaucgaucaaaucaaugggaagcugaauagguugaucgggaaaaccaacgagaaauuccaucagauugaaaaagaauucucagaagucgaagggagaauucaggaccuugagaaauauguugaggacaccaaaauagaucucuggucauacaacgcggagcuucuuguugcccuggagaaccaacauacaauugaucuaacugauucagaaaugaacaaacuguuugaaaaaacaaagaagcaacugagggaaaaugcugaggauaugggcaaugguuguuucaaaaucuaccacaaaugugacaaugccugcauaggaucaaucagaaauggaacuuaugaccacgaugucuacagagaugaagcauuaaacaaccgguuccagaucaagggcguugagcugaagucaggauacaaagauuggauccuauggauuuccuuugccauaucauguuuuuugcuuugcauugcuuuguugggguucaucaugugggccugccaaaaaggcaacauuaggugcaacauuugcauuuga

SEQ ID NO: 34629 - RNA, 1701 nt, Artificial Sequence
  derived and/or modified CDS sequence (wt) from hemagglutinin__InfluenzaA__ACO94760
augaagacuaucauugcuuugagcuacauucuaugucugguuuucgcucaaaaauuuccuggaaaugacaacagcacggcgacgcugugccuugggcaccaugcaguaccaaacggaacgauagugaaaacaaucacgaaugaccaaauugaaguuacuaaugcuacugagcugguucagaguuccucaacaggugaaauaugcgacaguccucaucagauccuugauggagaaaacugcacacuaauagaugcucuauugggagacccucagugugauggcuuccaaaauaagaauugggaccuuuuuguugaacgcagcaaagccuacagcaacuguuacccuuaugaugugccggauuaugccucccuuaggucacuaguugccucauccggcacacuggaguuuaacaaugaaagcuucaauuggacuggagucacucaaaacggaacaagcucugcuugcauaaggagaucuaauaacaguuucuuuaguagauugaauugguugacccacucaaaauucaaauacccagcauugaaugugacuaugccaaacaaugaaaauuuugacaaauuguacauuugggggguucaccacccggguacggacaaugaccaaaucuuccuguaugcucaagcaucaggaagaaucacagucucuaccaaaagaagccaacaaacuguaaucccgaauaucggaucuagacccagaguaaggaauaucccuagcagaauaagcaucuauuggacaauaguaaaaccgggagacauacuuuugauuaacagcacagggaaucuaauugcuccuagggguuacuucaaaauacgaagugggaaaagcucaauaaugagaucagaugcacccauuggcaaaugcaauucugaaugcaucacuccaaauggaagcauucccaaugacaaaccauuccaaaauguaaacaggaucacauacggggccugucccagauauguuaagcaaaacacucugaaauuggcaacagggaugcgaaauguaccagagaaacaaacuagaggcauauuuggcgcaaucgcugguuucauagaaaaugguugggagggaaugguggaugguugguacgguuucaggcaucaaaauucugaaggaauaggacaagcagcagaucucaaaagcacucaagcagcaaucgaucaaaucaaugggaagcugaauagguugaucgggaaaaccaacgagaaauuccaucagauugagaaagaauucucagaagucgaagggagaauucaggaccuugagaaauauguugaggacaccaaaauagaucucuggucauacaacgcggagcuucuuguugcccuggagaaccaacauacaauugaucuaacugauucagaaaugaacaaacuguuugaaaaaacaaagaagcaacugagggaaaaugcugaggauaugggcaaugguuguuucaaaaucuaccacaaaugugacaaugccugcauaggaucaaucagaaauggaacuuaugaccacgaugucuacagagaugaagcauuaaacaaccgguuccagaucaagggcguugagcugaagucaggauacaaagauuggauccuauggauuuccuuugccauaucauguuuuuugcuuugcauugcuuuguugggguucaucaugugggccugccaaaaaggcaacauuaggugcaacauuugcauuuga

SEQ ID NO: 34630 - RNA, 1701 nt, Artificial Sequence
  derived and/or modified CDS sequence (wt) from hemagglutinin__InfluenzaA__ACO94771
augaagacuaucauugcuuugagcuacauucuaugucugguuuucgcucaaaaacuuccuggaaaugacaacagcacggcaacgcugugccuugggcaccaugcaguaccaaacggaacgauagugaaaacaaucacgaaugaccaaauugaaguuacuaaugcuacugagcugguucagaguuccucaacaggugaaauaugcgacaguccucaucagauccuugauggagaaaacugcacacuaauagaugcucuauugggagacccucagugugauggcuuccaaaauaagaaaugggaccuuuuuguugaacgcagcaaagccuacagcaacuguuacccuuaugaugugccggauuaugccucccuuaggucacuaguugccucauccggcacacuggaguuuaacaaugaaagcuucaauuggacuggagucacucaaaacggaacaagcucugcuugcauaaggagaucuaauaacaguuucuuuaguagauugaauugguugacccacuuaaaauucaaauacccagcauugaacgugacuaugccaaacaaugaacaauuugacaaauuguacauuugggggguucaccacccggguacggacaaugaccaaaucuuccuguaugcucaagcaucaggaagaaucacagucucuaccaaaagaagccaacaaacuguaaucccgaauaucggaucuagacccagaguaaggaauaucccuagcagaauaagcaucuauuggacaauaguaaaaccgggagacauacuuuugauuaacagcacagggaaucuaauugcuccuagggguuacuucaaaauacgaagugggaaaagcucaauaaugagaucagaugcacccauuggcaaaugcaauucugaaugcaucacuccaaauggaagcauucccaaugacaaaccauuccaaaauguaaacaggaucacauacggggccugucccagauauguuaagcaaaacacucugaaauuggcaacagggaugcgaaauguaccagagaaacaaacuagaggcauauuuggcgcaaucgcggguuucauagaaaaugguugggagggaaugguggaugguugguacgguuucaggcaucaaaauucugagggaagaggacaagcagcagaucucaaaagcacucaagcagcaaucgaucaaaucaaugggaagcugaauagauugaucgggaaaaccaacgagaaauuccaucagauugaaaaagaauucucagaagucgaagggagaauucaggaccuugagaaauauguugaggacacuaaaauagaucucuggucauacaacgcggagcuucuuguugcccuggagaaccaacauacaauugaucuaacugacucagaaaugaacaaacuguuugaaaaaacaaagaagcaacugagggaaaaugcugaggauaugggcaaugguuguuucaaaauauaccacaaaugugacaaugccugcauaggaucaaucagaaauggaacuuaugaccacgauguauacagagaugaagcauuaaacaaccgguuccagaucaagggaguugagcugaagucaggguacaaagauuggauccuauggauuuccuuugccauaucaugucuuuugcuuuguguugcuuuguugggguucaucaugugggccugccaaaaaggcaacauuaggugcaacauuugcauuuga

SEQ ID NO: 34631 - RNA, 1701 nt, Artificial Sequence; identical to SEQ ID NO: 34535
  derived and/or modified CDS sequence (wt) from hemagglutinin__InfluenzaA__ACO94782

SEQ ID NO: 34632 - RNA, 1701 nt, Artificial Sequence; identical to SEQ ID NO: 34563
  derived and/or modified CDS sequence (wt) from hemagglutinin__InfluenzaA__ACO94793

SEQ ID NO: 34633 - RNA, 1698 nt, Artificial Sequence
  derived and/or modified CDS sequence (wt) from hemagglutinin__InfluenzaA__ACO94804
augaaaguaaaacuacugguccuguuaugcacauuuacagcuacauaugcagacacaauauguauaggcuaccaugccaacaacucaaccgacacuguugacacaguacuugagaagaaugugacagugacacacucugucaaccugcuugaggacagucacaauggaaaauuaugucuauuaaaaggaauagccccacuacaauuggguaauugcagcguugccggauggaucuuaggaaacccagaaugcgaauuacugauuuccagggaaucaugguccuacauuguagaaaaaccaaauccugagaauggaacauguuacccagggcauuucgccgacuaugaggaacugagggagcaauugaguucaguaucuucauuugagagauucgaaauauuccccaaagaaagcucauggcccaaccacaccacaaccggaguaucagcaucaugcucccauaauggggaaagcaguuuuuacaaaaauuugcuauggcugacggggaagaaugguuuguacccaaaccugagcaaguccuaugcaaacaacaaagagaaagaaguccuuguacuaugggguguucaucacccgccuaacauagguaaccaaagggcucucuaucauacagaaaaugcuuaugucucuguagugucuucacauuauagcagaaaauucaccccagaaauagccaaaagacccaaaguaagagaucaagaaggaagaaucaacuacuacuggacucuacuugaacccggggauacaauaauauuugaggcaaauggaaaucuaauagcgccaagauaugcuuucgcacugaguagaggcuuuggaucaggaaucaucaacucaaaugcaccaauggauggaugugaugcgaagugccaaacaccucagggagcuauaaacagcagucuuccuuuccagaauguacacccugucacaauaggagaguguccaaaguaugucaggagugcaaaauuaaggaugguuacaggacuaaggaacaucccauccauucaauccagagguuuguuuggagccauugccgguuucauugaagggggguggacuggaaugguagaugguugguaugguuaucaucaucagaaugagcaaggaucuggcuaugcugcagaucaaaaaagcacacaaaaugccauuaaugggauuacaaacaaggugaauucuguaauugagaaaaugaacacucaauucacagcugugggcaaagaauucaacaaauuggaaagaaggauggaaaacuuaaauaaaaaaguugaugauggguuuauagacauuuggacauauaaugcagaauuguugguucuacuggaaaaugaaaggacuuuggauuuccaugacuccuaugugaagaaucuguaugagaaaguaaaaagccaauuaaagaauaaugccaaagaaauaggaaauggguguuuugaauucuaucacaaguguaacgaugaaugcauggagaguguaaaaaauggaacuuaugacuauccaaaauauuccgaagaaucaaaguuaaacagggagaaaauugauggagugaaauuggaaucaaugggagucuaucagauucuggcgaucuacucaacagucgccaguucucugguucuuuuggucucccugggggcaaucagcuucuggauguguuccaaugggucuuugcaguguagaauaugcaucuaa

SEQ ID NO: 34634 - RNA, 1701 nt, Artificial Sequence; identical to SEQ ID NO: 34314
  derived and/or modified CDS sequence (wt) from hemagglutinin__InfluenzaA__ACO94815

SEQ ID NO: 34635 - RNA, 1701 nt, Artificial Sequence
  derived and/or modified CDS sequence (wt) from hemagglutinin__InfluenzaA__ACO94848
augaagacuaucauugcuuugagcuacauucuaugucugguuuucgcucaaaaacuuccuggaaaugacaacagcacggcaacgcugugccuugggcaccaugcaguaccaaacggaacgauagugaaaacaaucacgaaugaccaaauugaaguuacuaaugcuacugagcugguucagaguuccucaacaggugaaauaugcgacaguccucaucagauccuugauggagaaaacugcacacuaauagaugcucuauugggagacccucagugugauggcuuccaaaauaagaaaugggaccuuuuuguugaacgcagcaaagccuacagcaacuguuacccuuaugaugugccggauuaugccucccuuaggucacuaguugccucauccggcacacuggaguuuaacaaugaaagcuucaauuggacuggagucacucaaaacggaacaagcucugcuugcauaaggagaacuaauaacaguuucuuuaguagauugaauugguugacccacuuaaaauucaaauacccagcauugaacgugacuaugccaaacaaugaaaaauuugacaaauuguacauuugggggguucaccacccggguacggacaaugaccaaaucuuccuguaugcucaagcaucaggaagaaucacagucucuaccaaaagaagccaacaaacuguaaucccgaauaucggaucuagacccagaguaaggaauauccccagcagaauaagcaucuauuggacaauaguaaaaccgggagacauacuuuugauuaacagcacagggaaucuaauugcuccuagggguuacuucaaaauacgaagugggaaaagcucaauaaugagaucagaugcacccauuggcaaaugcaauucugaaugcaucacuccaaauggaagcauucccaaugacaaaccauuccaaaauguaaacaggaucacauacggggccugucccagauauguuaagcaaaacacucugaaauuggcaacagggaugcgaaauguaccagagaaacaaacuagaggcauauuuggcgcaaucgcggguuucauagaaaaugguugggagggaaugguggaugguugguacgguuucaggcaucaaaauucugagggaauaggacaagcagcagaucucaaaagcacucaagcagcaaucgaucaaaucaaugggaagcugaauagguugaucgggaaaaccaacgagaaauuccaucagauugaaaaagaauucucagaagucgaagggaggauucaggaccuugagaaauauguugaggacaccaaaauagaucucuggucauacaacgcggagcuucuuguugcccuggagaaccaacauacaauugaucuaacugacucagaaaugaacaaacuguuugaaaaaacaaagaagcaacugagggaaaaugcugaggauaugggcaaugguuguuucaaaauauaccacaaaugugacaaugccugcauaggaucaaucagaaauggaacuuaugaccacgauguauacagagaugaagcauuaaacaaccgguuccagaucaagggcguugagcugaagucaggauacaaagauuggauccuauggauuuccuuugccauaucauguuuuuugcuuuguguugcuuuguugggguucaucaugugggccugccaaaaaggcaacauuaggugcaacauuugcauuuga

SEQ ID NO: 34636 - RNA, 1698 nt, Artificial Sequence
  derived and/or modified CDS sequence (wt) from hemagglutinin__InfluenzaA__ACO94859
augaaaguaaaacuacugguccuguuaugcacauuuacagcuacauaugcagacacaauauguauaggcuaccaugcuaacaacucgaccgacacuguugacacaguacuugaaaagaaugugacagugacacacucugucaaccugcuugagaacagccacaauggaaaacuaugucuauuaaaaggaauagccccacuacaauuggguaauugcagcguugccggguggaucuuaggaaauccagaaugcgaauuacugauuuccaaggagucaugguccuacauuguagaaaaaccaaauccugagaauggaacauguuacccagggcauuucgcugacuaugaggaacugagggagcaauugaguucaguaucuucauuugagagguucgaaauauuccccaaagaaagcucauggcccaaccacaccguaaccggagugucagcaucaugcucccauaauggggaaagcaguuuuuacagaaauuugcuauggcugacggggaagaaugguuuguacccaaaccugagcaaguccuaugcaaacaacaaagaaaaagaaguccuuguacuaugggguguucaucacccgccaaacauaggugaccaaaaggcccucuaucauacagaaaaugcuuauguuucuguagugucuucacauuauagcagaaaauucaccccagaaauagccaaaagacccaaaguaagagaucaagaaggaagaaucaacuacuauuggacucugcuugaacccggggauacaauaauauuugaggcaaauggaaaucuaauagcgccaagauaugcuuucgcacugaguagaggcuuuggaucaggaaucaucaacucaaaugcaccaauggauaaaugugaugcgaagugccaaacaccucagggagcuauaaacagcagucuuccuuuccagaacguacacccagucacaauaggagaguguccaaaguaugucagaagugcaaaauuaaggaugguuacaggacuaaggaacaucccauccauucaauccagagguuuguuuggagccauugccggauucauugaagggggguggacuggaaugguagaugguugguaugguuaucaucaucagaaugagcaaggaucuggcuaugcugcagaucaaaaaagcacacaaaaugccauuaaugggauuacaaacaaggugaauucuguaauugagaaaaugaacacucaauucacagcagugggcaaagaauucaacaaauuggaaagaagaauggaaaacuugaacaaaaaaguugaugauggguuuauagacauuuggaccuacaaugcagaacuguugguucuacuggaaaaugaaaggacuuuggauuuccaugacuccaaugugaagaaucuguaugagaaaguaaaaagccaguuaaagaacaaugcuaaagaaauaggaaauggguguuuugaauucuaucacaaguguaaugaugaaugcauggagaguguaaagaauggaacuuaugacuauccaaaauauuccgaagaaucaaaguuaaacagggagaaaauugauggagugaaauuggaaucaaugggagucuaucagauucuggcgaucuacucaacagucgccaguucucugguucuuuuggucucccugggggcaaucagcuucuggauguguuccaaugggucuuugcaguguagaauaugcaucuaa

SEQ ID NO: 34637 - RNA, 1698 nt, Artificial Sequence
  derived and/or modified CDS sequence (wt) from hemagglutinin__InfluenzaA__ACO94870
augaaaguaaaacuacugguccuguuaugcacauuuacagcuacauaugcggacacaauauguauaggcuaccaugcuaacaacucgaccgacacuguugacacaguacuugaaaagaaugugacagugacacacucugucaaccugcuugagaacagucacaauggaaaacuaugucuauuaaaaggaauagccccacuacaauuggguaauugcagcguugccggauggaucuuaggaaacccagaaugcgaauuacugauuuccaaggagucauggucuuacauuguagaaaaaccaaauccugagaauggaacauguuacccagggcauuucgcugacuaugaggaacugagggagcaauugaguucaguaucuucauuugagagguucgaaauauuccccaaagaaagcucauggcccaaccacaccguaaccggagugucagcaucaugcucccacaauggggaaagcaguuuuuacagaaauuugcuauggcugacggggaagaaugguuuguacccaaaccugagcaaguccuaugcaaacaacaaaggaaaagaaguccuuguacuaugggguguucaucacccgccaaacauaggugaccaaaauacccucuaucauacagaaaaugcuuauguuucuguagugucuucacauuauagcagaaaauucaccccagaaauagccaaaagacccaaaguaagagaucaagaaggaagaaucaacuacuacuggacucugcuugaacccggggauacaauaauauuugaggcaaauggaaaucuaauagcaccaagauaugcuuucgcacugaauagaggcuuuggaucaggaaucaucaacucaaaugcaccaauggauaaaugugaugcgaagugccaaacaccucagggagcuauaaacagcagucuuccuuuccagaacguacacccagucacaauaggagaguguccaaaguaugucaggagugcaaaauuaaggaugguuacaggacuaaggaacaucccauccauucaauccagagguuuguuuggagccauugccgguuucauugaagggggguggacuggaaugguagaugguugguaugguuaucaucaucagaaugagcaaggaucuggcuaugcugcagaucaaaaaagcacacaaaaugccauuaaugggauuacaaacaaggugaauucuguaauugagaaaaugaacacucaauucacagcagugggcaaagaauucaacaaauuggaaagaaggauggaaaacuugaauaaaaaaguugaugauggguuuauagacauuuggacauauaaugcagaacuguugguucuacuggaaaaugaaaggacuuuggauuuccaugacuccaaugugaagaaucuguaugagaaaguaaaaagccaguugaagaauaaugcuaaagaaauaggaaauggguguuuugaauucuaucacaaguguaacgaugaaugcauggagaguguaaagaauggaacuuaugacuauccaaaauauuccgaagaaucaaaguuaaacagggagaaaauugauggagugaaauuggaaucaaugggagucuaucagauucuggcgaucuacucaacagucgccaguucucugguucuuuuggucucccugggggcaaucagcuucuggauguguuccaaugggucuuugcaguguagaauaugcaucuaa

SEQ ID NO: 34638 - RNA, 1701 nt, Artificial Sequence
  derived and/or modified CDS sequence (wt) from hemagglutinin__InfluenzaA__ACO94881
augaagacuaucauugcuuugagcuacauccuaugucugguuuucgcucaaaaacuucccggaaaugacaacagcacggcaacgcugugccuugggcaccaugcaguaccaaacggaacgauagugaaaacaaucacgaaugaccaaauugaaguuacuaaugcuacugagcugguucagaguuccucaacagguggaauaugcgacaguccucaucagauccuugauggagaaaacugcacacuaauagaugcucuauugggagacccucagugugauggcuuccaaaauaagaaaugggaccuuuuuguugaacgcagcaaagccuacagcaacuguuacccuuaugaugugccggauuaugccucccuuaggucacuaguugccucauccggcacacuggaguuuaacaaugaaagcuucgauuggacuggagucacucagaauggaacaagcucuucuugcaaaaggagaucuaauaacaguuucuuuaguagauugaauugguugacccacuuaaaauacaaauacccagcauugaacgugacuaugccaaacaaugaaaaauuugacaaauuguacauuugggggguucaccacccggguacggacagugaccaaaucagccuauaugcucaagcaucaggaagaaucacagucucuaccaaaagaagccaacaaacuguaaucccgaauaucggaucuagacccaggguaagggaugucuccagccggauaagcaucuauuggacaauaguaaaaccgggagacauacuuuugauuaacagcacagggaaucuaauagcuccucgggguuacuucaaaauacgaagugggaaaagcucaauaaugagaucagaugcacccauuggcaaaugcaauucugaaugcaucacuccaaauggaagcauucccaaugacaaaccauuucaaaauguaaacaggaucacauauggggccugucccagauauguuaagcaaaacacucugaaauuggcaacagggaugcgaaauguaccagagaaacaaacuagaggcauauuuggcgcaaucgcggguuucauagaaaaugguugggagggaaugguggacgguugguacgguuucaggcaucaaaauucugagggcacaggacaagcagcagaucucaaaagcacucaagcagcaaucaaccaaaucaaugggaaacugaauagguuaauagggaaaacaaacgagaaauuccaucagauugaaaaagaauucucggaaguagaagggagaauucaggaccucgagaaauauguugaggacacuaaaauagaucucuggucauacaacgcggagcuucuuguugcccuggagaaccaacauacaauugaucuaacugacucagaaaugaacaaacuguuugaaagaacaaagaagcaacugagggaaaaugcugaggauaugggcaaugguuguuucaaaauauaccacagaugugacaaugccugcauagggucaaucagaaauggaacuuaugaccaugauguguacagagaugaagcauuaaacaaccgguuccagaucaaagguguugagcugaagucaggauacaaagauuggauccuauggauuuccuuugccauaucauguuuuuugcuuuguguugcuuuguugggguucaucaugugggccugccaaaaaggcaacauuaggugcaacauuugcauuuga

SEQ ID NO: 34639 - RNA, 1701 nt, Artificial Sequence
  derived and/or modified CDS sequence (wt) from hemagglutinin__InfluenzaA__ACO94892
augaagacuaucauugcuuugagcuacauucuaugucugguuuucgcucaaaaacuucccggaaaugacaacagcacggcaacgcugugccuugggcaccaugcaguaccaaacggaacgauagugaaaacaaucacgaaugaccaaauugaaguuacuaaugcuacugagcugguucagaguuccucaacagguggaauaugcgacaguccucaucagauccuugauggagaaaacugcacacuaauagaugcucuauugggagacccucagugugauggcuuccaaaauaagaaaugggaccuuuuuguugaacgcagcaaagccuacagcaacuguuacccuuaugaugugccggauuaugccucccuuaggucacuaguugccucauccggcacacuggaguuuaacaaugaaagcuucaauuggacuggagucacucagaauggaacaagcucugcuugccaaaggagaucuaauaaaaguuucuuuaguagauugaauugguugacccacuuaaaauucaaauacccagcauugaacgugacuaugccaaacaaugaaaaauuugacaaauuguacauuugggggguucaccacccggguacggacaaugaccaaaucagccuauaugcucaaacaucaggaagaaucacaaucucuaccaaaagaagccaacaaacuguaaucccgaauaucggaucuagacccaggguaagggauguccccagcagaauaagcaucuauuggacaauaguaaaaccgggagacauacuuuugauuaacagcacagggaaucuaauugcuccucgggguuacuucaaaauacgaagugggaaaagcucaauaaugagaucagaugcacccauugucaaaugcaauucugaaugcaucacuccaaauggaagcauucccaaugacaaaccauuucaaaauguaaacaggaucacauauggggccugccccagauauguuaagcaaaacacucugaaauuggcaacagggaugcgaaauguaccagagagacaaacuagaggcauauuuggcgcaaucgcggguuucauagaaaaugguugggagggaaugguggacgguugguacgguuucaggcaucaaaauucugagggcacaggacaagcagcagaucucaaaagcacucaagcagcaaucaaccaaaucaaugggaaacugaauagguuaaucgggaaaacaaacgagaaauuccaucagauugaaaaagaauucucagaaguagaagggagaauucaggaccucgagaaauauguugaggacacuaaaauagaucucuggucauacaacgcggagcuucuuguugcccuggagaaccaacauacaauugaucuaacugacucagaaaugaacaaacuguuugaaagaacaaagaagcaacugagggaaaaugcugaggauaugggcaaugguuguuucaaaauauaccacaaaugugacaaugccugcauagggucaaucagaaauggaacuuaugaccaugauguauacagagaugaagcauuaaacaaccgguuccagaucaaagguguugagcugaagucaggauacaaagauuggauccuauggauuuccuuugccauaucauguuuuuugcuuuguguugcuuuguugggguucaucaugugggccugccaaaaaggcaacauuaggugcaacauuugcauuuaa

SEQ ID NO: 34640 - RNA, 1701 nt, Artificial Sequence
  derived and/or modified CDS sequence (wt) from hemagglutinin__InfluenzaA__ACO94903
augaagacuaucauugcuuugagcuacauucuaugucugguuuucgcucaaaaacuucccggaaaugacaacagcacggcaacgcugugccuugggcaccaugcaguaccaaacggaacgauagugaaaacaaucacgaaugaccaaauugaaguuacuaaugcuacugagcugguucagaguuccucaacagguggaauaugcgacaguccucaucagauccuugauggagaaaacugcacacuaauagaugcucuauugggagacccucagugugauggcuuccaaaauaagaaaugggaccuuuuuguugaacgcagcgaagccuacagcaacuguuacccuuaugaugugccggauuaugccucccuuaggucacuaguugccucauccggcacacuggaguuuaacaaugaaagcuucaauuggacuggagucacucaaaauggaacaagcucugcuugcaaaaggagaucuaauaaaaguuucuuuaguagauugaauugguugacccacuuaaaauucaaauacccagcauugaacgugacuaugccaaacaaugaaaaauuugacaaauuguacauuugggggguucaccacccggguacagacaaugaccaaaucagccuauaugcucaagcaucaggaagaaucacagucucuaccaaaagaagccaacaaacuguaaucccgaauaucggaucuagacccaggguaagggauguccccagcagaauaagcaucuauuggacaauaguaaaaccgggagacauacuuuugauuaacagcacagggaaucuaauugcuccucgggguuacuucaaaauacgaagugggaaaagcucaauaaugagaucagaugcacccauuggcaaaugcaauucugaaugcaucacuccaaauggaagcauucccaaugacaaaccauuucaaaauguaaacaggaucacauauggggccugucccagauauguuaagcaaaacacccugaaauuggcaacagggaugcgaaauguaccagagaaacaaacuagaggcauauuuggcgcaaucgcggguuucauagaaaaugguugggagggaaugguggacgguugguacgguuucaggcaucaaaauucugagggaacaggacaagcagcagaucucaaaagcacucaagcagcaaucaaccaaaucaaugggaagcugaauagguugaucgggaaaacaaacgagaaauuucaucagauugaaaaagaauucucagaaguagaagggagaauucaggaccucgagaaauauguugaggacacuaaaauagaucucuggucauacaacgcggagcuucuuguugcccuggagaaccaacauacaauugaucuaacugacucagaaaugaacaaacuguuugaaagaacaaagaagcaacugagggaaaaugcugaggauaugggcaaugguuguuucaaaauauaccacaaaugugacaaugccugcauagggucaaucagaaauggaacuuaugaccaugauguauacagagaugaagcauuaaacaaccgguuccagaucaaagguguugagcugaagucaggauacaaagauuggauccuauggauuuccuuugccauaucauguuuuuugcuuuguguugcuuuguugggguucaucaugugggccugccaaaaaggcaacauuaggugcaacauuugcauuuga

SEQ ID NO: 34641 - RNA, 1701 nt, Artificial Sequence
  derived and/or modified CDS sequence (wt) from hemagglutinin__InfluenzaA__ACO94925
augaagacuaucauugcuuugagcuacauucuaugucugguuuucgcccaaaaacuucccggaaaugacaacagcacggcaacgcugugccuugggcaccaugcagugccaaacggaacgguagugaaaacaaucacgaaugaccaaauugaaguuacuaaugcuacugagcugguucagaguuccucaacagguggaauaugcgacaguccucaucagauccuugauggagaaaacugcacacuaauagaugcucuauugggagacccucagugugauggcuuccaaaauaagaaaugggaccuuuuuguugaacgcagcaaagccuacagcaacuguuacccuuaugaugugccggauuaugccucccuuaggucacuaguugccucauccggcacacuggaguuuaacaaugaaagcuucaauuggacuggagucacucaaaauggaacaagcucugcuugcaaaaggagaucuaauaaaaguuucuuuaguagauugaauugguugacccacuuaaaauucaaauacccagcauugaacgugacuaugccaaacaaugaaaaauuugacaaauuguacauuugggggguucaccacccggguacggacaaugaccaaaucagccuauaugcucaagcaucaggaagaaucacagucucuaccaaaagaagccaacaaacuguaaucccgaauaucggaucuagacccaggguaagggauguccccagcagaauaagcaucuauuggacaauaguaaaaccgggagacauacuuuugauuaacagcacagggaaccuaauugcuccucgggguuacuucaaaauacgaagugggaaaagcucaauaaugagaucagaugcacccauuggcaaaugcaauucugaaugcaucacuccaaauggaagcauucccaaugacaaaccauuucaaaauguaaacaggaucacauauggggccugucccagauauguuaagcaaaacacucugaaauuggcaacagggaugcgaaauguaccagagaaacaaacuagaggcauuuuuggcgcaaucgcggguuucauagaaaaugguugggagggaaugguggacgguugguacgguuucaggcaucaaaauucugagggaacaggacaagcagcagaucucaaaagcacucaagcagcaaucaaccaaaucaaugggaagcugaauagguugaucgggaaaacaaacgagaaauuccaucagauugaaaaagaauucucagaaguagaagggagaauucaggaccucgagaaauauguugaggacacuaaaauagaucucuggucauacaacgcggagcuucuuguugcccuggagaaccaacauacaauugaucuaacugacucagaaaugaacaaacuguuugaaagaacaaagaagcaacugagggaaaaugcugaggauaugggcaaugguuguuucaaaauauaccacaaaugugacaaugccugcauagggucaaucagaaauggaacuuaugaccaugauguauacagagaugaagcauuaaacaaccgguuccagaucaaagguguugagcugaagucaggauacaaagauuggauccuauggauuuccuuugccauaucauguuuuuugcuuuguguugcuuuguugggguucaucaugugggccugccaaaaaggcaacauuaggugcaacauuugcauuuga

SEQ ID NO: 34642 - RNA, 1701 nt, Artificial Sequence
  derived and/or modified CDS sequence (wt) from hemagglutinin__InfluenzaA__ACO94936
augaagacuaucauugcuuugagcuacauccuaugucugguuuucgcucaaaaacuucccggaaaugacaacagcacggcaacgcugugccuugggcaccaugcaguaccaaacggaacgauagugaaaacaaucacgaaugaccaaauugaaguuacuaaugcuacugagcugguucagaguuccucaacagguggaauaugcgacaguccucaucagauccuugauggagaagacugcacacuaauagaugcucuauugggagacccucagugugauggcuuccaaaauaagaaaugggaccuuuuuguugaacgcagcaaagccuacagcaacuguuacccuuaugaugugccggauuaugccucccuuaggucacuaguugccucauccggcacacuggaguuuaacaaugaaagcuucgauuggacuggagucacucagaauggaacaagcucuucuugcaaaaggagaucuaauaacaguuucuuuaguagauugaauugguugacccacuuaaaauacaaauacccagcauugaacgugacuaugccaaacaaugaaaaauuugacaaauuguacauuugggggguucaccacccggguacggacagugaccaaaucagccuauaugcucaagcaucaggaagaaucacagucucuaccaaaagaagccaacaaacuguaaucccgaauaucggaucuagacccaggguaagggaugucuccagccggauaagcaucuauuggacaauaguaaaaccgggagacauacuuuugauuaacagcacagggaaucuaauagcuccucgggguuacuucaaaauacgaagugggaaaagcucaauaaugagaucagaugcacccauuggcaaaugcaauucugaaugcaucacuccaaauggaagcauucccaaugacaaaccauuucaaaauguaaacaggaucacauauggggccugucccagauauguuaagcaaaacacucugaaauuggcaacagggaugcgaaauguaccagagaaacaaacuagaggcauauuuggcgcaaucgcggguuucauagaaaaugguugggagggaaugguggacgguugguacgguuucaggcaucaaaauucugagggcacaggacaagcagcagaucucaaaagcacucaagcagcaaucaaccaaaucaaugggaaacugaauagguuaauagggaaaacaaacgagaaauuccaucagauugaaaaagaauucucggaaguagaagggagaauucaggaccucgagaaauauguugaggacacuaaaauagaucucuggucauacaacgcggagcuucuuguugcccuggagaaccaacauacaauugaucuaacugacucagaaaugaacaaacuguuugaaagaacaaagaagcaacugagggaaaaugcugaggauaugggcaaugguuguuucaaaauauaccacaaaugugacaaugccugcauagggucaaucagaaauggaacuuaugaccaugauguguacagagaugaagcauuaaacaaccgguuccagaucaaagguguugagcugaagucaggauacaaagauuggauccuauggauuuccuuugccauaucauguuuuuugcuuuguguugcuuuguugggguucaucaugugggccugccaaaaaggcaacauuaggugcaacauuugcauuuga

SEQ ID NO: 34643 - RNA, 1701 nt, Artificial Sequence
  derived and/or modified CDS sequence (wt) from hemagglutinin__InfluenzaA__ACO94947
augaagacuaucauugcuuugagcuacauucuaugucugguuuucgcucaaaaacuucccggaaaugacaacagcacggcaacgcugugccuugggcaccaugcaguaccaaacggaacgauagugaaaacaaucacgaaugaccaaauugaaguuacuaaugcuacugagcugguucagaguuccucaacagguggaauaugcgacaguccucaucagauccuugauggagaaaacugcacacuaauagaugcucuauugggagacccucagugugauggcuuccaaaauaagaaaugggaccuuuuuguugaacgcagcaaagccuacagcaacuguuacccuuaugaugugccggauuaugccucccuuaggucacuaguugccucauccggcacacuggaguuuaacaaugaaagcuucaauuggacuggagucacucaaaauggaacaagcucugcuugcaaaaggagaucuaauaaaaguuucuuuaguagauugaauugguugacccacuuaaaauucaaauacccagcauugaacgugacuaugccaaacaaugaaaaauuugacaaauuguacauuugggggguucaccacccggguacggacaaugaccaaaucagccuauaugcucaagcaucaggaagaaucacagucucuaccaaaagaagccaacaaacuguaaucccgaauaucggaucuagacccaggguaagggauguccccagcagaauaagcaucuauuggacaauaguaaaaccgggagacauacuuuugauuaacagcacagggaaucuaauugcuccucgggguuacuucagaauacgaagugggaaaagcucaauaaugagaucagaugcacccauuggcaaaugcaauucugaaugcaucacuccaaauggaagcauucccaaugacaaaccauuucaaaauguaaacaggaucacauauggggccugucccagauauguuaagcaaaacacucugaaauuggcaacagggaugcgaaauguaccagagaaacaaacuagaggcauauuuggcgcaaucgcggguuucauagaaaaugguugggagggaaugguggacgguugguacgguuucaggcaucaaaauucugagggaacaggacaagcagcagaucucaaaagcacucaagcagcaaucaaccaaaucaaugggaagcugaauagguugaucgggaaaacaaacgagaaauuccaucagauugaaaaagaauucucagaaguagaagggagaauucaggaccucgagaaauauguugaggacacuaaaauagaucucuggucauacaacgcggagcuucuuguugcccuggagaaccaacauacaauugaucuaacugacucagaaaugaacaaacuguuugaaagaacaaagaagcaacugagggaaaaugcugaggauauggguaaugguuguuucaaaauauaccacaaaugugacaaugccugcauagggucaaucagaaauggaacuuaugaccaugauguauacagagaugaagcauuaaacaaccgguuccagaucaaagguguugagcugaagucaggauacaaagauuggauccuauggauuuccuuugccauaucauguuuuuugcuuuguguugcuuuguugggguucaucaugugggccugccaaaaaggcaacauuaggugcaacauuugcauuuga

SEQ ID NO: 34644 - RNA, 1701 nt, Artificial Sequence
  derived and/or modified CDS sequence (wt) from hemagglutinin__InfluenzaA__ACO95153
augaagacuaucauugcuuugagcuacauucuaugucugguuuucgcucaaaaacuucccggaaaugacaacagcacggcaacgcugugccuugggcaccaugcaguaccaaacggaacgauagugaaaacaaucacaaaugaccaaauugaaguuacuaaugcuacugagcugguucagaguuccucaacagguggaauaugcgacaguccucaucagauccucgauggagaaaacugcacacuaauagaugcucuauugggagacccucagugugauggcuuccaaaauaagaaaugggaccuuuuuguugaacgcagcaaagccuacagcaacuguuacccuuaugaugugccggauuaugccucccuuaggucacuaguugccucauccggcacacuggaguuuaacaaugaaagcuucaauuggacuggagucacucagaauggaacaagcucugcuugcaaaaggagaucuaauaacaguuucuuuaguagauugaauugguugacccacuuaaaauucaaauacccagcauugaacgugacuaugccaaacaaugaaaacuuugacaaauuguacauuugggggguucaccacccggguacggacaaugaccaaaucagccuauaugcccaagcaucaggaagaaucacagucucuaccaaaagaagccaacaaacuguaaucccgaauaucggaucuagacccaggguaagggauaucuccagcagaauaagcaucuauuggacaauaguaaaaccgggagacauacuuuugauuaacagcacagggaaucuaauugcuccucgggguuacuucaaaauacgaagugggaaaagcucaauaaugagaucagaugcacccauuggcaaaugcaauucugaaugcaucacuccaaauggaagcauucccaaugacaaaccauuucaaaauguaaacaggaucacauauggggccugucccagauauguuaagcaaaacacucugaaauuggcaacagggaugcgaaauguaccagagacacaaacuagaggcauauuuggcgcaaucgcagguuucauagaaaaugguugggagggaaugguggacgguugguacgguuucaggcaucaaaauucugagggcacaggacaagcagcagaucuuaaaagcacucaagcagcaaucaaccaaaucaaugggaaacugaauagguuaaucgggaaaacaaacgagaaauuccaucagauugaaaaagaauucucagaaguagaagggagaauucaggaccucgagaaauauguugaggacacuaaaauagaucucuggucauacaacgcggagcuucuuguugcccuggagaaccaacauacaauugaucuaacugacucagaaaugaacaaacuguuugaaagaacaaagaagcaacugagggaaaaugcugaggauaugggcaaugguuguuucaaaauauaccacaaaugugacaaugccugcauagggucaaucagaaauggaacuuaugaccaugauguauacagagaugaagcauuaaacaaccgguuccagaucaaagguguugagcugaagucaggauacaaagauuggauccuauggauuuccuuugccauaucauguuuuuugcuuuguguugcuuuguugggguucaucaugugggccugccaaaaaggcaacauuaggugcaacauuugcauuuga

SEQ ID NO: 34645 - RNA, 1701 nt, Artificial Sequence
  derived and/or modified CDS sequence (wt) from hemagglutinin__InfluenzaA__ACO95171
augaagacuaucauugcuuugagcuacauucuaugucugguuuucgcucaaaaacuucccggaaaugacaacagcacggcaacgcugugccuugggcaccaugcaguaccaaacggaacgauagugaaaacaaucacaaaugaccaaauugaaguuacuaaugcuacugagcugguucagaguuccucaacagguggaauaugcgacaguccucaucagauccucgauggagaaaacugcacacuaauagaugcucuauugggagacccucagugugauggcuuccaaaauaagaaaugggaccuuuuuguugaacgcagcaaagccuacagcaacuguuacccuuaugaugugccggauuaugccucccuuaggucacuaguagccucauccggcacacuggaguuuaacaaugaaaguuucaauuggacuggagucacucagaauggaacaagcucugcuugcaaaaggagaucuaauaacaguuucuuuaguagauugaauugguugacccacuuaaaauucaaauacccagcauugaacgugacuaugccaaacaaugaaaaauuugacaaauuguacauuugggggguucaccacccggguacggacaaugaccaaaucagccuauaugcucaagcaucaggaagaaucacagucucuaccaaaagaagccaacaaacuguaaucccgaauaucggaucuagacccaggguaagggauaucuccagcagaauaagcaucuauuggacaauaguaaaaccgggagacauacuuuugauuaacagcacagggaaucuaauugcuccucgggguuacuucaaaauacgaagugggaaaagcucaauaaugagaucagaugcacccauuggcaaaugcaauucugaaugcaucacuccaaauggaagcauucccaaugacaaaccauuucaaaauguaaacaggaucacauauggggccugucccagauauguuaagcaaaacacucugaaauuggcaacagggaugcgaaauguaccagagacacaaacuagaggcauauuuggcgcaaucgcagguuucauagaaaaugguugggagggaaugguggacgguugguacgguuucaggcaucaaaauucugagggcacaggacaagcagcagaucucaaaagcacucaagcagcaaucaaccaaaucaaugggaaacugaauagguuaaucgggaaaacaaacgagaaauuccaucagauugaaaaagaauucucagaaguagaagggagaauucaggaccucgagaaauauguugaggacacuaaaauagaucucuggucauacaacgcggagcuucuuguugcccuggagaaccaacauacaauugaucuaacugacucagaaaugaacaaacuguuugaaagaacaaagaagcaacugagggaaaaugcugaggauaugggcaaugguuguuucaaaauauaccacaaaugugacaaugccugcauagggucaaucagaaaugaaacuuaugaccaugauguauacagagaugaagcauuaaacaaccgguuccagaucaaagguguugagcugaagucaggauacaaagauuggauccuauggauuuccuuugccauaucauguuuuuugcuuuguguugcuuuguugggguucaucaugugggccugccaaaaaggcaacauuaggugcaacauuugcauuuga

SEQ ID NO: 34646 - RNA, 1701 nt, Artificial Sequence
  derived and/or modified CDS sequence (wt) from hemagglutinin__InfluenzaA__ACO95193
augaagacuaucauugcuuugagcuacauucuaugucugguuuucgcucaaaaacuucccggaaaugacaaaagcacggcaacgcugugccuugggcaccaugcaguaccaaacggaacgauagugaaaacaaucacaaaugaccaaauugaaguuacuaaugcuacugagcugguucagaguuccucaacagguggaauaugcgacaguccucaucagauccucgauggagaaaacugcacacuaauagaugcucuauugggagacccucagugugauggcuuccaaaauaagaaaugggaccuuuuuguugaacgcagcaaagccuacagcaacuguuacccuuaugaugugccggauuaugccucccuuaggucacuaguugccucauccggcacacuggaguuuaacaaugaaaacuucaauuggacuggagucacucagaauggaacaagcucugcuugcaaaaggagaucuaauaacaguuucuuuaguagauugaauugguugacccauuuaaaauucaaauacccagcauugaacgugacuaugccaaacaaugaaaaauuugacaaauuguacauuugggggguucaccacccggguacggacaaugaccaaaucagccuauaugcccaagcaucaggaagaaucacagucucuaccaaaagaagccaacaaacuguaaucccgaauaucggaucuagacccaggguaagggauaucuccagcagaauaagcaucuauuggacaauaguaaaaccgggagacauacuuuugauuaacagcacagggaaucuaauugcuccucgggguuacuucaaaauacgaagugggaaaagcucaauaaugagaucagaugcacccauuggcaaaugcaguucugaaugcaucacuccaaauggaagcauucccaaugacaaaccauuucaaaauguaaacaggaucacauauggggccugucccagauauguuaagcaaaacacucugaaauuggcaacagggaugcgaaauguaccagagacacaaacuagaggcauauuuggcgcaaucgcagguuucauagaaaaugguugggagggaaugguggacgguugguacgguuucaggcaucaaaauucugagggcacaggacaagcagcagaucuuaaaagcacucaagcagcaaucaaccaaaucaaugggaaacugaauagguuaaucgggaaaacaaacgagaaauuccaucagauugaaaaagaauucucagaaguagaagggagaauucaggaccucgagaaauauguugaggacacuaaaauagaucucuggucauacaacgcggagcuucuuguugcccuggagaaccaacauacaauugaucuaacugacucagaaaugaacaaacuguuugaaagaacaaagaagcaacugagggaaaaugcugaggauaugggcaaugguuguuucaaaauauaccacaaaugugacaaugccugcauagggucaaucagaaauggaacuuaugaccaugauguauacagagaugaagcauuaaacaaccgguuccagaucaaagguguugagcugaagucaggauacaaagauuggauccuauggauuuccuuugccauaucauguuuuuugcuuuguguugcuuuguugggguucaucaugugggccugccaaaaaggcaacauuaggugcaacauuugcauuuaa

SEQ ID NO: 34647 - RNA, 1701 nt, Artificial Sequence
  derived and/or modified CDS sequence (wt) from hemagglutinin__InfluenzaA__ACO95204
augaagacuaucauugcuuugagcuacauucuaugucugguuuucgcucaaaaacuucccggaaaugacaacagcacggcaacgcugugccuugggcaccaugcaguaccaaacggaacgauagugaaaacaaucacaaaugaccaaauugaaguuacuaaugcuacugagcugguucagaguuccucaacagguggaauaugcgacaguccucaucagauccucgauggagaaaacugcacacuaauagaugcucuauugggagacccucagugugauggcuuccaaaauaagaaaugggaccuuuuuguugaacgcagcaaagccuacagcaacuguuacccuuaugaugugccggauuaugccucccuuaggucacuaguagccucauccggcacacuggaguuuaacaaugaaagcuucaauuggacuggagucacucagaauggaacaagcucugcuugcaaaaggagaucuaauaacaguuucuuuaguagauugaauugguugacccacuuaaaauucaaauacccagcauugaacgugacuaugccaaacaaugaaaaauuugacaaauuguacauuugggggguucaccacccggguacggacaaugaccaaaucagccuauaugcucaagcaucaggaagaaucacagucucuaccaaaagaagccaacaaacuguaaucccgaauaucggaucuagacccaggguaagggauauccccagcagaauaagcaucuauuggacaauaguaaaaccgggagacauacuuuugauuaacagcacagggaaucuaauugcuccucgggguuacuucaaaauacgaagugggaaaagcucaauaaugagaucagaugcacccauuggcaaaugcaauucugaaugcaucacuccaaauggaagcauucccaaugacaaaccauuucaaaauguaaacaggaucacauauggggccugucccagauauguuaagcaaaacacucugaaauuggcaacagggaugcgaaauguaccagagacacaaacuagaggcauauuuggcgcaaucgcagguuucauagaaaaugguugggagggaaugguggacgguugguacgguuucaggcaucaaaauucugagggcacaggacaagcagcagaucucaaaagcacucaagcagcaaucaaccaaaucaaugggaaacugaauagguuaaucgggaaaacaaacgagaaauuccaucagauugaaaaagaauucucagaaguagaagggagaauucaggaccucgagaaauauguugaggacacuaaaauagaucucuggucauacaacgcggagcuucuuguugcccuggagaaccaacauacaauugaucuaacugacucagaaaugaacaaacuguuugaaagaacaaagaagcaacugagggaaaaugcugaggauaugggcaaugguuguuucaaaauauaccacaaaugugacaaugccugcauagggucaaucagaaaugaaacuuaugaccaugauguauacagagaugaagcauuaaacaaccgauuccagaucaaagguguugagcugaagucaggauacaaagauuggauccuauggauuuccuuugccauaucauguuuuuugcuuuguguugcuuuguugggguucaucaugugggccugccaaaaaggcaacauuaggugcaacauuugcauuuga

SEQ ID NO: 34648 - RNA, 1701 nt, Artificial Sequence
  derived and/or modified CDS sequence (wt) from hemagglutinin__InfluenzaA__ACO95215
augaagacuaucauugcuuugagcuacauucuaugucuaguuuuugcucaaaaacuucccggaaaugacaacagcacggcaacgcugugccuugggcaccaugcaguaccaaacggaacgauagugaaaacaaucacaaaugaccaaauugaaguuacuaaugcuacugagcugguucagaguuccucaacagguggaauaugcgacaguccucaucagauccucgauggagaaaacugcacacuaauagaugcucuauugggagacccucagugugauggcuuccaaaauaagaaaugggaccuuuuuguugaacgcagcaaagccuacagcaacuguuacccuuaugaugugccggauuaugccucccuuaggucacuaauugccucauccggcacacuggaguuuaacaaugaaagcuucaauuggacuggagucacucagaauggaacaagcucugcuugcaaaaggagaucuaauaacaguuucuuuaguagauugaauugguugacccacuuaaaauucaaauacccagcauugaacgugacuaugccaaacaaugaaaaauuugacaaauuguacauuugggggguucaccacccggguacggacaaugaccaaaucagccuauaugcucaagcaucaggaagaaucacagucucuaccaaaagaagccaacaaacuguaaucccgaauaucggaucuagacccaggguaagggauaucuccagcagaauaagcaucuauuggacaauaguaaaaccgggagacauacuuuugauuaacagcacagggaaucuaauugcuccucgggguuacuucaaaauacgaagugggaaaagcucaauaaugagaucagaugcacccauuggcaaaugcaauucugaaugcaucacuccaaauggaagcauucccaaugacaaaccauuucaaaauguaaacaggaucacauauggggccugucccagauauguuaagcaaaacacucugaaauuggcaacagggaugcgaaauguaccagagacacaaacuagaggcauauuuggcgcaaucgcagguuucauagaaaaugguugggagggaaugguggacgguugguacgguuucaggcaucaaaauucugagggcacaggacaagcagcagaucucaaaagcacucaagcagcaaucaaccaaaucaaugggaaacugaauagguuaaucgggaaaacaaacgagaaauuccaucagauugaaaaagaauucucagaaguagaagggagaauucaggaccucgagaaauauguugaggacacuaaaauagaucucuggucauacaacgcggagcuucuuguugcccuggagaaccaacauacaauugaucuaacugacucagaaaugaacaaacuguuugaaagaacaaagaagcaacugagggaaaaugcugaggauaugggcaaugguuguuucaaaauauaccacaaaugugacaaugccugcauagggucaaucagaaaugaaacuuaugaccaugauguauacagagaugaagcauuaaacaaccgguuccagaucaaaaguguugagcugaagucaggauacaaagauuggauccuauggauuuccuuugccauaucauguuuuuugcuuuguguugcuuuguugggguucaucaugugggccugccaaaaaggcaacauuaggugcaacauuugcauuuga

SEQ ID NO: 34649 - RNA, 1701 nt, Artificial Sequence
  derived and/or modified CDS sequence (wt) from hemagglutinin__InfluenzaA__ACO95226
augaagacuaucauugcuuugagcuacauucuaugucugguuuuugcucaaaaacuucccggaaaugacaacagcacggcaacgcugugccuugggcaccaugcaguaccaaacggaacgauagugaaaacaaucacgaaugaccaaauugaagucacuaaugcuacugagcugguucagaguuccucaacagguggaauaugcgacaguccucaucagauccuugauggagaaaacugcacacuaauagaugcucuauugggagacccucagugugauggcuuccaaaauaagaaaugggaccuuuuuguugaacgcagcaaagccuacagcaacuguuacccuuaugaugugccggauuaugccucccuuagaucacuaguugccucauccggcacacuggaguuuaacaaugaaagcuucaauuggacuggagucacucaaaauggaacaagcucugcuugcaaaaggagaucuaauaacaguuucuuuaguagauugaauugguugacccacuuaaaauucaaauacccagcauugaacgugacuaugccaaacaaugaaaaauuugacaaacuguacauuugggggguucaccacccggguacggacaaugaccaaaucagccuauaugcucaagcaucaggaagaaucacagucucuaccaaaagaagccaacaaacuguaaucccgaguaucggaucuagacccaggauaagggauguccccagcagaauaagcaucuauuggacaauaguaaaaccgggagacauacuuuugauuaacagcacagggaaucuaauugcuccucgggguuacuucaaaauacgaagugggaaaagcucaauaaugagaucagaugcacccauuggcaaaugcaauucugaaugcaucacuccaaauggaagcauucccaaugacaaaccauuucaaaauguaaacaggaucacauauggggccugucccagauauguuaagcaaaacacucugaaauuggcaacagggaugcgaaauguaccagagaaacaaacuagaggcauauuuggcgcaaucgcggguuucauagaaaaugguugggagggaaugguggacgguugguacgguuucaggcaucaaaacucugagggaacaggacaagcagcagaucucaaaagcacucaagcagcaaucaaccaaaucaaugggaagcugaauagguugaucgggaaaacaaacgagaaauuccaucagauugaaaaagaauucucagaaguagaagggagaauucaggaccucgagaaauauguugaggacacuaaaauagaucucuggucauacaacgcggagcuucuuguggcccuggagaaccaacauacaauugaucuaacugacucagaaaugaacaaacuguuugaaagaacaaagaagcaacugagggaaaaugcugaggauaugggcaaugguuguuucaaaauauaccacaaaugugacaaugccugcauagggucaaucagaaauggaacuuaugaccaugauguauacagagaugaagcauuaaacaaccgguuccagaucaaagguguugaguugaagucaggauacaaagauuggauccuauggauuuccuuugccauaucauguuuuuugcuuuguguugcuuuguugggguucaucaugugggccugccaaaaaggcaacauuaggugcaacauuugcauuuga

SEQ ID NO: 34650 - RNA, 1701 nt, Artificial Sequence
  derived and/or modified CDS sequence (wt) from hemagglutinin__InfluenzaA__ACO95248
augaagacuaucauugcuuugagcuacauucuaugucugguuuucgcucaaaaacuucccggaaaugacaacagcacggcaacgcugugccuugggcaccaugcaguaccaaacggaacgauagugaaaacaaucacgaaugaccaaauugaaguuacuaaugcuacugagcugguucagaguuccucaacagguggaauaugcgacaguccucaucagauccuugauggagaaaacugcacacuaauagaugcucuauugggagacccucagugugauggcuuccaaaauaagaaaugggaccuuuuuguugaacgcagcaaagccuacagcaacuguuacccuuaugaugugccggauuaugccucccuuaggucacuaguugccucauccggcacacuggaguuuaacaaugaaagcuucaauuggacuggagucacucaaaauggaacaagcucugcuugcaaaaggagaucuaauaacaguuucuuuaguagauugaauugguugacccacuuaaaauucaaauacccagcauugaacgugacuaugccaaacaaugaaaaauuugacaaauuguacauuugggggguucaccacccggguacggacaaugaccaaaucuuccuguaugcucaagcaucaggaagaaucacagucucuaccaaaagaagccaacaaacuguaaucccgaauaucggaucuaggcccagaguaaggaauauccccagcagaauaagcaucuauuggacaauaguaaaaccgggagacauacuuuugauuaacagcacagggaaucuaauugcuccuagggguuacuucaaaauacgaagugggaaaagcucaauaaugagaucagaugcacccauuggcaaaugcaauucugaaugcaucacuccaaauggaagcauucccaaugacaaaccauuucaaaauguaaacaggaucacauauggggccugucccagauauguuaagcaaaacacucugaaauuggcaacagggaugcgaaauguaccagagaaacaaacuagaggcauauuuggcgcaaucgcggguuucauagaaaaugguugggagggaaugguggaugguugguacgguuucaggcaucaaaauucugagggaauaggacaagcagcagaucucaaaagcacucaagcagcaaucaaucaaaucaaugggaagcugaauagguugaucgggaaaaccaacgagaaauuccaucagauugaaaaagaauucucagaaguagaagggagaauucaggaccucgagaaauauguugaggacacuaaaauagaucucuggucauacaacgcggagcuucuuguugcccuggagaaccaacauacaauugaucuaacugacucagaaaugaacaaacuguuugaaagaacaaagaagcaacugagggaaaaugcugaggauaugggcaaugguuguuucaaaauauaccacaaaugugacaaugccugcauaggaucaaucagaaauggaacuuaugaccaugauguauacagagaugaagcauuaaacaaccgguuccagaucaaaggcguggagcugaagucaggauacaaagauuggauccuauggauuuccuuugccauaucauguuuuuugcuuuguguugcuuuguugggguucaucaugugggccugccaaaaaggcaacauuaggugcaacauuugcauuuga

SEQ ID NO: 34651 - RNA, 1701 nt, Artificial Sequence
  derived and/or modified CDS sequence (wt) from hemagglutinin__InfluenzaA__ACO95270
augaagacuaucauugcuuugagcuacauucuaugucugguuuucacucaaaaacuucccggaaaugacaacagcacggcaacgcugugccuugggcaccaugcaguaccaaacggaacgauagugaaaacaaucacgaaugaccaaauugaaguuacuaaugcuacugagcugguucagaguuccucaacaggugaaauaugcgacaguccucaucagauccuugauggagaaaacugcacacuaauagaugcucuauugggagacccucagugugauggcuuccaaaauaagaaaugggaccuuuuuguugaacgcagcaaagccuacagcaacuguuacccuuaugaugugccggauuaugccucccuuaggucacuaguugccucauccggcacacuggaguuuaacaaugaaagcuucaauuggacuggagucacucaaaacggaacaagcucugcuugcauaaggagaucuaauaacaguuucuuuaguagauugaauugguugacccacuuaaaauucaaauacccagcauugaacgugacuaugccaaacaaugaaaaauuugacaaauuguacauuugggggguucaccacccgguuacggacaauaaccaaaucuuccuguaugcucaagcaucaggaagaaucacagucucuaccaaaagaagccaacaaacuguaaucccgaauaucggaucuagacccagaguaaggaauauccccagcagaauaagcaucuauuggacaauaguaaaaccgggagacauacuuuugauuaacagcacagggaaucuaauugcuccuagggguuacuucaaaauacgaagugggaaaagcucaauaaugagaucagaugcacccauuggcaaaugcaauucugaaugcaucacuccaaacggaagcauucccaaugacaaaccauuccaaaauguaaacaggaucacauacggggccugucccagauauguuaagcaaaacacucugaaauuggcaacagggaugcgaaauguaccagagaaacaaacuagaggcauauuuggcgcaaucgcggguuucauagaaaaugguugggagggaaugguggaugguugguacgguuucaggcaucaaaauucugagggaauaggacaagcagcagaucucaaaagcacucaagcagcaaucgaucaaaucaaugggaagcugaauagguugaucgggaaaaccaacgagaaauuccaucagauugaaaaagaauucucagaagucgaagggagaauucaggaccuugagaaauauguugaggacaccaaaauagaucucuggucauacaacgcggagcuucuuguugcccuggagaaccaacauacaauugaucuaacugacucagaaaugaacaaacuguuugaaaaaacaaagaagcaacugagggaaaaugcugaggauaugggcaaugguuguuucaaaauauaccacaaaugugacaaugccugcauaggaucaaucagaaauggaacuuaugaccacgauguauacagagaugaagcauuaaacaaccgguuccagaucaagggcguugagcugaagucaggauacaaagauuggauccuauggauuuccuuugccauaucauguuuuuugcuuuguguugcuuuguugggguucaucaugugggccugccaaaaaggcaacauuaggugcaacauuugcauuuga

SEQ ID NO: 34652 - RNA, 1701 nt, Artificial Sequence; identical to SEQ ID NO: 34535
  derived and/or modified CDS sequence (wt) from hemagglutinin__InfluenzaA__ACO95281

SEQ ID NO: 34653 - RNA, 1701 nt, Artificial Sequence
  derived and/or modified CDS sequence (wt) from hemagglutinin__InfluenzaA__ACO95292
augaagacuaucauugcuuugagcuacauucuaugucugguuuucgcucaaaaacuuccuggaaaugacaacagcacggcaacgcugugccuugggcaccaugcaguaccaaacggaacgauagugaaaacaaucacgaaugaccaaauugaaguuacuaaugcuacugagcugguucagaguuccucaacaggugaaauaugcgacaguccucaucagauccuugauggagaaaacugcacacuaauagaugcucuauugggagacccucagugugauggcuuccaaaauaagaaaugggaccuuuuuguugaacgcagcaaagccuacagcaacuguuacccuuaugaugugccggauuaugccucccuuaggucacuaguugccucauccggcacacuggaguuuaacaaugaaagcuucaauuggacuggagucacucaaaacggaacaagcucugcuugcauaaggagaucuaauaacaguuucuuuaguagauugaauugguugacccacuuaaaauucaaauacccagcauugaacgugacuaugccaaacaaugaacaauuugacaaauuguacauuugggggguucaccacccggguacggacaaugaccaaaucuuccuguaugcucaagcaucaggaagaaucacagucucuaccaaaagaagccaacaaacuguaaucccgaauaucggaucuagacccagaguaaggaauaucccuagcagaauaagcaucuauuggacaauaguaaaaccgggagacauacuuuugauuaacagcacagggaaucuaauugcuccuagggguuacuucaaaauacaaagugggaaaagcucaauaaugagaucagaugcacccauuggcaaaugcaauucugaaugcaucacuccaaauggaagcauucccaaugacaaaccauuccaaaauguaaacaggaucacauacggggccugucccagauauguuaagcaaaacacucugaaauuggcaacagggaugcgaaauguaccagagaaacaaacuagaggcauauuuggcgcaaucgcggguuucauagaaaaugguugggagggaaugguggaugguugguacgguuucaggcaucaaaauucugagggaagaggacaagcagcagaucucaaaagcacucaagcagcaaucgaucaaaucaaugggaagcugaauagauugaucgggaaaaccaacgagaaauuccaucagauugaaaaagaauucucagaagucgaagggagaauucaggaccuugagaaauauguugaggacacuaaaauagaucucuggucauacaacgcagagcuucuuguugcccuggagaaccaacauacaauugaucuaacugacucagaaaugaacaaacuguuugaaaaaacaaagaagcaacugagggaaaaugcugaggauaugggcaaugguuguuucaaaauauaccacaaaugugacaaugccugcauaggaucaaucagaaauggaacuuaugaccacgauguauacagagaugaagcauuaaacaaccgguuccagaucaagggaguugagcugaagucaggguacaaagauuggauccuauggauuuccuuugccauaucauguuuuuugcuuuguguugcuuuguugggguucaucaugugggccugccaaaaaggcaacauuaggugcaacauuugcauuuga

SEQ ID NO: 34654 - RNA, 1701 nt, Artificial Sequence; identical to SEQ ID NO: 34569
  derived and/or modified CDS sequence (wt) from hemagglutinin__InfluenzaA__ACO95303

SEQ ID NO: 34655 - RNA, 1698 nt, Artificial Sequence
  derived and/or modified CDS sequence (wt) from hemagglutinin__InfluenzaA__ACO95382
augaaaguaaaacuacugguccuguuaugcacauuuacagcuacauaugcagacacaauauguauaggcuaccaugcuaacaacucgaccgacacuguugacacaguacuugaaaagaauguaacagugacacacucugucaaccugcuugagaacagucacaauggaaaacuaugucuauuaaaaggaauagccccacuacaauuggguaauugcagcguugccggguggaucuuaggaaacccagaaugcgaauuacugauuuccaaggagucaugguccuacauuguagaaaaaccaaauccugagaauggaacauguuacccagggcauuucgcugacuaugaggaacugagggagcaauugaguucaguaucuucguuugagagguucgaaauauuccccaaagaaggcucauggcccaaccacaccguaaccggagugucagcaucaugcucccauaauggggaaagcaguuuuuacagaaauuugcuauggcugacggggaagaaugguuuguacccaaaccugagcaaguccuaugcaaacaacaaagaaaaagaaguccuuguacuaugggguguucaucacccgccaaacauaggugaccaaaaggcccucuaucauacagaaaaugcuuaugucucuguagugucuucacauuauagcagaaaauucaccccagaaauagccaagagacccaaaguaagagaucaagaaggaagaaucaacuacuacuggacucugcuugaacccggggauacuauaauauuugaggcaaauggaaaucuaauagcgccaagauaugcuuucgcacugaguagaggcuuuggaucaggaaucaucaacucaaaugcuccaauggauaaaugugaugcgaagugccaaacaccucagggagcuauaaacagcagucuuccuuuccagaacguacacccagucacaauaggagaguguccaaaguaugucaggagugcaaaauuaaggaugguuacaggacuaaggaacaucccauccauucaauccagagguuuguuuggagccauugccgguuucauugaagggggguggacugggaugguagaugguugguaugguuaucaucaucagaaugagcaaggaucuggcuaugcugcagaucaaaaaagcacacaaaaugccauuaaugggauuacaaacaaggugaauucuguaauugagaaaaugaacacucaauucacagcagugggcaaagaauucaacaaauuggaaagaaggauggaaaacuugaauaaaaaaguugaugauggguuuauagacauuuggacauauaaugcagaacuguugguucuacuggaaaaugaaaggacuuuggauuuccaugacuccaaugugaagaaucuguaugagaaaguaaaaagccaguuaaagaauaaugcuaaagaaauaggaaauggguguuuugaauucuaucacaaguguaacgaugaaugcauggagaguguaaagaauggaacuuaugacuauccaaaauauuccgaagaaucaaaguuaaacagggagaaaauugauggagugaaauuggaaucaaugggagucuaucagauucuagcgaucuacucaacagucgccaguucucugguucuuuuggucucccugggggcaaucagcuucuggauguguuccaaugggucuuugcaguguagaauaugcaucuaa
